United States Patent Application Publication US 2007/0161031 A1 - sequence listing, part 19

SEQ ID NO: 23502 - DNA, 2300 bp, Homo sapien
attcagttatttgctcttcatttattagatttcattccaatctgtataccttttatttatatgtcttgccttttgtgctggttaggacctgatattgaatagaagtggtgaaaacagacagacatccttaccttgtctgatggggaaaacatccagtctttaatcgttaagtatgtaatgtcagttgtcagcttcccataaatgtcctttctcagttgagaaagttcctttctgtttctattttgctgagtttttatagcgaataggtgttgcattttatcacatgctttttctccatctattgagaagatcatatagatgttctcctttattgtatcaattaggtacattgattgatttttcacgttataccagtattctggtgtaaactccacttggtcatttgttactctttttatatatcactgcaggagtctgatccacagatcctgacccaacgacagatgaataacttacactgacacagatattatgcttgtctgtctggctgagagtctgggccgcttacagactcccaggagagtgctgtaaagagttgcagccgcgacccagacttgctggccttcccagcatttattcagcacacattaaacgacaaaagtctcaagtaaatgccactagaatgtaattaccgttgccaacccacttagtagagagcaatcatgcacccacagattgtcaacggttagtcttagaaccacatgagtaaacaagctatttagatagactgctctacattcctatgttaattacccttgctatagctcaaagaggattaggctgccttcagccataactctatcctgaggcttctgcaaaaaccttctggccttctaagaaagtttattttacagtttttcccaccatcctgactgaactcctacatctcactgcattggacttgcatatatatatgtgtgtatctatgtatatatacatgcatgtgtatatacacatacatatatttttgagacaggggctctctgttgcccaggcttcaatgccgtgtcgtgatcacagctcactgcagcctcgacctcccaaggctcaagcagttctcccacccaagcctcctgagtagctgggaccacaggtgtgcaccaccatgcccagctaatctttaagattttttgtagagacaaggtctccttatattgcccaggatgttcttgaactcctagccacaagcaatcctcctacctcggcctcccaaagtggtaggattacaggtgtgagccaccatgcctgggcttacttgctaatattttgttaaggattttttgtttctgttcatgagagatatttgtagttttcttcttatgtatttttcaggttttgatatcagagtcatgatgacattagaaaatgagtgacatcacccccttttctgaaagagtttgtgtaggatttgtattgtttctcccttaaaagaataataaaattcagtgaagccatatgggcctggagcttttgttataggaaggctttaaattatgaattcactttcattagttaatagatgctattcaagttttctattgcctcttcaatttgttttgataatttctgtctttcaaggaattttatccagtttgtcagatttattggcataaagtcactcatcgtatatatatatatatattttttttttgagacagagtctcgctctatcaccaggctgaaatggcacaatctcggctcactgcaacctctacctcctgggttcaagtgattcttgtgcctcagtctcccgaatagctgggattacaggcatgcaccaccatacttggctaatttttgtacttttagtataaatgtaaatgtgcctaattataaagccctaaaatatacaaagcaaaaacagacaaatctgtaaggaaaaatacacagattaccacttatagctagagatttcaatacttctttcttacagctacttgggaggccgaggcacgagaatcgcttaaaccgttgaagcagagattgcagtgagccgagatcatgccactgcactccagcatgggtgacagaacaagactctgtctcaaaaaaaaagaaaaagaaaatgaacccctgtaaagcaatttcagcttatgaacccctgtaaagcaatttcagctttgcttcatggtatatttgctttctatccagaggttaatttgttagttttcttaaaacaatgtttttcttaatggtcttattgtttagaagtaacaagtggactggaaaagtatatggggcctaagtttataacattgtcttctcattatcagggaaaa

SEQ ID NO: 23503 - DNA, 2300 bp, Homo sapien
tttcctattcagacctttaaaacaatgctagactctcagtctcttcaggattgggagggcctggaagaaaaagatctagctgtgttaatagagattctttacagatgcatattttcccccacaaagcacagctttgcaggaccatttcaaaatatggcaaagaaacatgttttggggtaaaatattttgactttcttctttgtcacatgtcatgccagagtcagactggaaagcaagtcaccatatatagggttaaataaaactcatctgatgagaatttatggtttgttgggcatgactccccaggccccttagataggaatttgggccagattaaaaaaaaaaaaaaaaatcaaagcttagtcctgaggcagcttctgaaatggtgggaaaaaatgtgagttttgaggaaacatttggttcagccattgttcttaagagatactgacatttcaacctactataaagagggaaatttaaagtattaaagtattaatgagttggtaggacccgcttttctttttttttttttttttaattcactggccccgaaagaaacttctctgtcaggccacaatataaccagataccagacacacgagatgttttggagggagggtggtggagccaagattgcagctccttattgaggaaaacagtcctcagagatccagagtcatttctcctgtgttcagcttgaaaaccttgggcaacttctggagatttcaacgtctcacagagtgcggaaacatgactggcgcagcatcctttccggaattggtgatgtccttcctgtaagggttgattttccatctcatcaaccaaatcgggaaagccgcagcatccttttctccaagaatgacaggtggtttatctcaggcttttctgtcccggcgcctttctctccaatgcagtctatggaatatatatatagagagagagcgtgagagagagagagacggagtctcgctctgtcgcccaggctgaagtgcagtagcgcgatcttggctcactgcaagctccgcctcccgggttcacgccgttctcctgcctcagcctctcgagtagctgagactacaggcgcccgccaccacgcccagctaatttttttgtatttttaggagagatggggtttcaccgtgttagccaggatggtctcgatctgctgacctcgtgatccgcccgtctcggcctcccacagtgctgggattacaggcatgaaccaccgcgtccggcctggaatattttaaaatatgcagattattaaccccgacacttttgaaagtcctttgtaaccaacttcctcctcaatataaaatattaatgtaatttggccgggtgaggtggctcacgcctgtaattctagcactttgggaggccgaggcgggtggactgcctgagctcaggagtttgagaccagcctgggcaacacggtgaaactccgtttctactaaaatacaaaaaattagccgggtgtggtggcgcgcgcctgtaatcccagctactcaggaggctgaggcaggagaattgctggagtccgggaggcggaggtgcagtgagccgagatcgcgccactgcactgcagcctggggaacagggcgagaatccgactctttaaaaaaagagaaaaaaatttaagtaatttaattttttatttttttccgcccccgccgtcccgcccctagcattaatttttaaaactcgctttagacaccgtttggagggggccaggtgctgaatacctgctgatgtaatgcagtgattttttgtttgagggccacaggaagaccccttgtggctgttgtactggcattccctcttcatagcagggatggtgcctctggacattttccgacagcagggatcgttgggtgaggttagcagcgccagcccgggttagcggaagcagccttcaggtctcctaggagagcaggtttatgagcatgcgcagcggattttccgttagggaagccgatggggcgcggctccttggagcatgcgcacacaaactttccgctaggaatcaagcgagcatgcgcacacagatgttagggttcgggcgagctatttggagcctgcgcagtcagatccgaggacatgttgacgtcgtccgagagtcttaaaatcctgctctggccggattccagactcgtgggggaaaggctggtatgttcgttttataacaggagttttagcgtcatcttttgtccttggataagtttttccaaatataaatatattaaatattcatttaaaatatctaagaattaacaggcagcagtgcattagacaaatgggcg

SEQ ID NO: 23504 - DNA, 2300 bp, Homo sapien
cctacaggcgcccaccaccactcccatctaatttggaggttttttgttgttgatgttctttttgtagatgtgggttttcaccatgctgcccaggttggtctcaaaactcctgtgctcaagcaatcctcctgtctcagtcttccaaagtggtgggattagaggtgtgagccacacacccagcctccagtttttttgttttttgtttttttttttgagacgaagtcttgctctgtcgccaggctggagtgcagtggcgccatctcggctcactgcaacctccgactccctggttcaagcgattcaattctcctgcctcagcctcctgagtagctgggaccacaggcatgcgccaccacgccagtctaatttttgtatttttagtagagacggggtttcaccacattggccacgacggtctccatctcctgacctcgtgatctgcccgtctcggcctcccaaaatgctgggattacaagcatgagccaccgcacctggccccttttttaatattatatgtttctagcttttttaaaaaaagttattgtagtgttatttttgtttttaatgaacagcattcagataattcaatatattataatgaggaatacattgagaagtctctcaccctatctcagtcctaccctccatctcataagaaaccatgactattagtttcttgagtatattgccagaatttatgtggaaataaggatcatatgactctcatttatccttttctacacaaaaagcataatttatacactgtttggcacctgggcttttttcgcttagtaagatatgctagagatggttccacattagtatgttgggaactgattcctcactctttttcatagctgcataatgttccattgtgtgtatgtactgtagtttataatatcagtcttctgatggatactcacgtagtttacaaccttttgctattacaatcaataatctcatacacatattactttacatgtatgcaagtgtatttggaggcaaaattccccaaagtgggattgttggatcaaaatgcaaatattattcagtgtggttttgataaccactaaggattgctgcattctgctcctactagcactgtaacactgcacctgttttcctgacaccctcctatattgagtatattaccaaacgtttcaatgttcaccaatcatgatgatttgcatttttattaaaactgaagctggcctgtaatcctagcacttggtgaaactgaggtgggaggattgcttgggcttgggaagtggaggctgtagtgagctgtgatcgtgccacctgtctcagaaaaaataaaatacaaaacaggccgggcgcggtggctcacgcctgtaatcccagcactttgggagtctgaggcaggccgataacctgaggtcaggagttcgagaccagcctggccaacatggtgaaccccatctctactaaaaatataaaaattagcctggcgtggtggcacctgcctgtaattccagctactcgggaggctgaggtgggagaatcacttgaacccgggcagcggagggtgcagtgagccgagattgcattactgcactccagcttgggcaacacaggactccatctcaaaaaaataaataaataaataaaaaacacaaaaacatgcagctaagcatcttttcatatatttaaagtctatttttaactactatttttctgtgaacttggtaccccagtacttcgcccatttgtctaatgcactgctgcctgttaattcttagatattttaaatgaatatttaatatatttatatttggaaaaacttatccaaggacaaaagatgacgctaaaactcctgttataaaacgaacataccagcctttcccccacgagtctggaatccggccagagcaggattttaagactctcggacgacgtcaacatgtcctcggatctgactgcgcaggctccaaatagctcgcccgaaccctaacatctgtgtgcgcatgctcgcttgattcctagcggaaagtttgtgtgcgcatgctccaaggagccgcgccccatcggcttccctaacggaaaatccgctgcgcatgctcataaacctgctctcctaggagacctgaaggctgcttccgctaacccgggctggcgctgctaacctcacccaacgatccctgctgtcggaaaatgtccagaggcaccatccctgctatgaagagggaatgccagtacaacagccacaaggggtcttcctgtggccctcaaacaaaaaatcactgcattacatcagcaggtattcagcacctggccccctc

SEQ ID NO: 23505 - DNA, 2300 bp, Homo sapien
ctcccttcatccatgtacctatctcattactgtccaattgtcttacctgtccttgcccaacattctgaaagcacagtctccaccctctcacctcccattcacccgttacccgtgacccagcttctgccccatcgttcactgaaactgctctctgcaaaaggctcaagtaccttctgtgttgttacacccaatacatatctttatatacctttatcatccgactcatacttttccacacttgatgacggccactgcttctaccgtgcaccctggctccctgattaaatgcctttgtggttgccttcctcctccttagtcgctctttgcaggccccctcttccctgcctacctcttacctgctgatttttcccagagttatagcccaagcctcattccagcctctttccattctagcctctgagggtgcggctactaaccaacctgcaagtcccagttgctgaacaaaacgtatttctctgctgcaccccagtgtctgacgcatttacattccacttctgaacacctctcatccctgaatatttgtcaccccttctccaccctgagaagtccccctccttccagtttccatcttaccctggtccattgtccaaaagtccgtaagaatgattttttttttttttttttgagacggagtctccctctgtggcccaggctggagcgcagtggcgtgatctcggctcaatggaagctccgcctcccgggttcacgccattctcctgcctcagcctcccgagtagctgggactacaagcgcccgccaccacgcccagctagtttttttttttgtatttttagtagagacggggtttcaccgtgttagccatgatagtctcgatctcctgacctcgtgatgcgcccgcctcggcctcccaaagtgttgggattacaggcgtgagccaccgcgcccggccaagactgattgttctagaacacatctgatcgtgtcatttctccatttaggttgcctcagtggttgcccattgcctgtatggccaagtgcaagctccttagcagcggaaatgaggcttcttaagatcaggcaaccccaccacgctgctccttcatgtgactctgttatagctgctttagtgaagtgtgaaaggtgaaatcaaaacgtctttttgttttgaggtcaaaacgcctttaagcagtgtgtttacatgactgttgtagctttctggaagataatgttggaaggtggtagctccggtaggcaaatggagaaaatgtctccactcgtgagtgtatttcgtggatgaccgcaggcaaaggacaggtcggcacaggggaagagaacagtcagatgcttccaccttttcactgttctacccatttctgtgctaactacccatgtagttagcagagaacaccccagtaacattgtccaaatagttcgtgcaaagttttagctagaagccgaaaattcgtgaaaggaatcattaatactccatgataaagtgcatcagtttgcagtaacatgcgtttgcaatcacattctttcgttctctctaaaggattattacgtgaataaaatggaaatactcccgcagtaacatgggactagttggaaaggtgccgggaaggggggagggcgagagactgcgtcgcggaaaaaaccgcagcgcggcaactgggcgcggactcgctcttaggcgaaatccgcaaacggtgtgacgtgtgcgcgctgtggccccaaaggccggtcttacagcgacctgggcgttcgaggtcgtgtcctcgagagctatagggagcctgccgaggccacctgacggcggtgtcgcgtctacactgccggttggactctcaggcacccgctactcagcgccctgcttcccggcgccgggaatcacgagcccgccagcaccgcgggacttgcagcgccctccgcccttcgcaggcggcccagacagccccgtcccgccctagcgttaggagacgcgcagcggaaccccggcggccccagcccctccccgcccgcgcgtccccgcgtccccgcgtccccgcgcgacccgcctcccagatcccggctggggctcccgggcgcgccgcggcagggcggggcggggccgggggcggggccttctggcagtttctgggagctgcgaacgcgccgccccggggctcggcggccggaaacgctggcttcggagccttaggcgccgcggcctttccttgttttccgcccagtccacgccgccatggccaagtggggccaggggaacccccactggatcgtggaggagcgggaggacgggaccaacgtgaacaactggcgct

SEQ ID NO: 23506 - DNA, 2300 bp, Homo sapien
tggtccattgtccaaaagtccgtaagaatgattttttttttttttttttgagacggagtctccctctgtggcccaggctggagcgcagtggcgtgatctcggctcaatggaagctccgcctcccgggttcacgccattctcctgcctcagcctcccgagtagctgggactacaagcgcccgccaccacgcccagctagtttttttttttgtatttttagtagagacggggtttcaccgtgttagccatgatagtctcgatctcctgacctcgtgatgcgcccgcctcggcctcccaaagtgttgggattacaggcgtgagccaccgcgcccggccaagactgattgttctagaacacatctgatcgtgtcatttctccatttaggttgcctcagtggttgcccattgcctgtatggccaagtgcaagctccttagcagcggaaatgaggcttcttaagatcaggcaaccccaccacgctgctccttcatgtgactctgttatagctgctttagtgaagtgtgaaaggtgaaatcaaaacgtctttttgttttgaggtcaaaacgcctttaagcagtgtgtttacatgactgttgtagctttctggaagataatgttggaaggtggtagctccggtaggcaaatggagaaaatgtctccactcgtgagtgtatttcgtggatgaccgcaggcaaaggacaggtcggcacaggggaagagaacagtcagatgcttccaccttttcactgttctacccatttctgtgctaactacccatgtagttagcagagaacaccccagtaacattgtccaaatagttcgtgcaaagttttagctagaagccgaaaattcgtgaaaggaatcattaatactccatgataaagtgcatcagtttgcagtaacatgcgtttgcaatcacattctttcgttctctctaaaggattattacgtgaataaaatggaaatactcccgcagtaacatgggactagttggaaaggtgccgggaaggggggagggcgagagactgcgtcgcggaaaaaaccgcagcgcggcaactgggcgcggactcgctcttaggcgaaatccgcaaacggtgtgacgtgtgcgcgctgtggccccaaaggccggtcttacagcgacctgggcgttcgaggtcgtgtcctcgagagctatagggagcctgccgaggccacctgacggcggtgtcgcgtctacactgccggttggactctcaggcacccgctactcagcgccctgcttcccggcgccgggaatcacgagcccgccagcaccgcgggacttgcagcgccctccgcccttcgcaggcggcccagacagccccgtcccgccctagcgttaggagacgcgcagcggaaccccggcggccccagcccctccccgcccgcgcgtccccgcgtccccgcgtccccgcgcgacccgcctcccagatcccggctggggctcccgggcgcgccgcggcagggcggggcggggccgggggcggggccttctggcagtttctgggagctgcgaacgcgccgccccggggctcggcggccggaaacgctggcttcggagccttaggcgccgcggcctttccttgttttccgcccagtccacgccgccatggccaagtggggccaggggaacccccactggatcgtggaggagcgggaggacgggaccaacgtgaacaactggcgctggcgcggctggcggcggcctccttccgggatctggggagggccgggccgcgggagccggggctgccctggggtctgtgcggggccgcggggccagggggtcagggggccgccccccctcagctgctggacgcagggctcggccttcgcctctcggctcgggagagtccttgagtacggagaccggctaggagggttgcagctgcctctttttgaaagttgggttgggccccaagagtgacttccgacagacctttccactcccaccgtctgtggcctgagggccttcccttctcctcccgcccacccctctggatgtttcggggagttagaagggagctggattgagagactgtgttaggggcgggggtatggaacgtagtggaaagggcagaaatttggatctcagttcgcgcccaccccgcaggcgcctcccgcgagccgggccctctgtgagtgagacaagctccccttcctttacgcgcctcacctggcgcgtggggagaggtcggcagccctccgccgcagaacctccggaagggatgtcctctgccctgcgcctctggccggggctgtggtccctccaggccgtcgaggg

SEQ ID NO: 23507 - DNA, 2300 bp, Homo sapien
gagagactgcgtcgcggaaaaaaccgcagcgcggcaactgggcgcggactcgctcttaggcgaaatccgcaaacggtgtgacgtgtgcgcgctgtggccccaaaggccggtcttacagcgacctgggcgttcgaggtcgtgtcctcgagagctatagggagcctgccgaggccacctgacggcggtgtcgcgtctacactgccggttggactctcaggcacccgctactcagcgccctgcttcccggcgccgggaatcacgagcccgccagcaccgcgggacttgcagcgccctccgcccttcgcaggcggcccagacagccccgtcccgccctagcgttaggagacgcgcagcggaaccccggcggccccagcccctccccgcccgcgcgtccccgcgtccccgcgtccccgcgcgacccgcctcccagatcccggctggggctcccgggcgcgccgcggcagggcggggcggggccgggggcggggccttctggcagtttctgggagctgcgaacgcgccgccccggggctcggcggccggaaacgctggcttcggagccttaggcgccgcggcctttccttgttttccgcccagtccacgccgccatggccaagtggggccaggggaacccccactggatcgtggaggagcgggaggacgggaccaacgtgaacaactggcgctggcgcggctggcggcggcctccttccgggatctggggagggccgggccgcgggagccggggctgccctggggtctgtgcggggccgcggggccagggggtcagggggccgccccccctcagctgctggacgcagggctcggccttcgcctctcggctcgggagagtccttgagtacggagaccggctaggagggttgcagctgcctctttttgaaagttgggttgggccccaagagtgacttccgacagacctttccactcccaccgtctgtggcctgagggccttcccttctcctcccgcccacccctctggatgtttcggggagttagaagggagctggattgagagactgtgttaggggcgggggtatggaacgtagtggaaagggcagaaatttggatctcagttcgcgcccaccccgcaggcgcctcccgcgagccgggccctctgtgagtgagacaagctccccttcctttacgcgcctcacctggcgcgtggggagaggtcggcagccctccgccgcagaacctccggaagggatgtcctctgccctgcgcctctggccggggctgtggtccctccaggccgtcgaggggatgctgaggccggtccccagaggagcatgacttggctggtccggaggagctctgagggcatgggcaatcttggctcgctgcaacctcagcttccagagttcaagcgagtctcctgcttcagcctcatgagtagctgggactacagatgcgtgccactacgtccgtctgatgtttgtatttttagtagagacagggtttcaccatgttggtcaggctgctctcgaactccagatctcgtgatccgcccgcctgggcctactaaagtgctgggattacaggcgtgagctagatctgactttctagtgtcctagccttggcccgatggacatgtcatttctctcagctcgtttctgtcccctaaagtgagaatattgcctgggaagattacattagacgatgtatatgcgaagacacttgatagctggtattgtcatgattctgattagttcactactgctactttccctgtggcctaggctttgcctatttccagtgggcgagctagctagatcctcctcccttaaataagccagtgtttttaagacagaatactacttgcatagtggacaataatatcttaaagaactgagcaggatgaaaagaatttgatagaaagcaggtttgaggagcacattggaggttggcaggtttcgaggctgcttgagaggacttgggccgatctgggctgggcttggacgtgaccctggcacccaggcaggtggatcccagctggggcttccattcacgactttctggtccctggcaggacagagcgggatgccaccagcttgtccaaagggaagttccaggagctcctggtgggcatcgttgtggagaatgacgctggccgcggcgagatcaacgagttgaagcaggtggaaggggaggcttcgtgcagcagccgcaaaggaaagctgattttcttctatgagtggaacatcaaactgggctggaaaggtaacaggggcctcagggtactagtggggctggggacaaagtgcgttcatcattcagcg

SEQ ID NO: 23508 - DNA, 2300 bp, Homo sapien
aaggtcattctatctttgaagaaagaaggtaaaagaggaaagatatgtttaattctccacttttttttttttttttttttttttacctttcccctcctccctcctgcagtctagccaccctatgaaaattatctaataggcagagtggtaccttaatccaagaaagatttggagccacttgcagtaactttttcttttcccagataaagttctaatactcaaaaaagaagagttgatttaagtcccatatccttcaggaatgaggtataggatataaataaattcaaagtaccacattctaagatatttcactaaacattggaatgaatttttcccctttatgtactttaaaatatagaaaatatgcagttatgactagaaatagctgtaatattgtacctgcagagttgagtatctcactagtataatttataattataacctattctgatttcttttcaaatattaggtgtcctagttgcctatgaaggtttgccacttcatcttgcactgttccccaaactttggactgagctatgccagactcaggtaaagaaaatgagttttagatgattggtctttaatcttatctgaccaagtggtcaataattttaggaacagtgggttgaagacttgctgaaaagtggggacattttagaatcttgataggtaacatatgaatgaatgaaaatactagctattacatattaggcatctagtttccctttgatttttttaacttaagtagatttctatcatagaggatattttaaataagctggttataattgaatttctcatttatagatgtatatcaacagttgtggggaaaatccaaaacagggagatagtgggggaaaaggcacttgccacttcttcctctccttcacctccctgtctctacctcttttccaccattccaaaacctctagcagaaaccctgtcagcagtctgtcctttagcttttcataatctgtagtttttcaggggtctgatgcacttgttttcttacagcgatctccttgaaaacaggaaagattactgttcctaccttaagtgtctaagagccaactccttaaaattaagtggctgcataaataatgcttgttaagttacaaaggcagaattgggaagaggaggaggtactaatgtttggctcattccttggatcaggcataaaggatccccactacctttcagtccctgaaaaaactgttgattgtactgcctggttgcatctgctctaccccattggaagagatgaatttattcaccttccttaggtgcaacccttgacccacatcatgctttcctgaagtattttgagtctggttcagcctcctaccaggctgtagtgtgctctggattctcctagatgtttgccatcctgtactctactggtggtttctctacttttccaaaacagaactcaagtgtagagaccttatcagagtcatctccatcccctgaagaaatgccacgttgttctctacagtagaaatctttcagaggctagtatacactgatcttagctcacttgacttagcatacagtaggcattcagaaaatgacttttatcagttgatttttgagctgagtgttctgttcagtcaattggagatctcgttttccctctccactgctactgctgttctttttcattcttcctgatttgggtagtttcttggtttctgtactctcccactacctattgctccctattgctttctctacttctgcatcgcaggactcccttcgcttgacttctttcacagacagaactcactgtgcccccaaatttcccttaaaacaaagcctaaccatataaggcctccaaagcttccagtgctatagaagcagccatcctgagcaagaaacagaggcagaggcacaggctgtgactggtagaccaaggcaggtttttcctagtgttaaggatctcaagacctgggtcttggtcctacttgaatcctaatttcttgactgaccttgagtaatttacttatgacagctgcatactttaataagatatacacatatgcatatatatatatatataatctaaattttgtcctatttaaaaaatatattgcttttttccatataaattattaaaatgcacatttaaatctatggagtgtatctgcttaaagacatactacttgtgtttaagagccatgactatttgaaaacaggaaaaccaaattttagtaaaatttccatatattgagaccactgattctgtgtgagataattaggaaagaagatttattgtttacccttgcagtgtttatgggggg

SEQ ID NO: 23509 - DNA, 2300 bp, Homo sapien
ctaaccatcaggaaatgtttgtcatgaactcctgatgtaaagctggaaggctcttttatgtttttgtacctgcctgaaaaatacgcaagcaggtatcaagatttcagagattggaaaacatttccaaacacagtaacaagctgggcactttgtaaagattctccagctggaaacttctttggcttagattagatcatttgcagtttcatgcgagatgactataaaacctacctgtcttatgtccctataagatactgtgaactctgaacttcttcatatacattcctagaaagtgggacatattatcaatgaaatatgttctttaagaaatctagcaggtttaacattagtagtaatcatctcatgaaaatgacttagctttcactgaagatgtttttgtaattaacctgaatttctagcattagcattctgtagtttacagtagaaaacatttgtgaggaagtttgatctcagatggcatatttatatgtgcttttatatttgcagatgtgaaacaagcattaatccagtggcaggagcgaattgaatttgcccataaactgttaactcttcttaattcctatagtcctccagaacttagaaatgcctgtataggtaagttacttgaaaaattcacccgtgtaaaaacctagtggaagaacattgttgtgagtttttccgtgatgttaagcctgtagtgtttgaaagatacttgtgctttttatgtgtaactcacactagctagcaggtcctaagaaaataaagaaaatttcttaactggctcataattacattacccacatgataatgggcagattacttaatatatacagtctccccgaccttagttcatctctagcttcctccagctctaaaatcttgttatcctatgtaagcaaggttgaaccatataaatgtttacaaggtagaactgacattctaaaggataagagtacttatttcactgtgagttcttttgcctaaagatacttctcagtagctgtccttaggctctgagtattgcatctttttattgattgcatatttataataaaatgctaatttgtggcttttaaaagacacccattataaatttatagtgatttttttttcactacattagaaacttctcgagagaccgtaactattttacactttctcaaaatagcatggataactaactggctgtcatatataagcagtccgtcttgacgttctgtgcaattacttctctagcaagaggggaagggcacacaagcagtaacctatgatcaccagaaactgcctatagcctgtcatcgtgagatttattccttcctgtgtgattggagattgagaatcagtccagccagcatcgtaaaacattaaaagtagattaaggattatccctcaaagcaaaggaactttgaaccttagttttctttctaagctgttttggttgattttatgagacacataatcaacgtacattaaataatctgggctggctcatgcctgtaatccatgcagttcgggaggtctaggcaggaggggattgctcgagaccaggaattcaaaagcagcctgggcaacatagcaagacctcatctctacaaaaacaaacaaaaaaaatagctgggtgtggtggtgcatgccggtagtttcagctacttgggagcctgaggcaggaggatcacttgcacccaggagctcaaggctgtagtgagctgattgcaccactgcactccagcctgggagaccaaaaaaaaatccctcactgtatgttgccagaaaatatctcatacttaaaacaaaataccaataaatagtgttttaatcttttgtttccaaatgatgccctattgtcgttaataactctgttgatctaaacttgattgagcataagacagaatttctactcgtgtcaggagcttagttttagactcattaaactggttgtagtgaggcaatcataggatttgtaagatggaaagtagtaggcagatataactcttaattttttgctacccaaactttgtttttattttcagatgtcctcaaggaacttgtacttttgagtccccatgattttcttcatactctggttccctttctacaacacaaccattgtacttaccatcacagtaatataccaagtacgtatttatctagcacagtacttcaatatggttcgcatttaatcgttctgcacactgaagcatggagatttattttttccatttattcttactgtacacttttaatatcttagtgtctcttggaccttatttcccttgtcgagaaaatatcaagctaatagg

SEQ ID NO: 23510 - DNA, 2300 bp, Homo sapien
atactattagaatctgatgaagacagacttcttgttgtatttaatcgaggattgattctaatgacagaggtaaatattctattgcattttactgtggatattatctcattttaatgttctcaccaagacttactttatagacatttagagtttatggtaaactgttttacaggtggcaaggttttaattatatagatcagtaaacctgaatttatatcccaagaataattaggtcataatttttagggtgctgttcctttttccatagtaattccatacttttcccattattttgtatttagaacagccatttgaaatagactagttttattcatttgtagggacaaaaatgaaatacatgtgatttcattaagggcacacataatttcccaaaagcctacttatttgacagtatagaaactgaggttaccattgtgaacccggaaaatctgagacaggtctcagttaatttagaaagtttattttgccaaggttgaggacgcgcccgtgacacagcctcaggaagtcctgatggcacgtgcccaaggtggttgggacacagcttgattttatacattttagggagacatgagacatcaatctgtatgtaggaagtacattagctctgtccagaaaggcagagacaacccaaagcaaggcctctccttcctctggggccttcctggtcacaggtatgtgagagacagatggttgcgttcttttgagtttctgataagtctttccaaaggaggcaatcagaatatgcatctatctgggtgagcagagggatgactttgaatagtatgagaggccgatttgccctgagcggttcccagcttgaaggggcccaagatattttcctttcacaccatcctcagaggaaaccagaaggactattacagggttaaaatcagctgtttatgcttcctataattcttgaacatccacaagtatgagatggctgcagagtcaccagaggtacgtgagccctttagtctgataaacatgccaagagtaccataagaattcacaggtaggatgttttttcagttaatgataataaaaaataagagaacaggtttgcactttgaagaatgtggatttgcaaaggtaagggggaaaacatttagataaatgacaataagcactgaggcaaagaaatattggttatgtttgaggaaggctaagtattaaaaaaaaggtaggtgaagaggagtagtaagaatttcattctttaaaatgcaacagatgtttatgctgctttggttgtatttttagaaaaaaaaaatttttttttaatgcaacagatgtttaaatgtctacctctgtgccaagcactgtggtaggtactagggacacagcagtgaacaagacatactggtttctgtccccacagcttacaagttacatactgtacaagtacattgttcatattaggtactgctgcaggttctgggctaagaattttaacatttgaactgtgggtattacagtgtgtaagctgtagtgaactggtggaagaggattcaaagaagggtgctgtatagtaaaataggaaaaaaactaagggcttaattaagctaatacagttaaaggaattaaaagatttaacaagccaatataaaggaaatgaattcctaccttttgcagctctttttacctctttcaggcctactcttttgagtatggctgacagtcactttaccattgtctttggacagagaccctggaaagttggttaaagcagttgcctattctccctaatcttttgtgacctactgctttgtaattttgaagacttaacaatcttagagcaagtacttttttaaaaaaatgtgattaaactatttcttcagactagaatatacacacaaaatagcagagctctgaaggtgaggaatgtttaaaagagcttaatgagagtttaacttcaggatagaaagcaaatacgtttgctttgcacacatgtgcacacacagtctgagtctgaaaacatctatcgtagaggacgagtactaccattttgtggctcagtaagcaaaaatgaaattaagttttcaattttttcaaatcatttgtagtctttcaacactttgcacatgatgtatcacgaagctacagcttgccatgtgactggagatttagtagaacttctgtcaatatttctttcggttttgaagtctacacgcccttatcttcagagaaaaggtttgctcattcctacttcttatgttttgttcgtgctactagtaaagagagagaaggttttaaaatcatgtgccccagagaaattgttttta

SEQ ID NO: 23511 - DNA, 2300 bp, Homo sapien
tacctgtttttcccctggtgggaagtggtggcagaatatagaatagtctcaccattctttcttaagaacttaatgtgtatttgttttcttaaatacatatataaaatgctgtgttgttataaaattgataactgtgtagataacttttcttagggtgaagttaaagttgcatatccagtaaaacttacctgttttttaatttgtggttttgtaaatgtattcttcatgtgtgcctaatgaaaaaagccagcttcatggtacagttttaaggaattgagtactttgctatttaaaaatcagatacttagcaaaatctacatgctgtggtaaactgtgagctagacaattttatatctaaaactagtagtattccgcagtattttttctcaagctgcatccaaacaaatgaaatgcttaagagatcaatcgagatacatatatatgcagtctaaattgggtcccttttactctgcacacttacttgtaggttttatattaagtttcctcccctcgatgtaaagctgtcaaacctggttaataacttttcactgttgcctcttattctctgttgtaaactgtactttaaagacagaccgtcctttatagacggtctttttttttctagatggtgtaatgagttgtatagaatctcacacctgggaagaataacctaatttctagtcagagaaaattagaatcccaggccggcatagtggctcacacctgtaatttcagcactttggaggcagaggcggatcactcgagcccagcagttcaagaccagcctgggcaacatggcaaaactccatctctacaaaaaatacaaaattagctgggagtagtggtgtgcacctatagtcgcagctgcttgggaggctgaggtgggaggatcgcttgagcccaggaggttgaggctgcattgagacattgtactgcaccctgggcaacaaagcaagactctgtctcaaaagaaaaaatcagaatccctacaatgcaggaaagagagtgagtgtacaagtaccaagaaattgaaaaccaatgccataagaatacaaaatatcaatctttctgacttcaaaggggtcgggataggatttattaagtttcagtaaatttgtctctatcatattcacataaataatatttgatctagttactagatgtgatgtccagaattaaatatactttgacaagtactagatgagttagaatttatccctccatgttatttattgcccttgacatcagtgaaatgtaatgtcttttattgtagaatgtccttatctattagaaattttcatgaaaatggtacttaagtcagttttttgctttgaaaaataagaagctgggggtttcagttcattgacaagtatgtgttagaagagcagtcctctcctgacatgtgcatatgagtctataaaatcacagctagtgattttactaaaatatttgtttttactttttattcatcaggaaattgaactgagcatcattctagaaaagcattttaaatgttggaacaaaggtttacctcatatacactattaatttaagggttatttaggcatttaaaatctttgtgacaaagtaatgatttctcattaattaaagaaaaagtggataggagatggtgtggcatgcctctgggtttacatttgaagttacaaaagtagtgctttaagcagtaataagactaaaaatgaattgtattcacttacagtttttactctttctaaacttgtattttaagatttgttgagttcttttagtgtttattattattgttattatttgtattttagtagagacagagtttcatcatgttgccctggctggtctcgaactcctgagttcaggcaatctgcccgcctctgcctcccaaagtgctaggcatcagccactgcgcccagccaaaattttttaaatagaatttgttactgattttataactttctgaatggaagtataatctagcttatttgtataattttaagagttgattaatgaacgtagaaatgagaaactgaccttctaaaatgctatagggttaaaagatcatatggcttatttggcttttttaggcagtagaagaactgtttaacctgatgcagctgtttatagctcagaggccagatatgagagaagaagaattagaagatattaaacagttcaagaaaacaaccataagttgttacttacgttgcttagatggccgctcctgctggactactttaataaggtaaaaagatgtttttagttttgtcttgtttatttccagtgagatgaggaccatccttttg

SEQ ID NO: 23512 - DNA, 2300 bp, Homo sapien
agataaaaatattaaattgtagggttttgcataacttatttaaaactaaatttgaattggaaatatctgtagcagtttatggtatatttgcaaacagaaaatctgttacagaaaatctgttacagaaaatgttttacctaccactgttttctgaaaagacctggaaaccctgtacaacccagaatcaatgagtacccttggcatctagggtatagtctctaggtttcatttcccactgaaagaattggggttccttggaaaaacgactagttacagttcttgggaaagaaatgaatgagaagtttggaatgtcttgtcattttggaaagcaaggaggcagtctaagactactgaggtcatggtaaagaaactcaagagccaacttacggaggtttctactggtcatagattgaacagctttgagcatcggtaataactgcagtggactgtgaatcacatcaaagatgtttaaatccatgagttcataatacctaaaaagaaatttttttttagtttacttgcaacttttggagtatattaggaaatcaaatcattatttttgaaactgataaataatggaaaacagtatcaagcatttattctacttgcaagtatacttcgtggcaaccaaatggtgattgaggggaagtttgtgttcttatatgtattcaagctaattaatgagcaaggacaattggaattagaatatcactgttttggaatcccagatgaaatgatggatctaggcagttgtcaccactgacagaaaaccttacaaaaagactaacccttcattgtgtgccttctacaagatactgttaattaaaaagtcaaacctagatctcatcaagtctggatctgactaccagtttatagaaaatgcagggacagagaaacatgttaagacagcaccataaggatacaatcagcaaagtgtaaatgtgagagaaactacaggacaaatgaccttcaacagataaattgcaaacacaaagctggtggggaaaccaatagattaaaatatttaagagacttttcaactaattatggcaaaaggctttatttgaatcctgattcaaacaagttaattttaaaaatctttttagaaacttcaggaaatgtgtacgctggatattgtatgacagtgcggaattattcatttaggcatgaataatggtaccgtggttgtttttgaaacctatctgttaaagatactatgatttatggattaaatgataaaatgcctggaatttgcttcagaataattcatattgagtggatgggggttcaaatgaaacaagactggctctgattttggtaaatttgaagctgactgatggaatacttgtactattctgttttttaatatagctgaaatttttataagttataaaagaaatatgcaatctaggtgtagtggcttgtgcctgaatcctggttacatagaaggatcccctgagcctagtaattcaaggctgcagtgagctgcgatcacatcactgcattcccgcctgggcaacagaagtagactccatctctaaaaagaaggaaagaaaaaaaggaagaaatatacagtaattttaaactgggagatgaaatgctaatttctagaagtccatttggttttgaagggtctcatgtcaaaaaaaaaaaaaagtaagtaaaataagacccatcctactgttttatatactaaaatagtaagttaattaaatgaaaatgaagtacatttgggctttcatttaccaatcctggaatgttgaaaagttgcccaaaagacatttagcaagcaaatgtagctagcaaaaaatcattttatgatggcaggttaatacaattataattgaatcaacaatttttgatacatgttgtaaatcgctgtaaagtaatacagaaggaagaaaaacttatttccactaatattttctttcaggcatttgacattatcacagactgacatggcagcattaacaggaggaaaggtagtacattctctaatattagacaatttgatcatcacaaaaataataacggttcttaaatgaacaacttttgcttttgacagggatttcccttcttgtttcaacatattcgtgatggcatcaatataagacaaacttgtaatctgattttcagcctgtgtcgatacaataatcgacttgcagaacatgtaagtgctaaggaacagtcttaaagatttttggaaattttaaaaaagaataccctgaaatctggccgagtgcggtggctcatgcctgtaatcccagcactttgggaggccaaggcgggaggatcgcttg

SEQ ID NO: 23513 - DNA, 2300 bp, Homo sapien
ctgcaacttccgcctccagggttcaagtgattctcctgcctcagctttccaagtagctgggattacaggcgcgcaccaccgtgcccagctaattttttgtatttttagtagagacgggatttcaccattttggccaggctggtctcaaactcctcacctcaggtgatttgcccgccttggcctcccagtgtgctgttactacagccactgcaccagcggtaaactggtgttttttgtttggttggttggttggtgttgtttttgagttggagtctcactctgtcaaccaggctggagtgcaatggcgtgatcacgtctcactgcaaccgccacctcccggcttcacacagttctccctgcctcagcttccttagctgagattacaggtgcccaccaccacgcccggctaatttttgtatttttagtagaagtggggttttgccatgttggctaggctggtctcgaactcctgacctcaggtgatccaccacagcctcccaaagtgctgggattataggcttgagccactgcacccagctggtaaactgtttttttatagtgactgcagtgtttgacattcttgccagtgatatataagtgttctaatttcaccataatcttcagcagctgatactgtcttttattttagccatcctagaaggtatgaagtggtatcttattgtggttttggtatgcatttttctcaaaatggttacacatttttttcatgtgattgtgggtcacttgtgtatctttaaagaatcctcacatttccttctcctagctgctgaccccatgatgagcagcggcccttccccattccactcttcttaaggaattggatactagattttcttttctctgtatctccactagctaaaaggattttttgaagctttgtttttgatcatctgtattactgaaatgtacagtttgttgagttttttctctttatcataaaactgaatttttttaatgctacctttgcctcatttccttagtccattgttgagactccagaagagctccagaataccaagataatcttgtgcaaactataaatgggtggcagagaattttgaatcatgttaatttttcaaatctttgttacctgatgagttggctcttgtttgatctttttctttcttcacagatgtttcagcgtttgtgtatccatgtgattcagaggctgagacctgtgcatgctcatctctatttgcagccaggaatggaagatgggtaagaagtactttttgaataagtttgtgtgtctgtgttgtgtgtgtgtggtgtttttgttttttttttttgttttttttttttttttttaagagatagggtttcttcatgttgcccaggctggtctcaaactcgtaagttcaaatgatccgcccgcctcggcctcccaaattgctaggattacaggcatgaaccaccatgcttagccctaatttttaagtttcttaacaacctgcctacaaaatattttttaaaatccacactgaaatatttgttctgtttaaaaaataatctgtaataatacattcaagaaggtaaaactgtttttgttttatttaaattttgcatctgcaaaatcctctacaaattactttatggcttagtctttttgtttgcattgatttagccagtcacaataactacttaagttattgcggttcatattcattatctcaaagataaaagaaattcagagtttaaaaagtactttttctctcgaacagtatttccagacctcatacattctctaagatctatttaattgtctcttaggtcagatgatatggatacctcagtagaagatattggtggtcgttcatgtgtcactcgctttgtgagaaccctgttattaattatggaacatggtgtaaaacctcacagtaaacatcttacagagtattttgccttcctttacgaatttgcaaaaatgggtgaagaagaggtgaggctatatcttgtctatttttttgattatctaccttttttcagtatttgcaacttaattgcttttattttatatttttaaattttgtttgtttgtttgtttagagccaatttttgctttcattgcaagctatatctacaatggtacatttttacatgggaacaaaaggacctgaaaatgtaagtacagttctatcgtacattaggtattagaggctctggttttcatagtttgcatcgtgcgaagtcctgagatgttagaaccctttaaagtcccttctggaacctggtgttagataatatgaagggtctaagattggttgatgtttttaatgtaa

SEQ ID NO: 23514 - DNA, 2300 bp, Homo sapien
tgcccggagctgtctgtcagttatctctgttatttgtcataataacttctaaaagttatctcagttgtctacattctgttaatttgtcctttgaagaatctgttgtgtctcatccttcttctgtcacaaggtcctccccttttatgcttgcagctttctagctgatttatcttagtatcccttaattacaatgcctaaaactataaaagtgatcaatcttttaaaaagatagtaaatcttacaatattattcccctgcttaaaactcttgagtgcttcttcattacgaacagaatggtattcgagctcatcaccatggcacacaccctctgggttttttccccctacccttcaacctcctatcttatccctctccatttggagcccatcaccctgctgcttcattgcttgtgggtttatttatgccattgtttcctacctgtgtcactcttctccattttcttctgatgttcatttttcaagagtcagcttggtttcaaactctaagagaccatctattccacagattaaccggagtattccaagtcaccatgcctctttgttgtttctgccttgtatatatgttacttttctcacctgttaaatcttgaggacagggattgtgtcatacttctttgtgtatttttgactatttttattttttgaggcagggtctcactctgtcacccaggctagagttcagtggcaccatctcgtctcatggcaacctcgacactgctccactgcctgggaccacaggcttgtaccaccatgcctggctatcttctttattttttgtagagacagagtctcactatgttccccaagctggtgctgaactcctgggctcaagcaatcaactcgccgtaccctcccaaagtgctgggatcacaggcatgagctatcatacctggcctttaatctccttttaacagagctgcaagtgccatttgaattgacaaatagaaaattgctggtttaaatgactattttaaaagctattaaaacaaagttcaatctctgggaaagtttattcggcctgtaaaggttgtatattttatgctttgcaatatagatgtgagtgttttttttgtttgttttgttttgatttttttggagatggagtcttgctgttgccaggctggagtgcagtggcacgatctcggctcactgcaacctctgcctcctgagtagctgggactacaggcatgcgcaaccgcacccagctagtttttgtatttttagcagagatggggttttaccatgttggtaaaggatggccaggatggtctcaatctcttgacctcataatccgcctgcttcggcctcccaaagtgctggggttacaggcttgagccactgtgcccggctgtgagtcatttgagtctcagatttcttcctagaaattccttgacttgaaaatacaaatatcctaggtaatttaagaatcttctagcaccaagaccattaaattaaaaatactatgaaaactaaacagaaagaaatagaagcaaccatttaaaactaacttagtagatttactacctgttcttttgtttttgttatatgttcattgaagaacctataattttcttatttttatctgacacttagaatgttcccctttttatttgcaggagagtgaatgcaaagcatataatcctagacctttctgtaaaacatacaccatggataagcagcctctgaatactggggaacagaaagatatgacagagttttttactgatctaattaccaaaatcgaagaaatgtctcccgaactggttagtatcagaatactgaaaagtttctttgaaatttgaacaaatttgcctgcgttttaactagtttcttattttttgtttgttttatattaaagaaaaataccgtcaaaagtttatttggaggtgtaattacaaacaatgttgtatccttggtaagtattatacctggtttttactttttggagatcttaatatattttcatttatattataatttactagtttttattaattttttatgtgtattgattaggattgtgaacatgttagtcaaactgctgaagagttttatactgtgaggtgccaagtggctgatatgaagaacatttatgtgagtaataatgcacataatttttttactttatgcttttacctatttgtgtatagcgggtttgtgttggtcatcttgatatttttaaacttttttcatgtttttatgtattttcttcttactgtactattcaaataagagttaaacatcaaccataaagctttttcttgcccaatcaaaatttaa

SEQ ID NO: 23515 - DNA, 2300 bp, Homo sapien
acaatattttattacagcagcctaaacagactaagacaacagttcttttattggacaaatacccaaaccatatcagtcaccaaaaactatttttaatattctctgaggtcatagtctgtgtaggttcttctttctgtgaagtatatgagtaggttctttctgtgaaaggcttataaaaataagccctttgccaggtgcagtggctcacatctgtaatcccagcactttgggaggctgaggctggcgaatcacaaggtcaggaggccgagaccagcctggccaacatcgtgaaaccccatctctactaaaaatacaaaaaattaactgggtgcggtggctcacgcctgtaatcccagcactttgggaggccgaggctggcagatggatcacgaagtcgggagatcgagaccatcctggctaacacagtgaaaccccgtctctactaaaaaatacaaaaaattaagaccgggtgttgtggtgggcgcctgtagtcccaactaattgggagtctgaggcaggagaatggcatgaacccgggaggtggagcttggggtgagccgagatggcgccactgcactccagcctgggcgacagagcaagactctgtctcaaacaaacaaaaccacaaaaaattagctgggtgtagtggcaggtgcctgtaatcccagctacttgggaggctgaggcaggagaatcgctcgaacctgggcagcggtggttgcagtgagccgagattgtgccactgcattccatcccaggtgacagagtgagattctgtctccaaaaaaaaaaaaaaaatctcctaaccactttccatatttcctagctaaacttaacgtttctttgctaagaactatgaattacacattctttaacaatagatgaaagaggtgaggtcattatggaaaaacatttcaaaaatttctgtttttggtacgtctttcaagagtttccctgaccacccccaggtttgttgattcactaactcacaggactcagcatatagttatactcatggctaagatttattacagcaaaatgatacaaagcaaaatcatgaaaagaaaaaggtgtcaaggcgaagtctggaggaagccagttgcaacttaaccaagggttgtcttccattggagttccacaagatgtgttcagtgagcatgacaacgcatgtgatgtattgtataccaagaacgttctcttgagcctaggagtccttggttttatcacagggtggctcatgtgggcacatagtgactggataactcaccatagttgccccaactccagactcctgaaaggaaaacaggtctttagcataaacccgttaggcacagtgagccactgttttcacttagagagttttgtatcaatgtagggagctgtttacttaccagtgacgtttgcagactgtaggcaaaggtcagcctttctgtgggtatcaagagtctcagtcttactgtgctatctcttttctgcacagtactccaggaggttttatactgcagaccaatgtaccatagtactatttgggatgtgtgagggtgataacttggtaaaatagcaaaggaccaattagaaaagaataagtggaaaagataacccagcacccactttctcagacagacttaattttggaaaaagtacaacagtactacctttcaacagtataagtaaactgttgattttgccactgttattgttgctattatttattagtagagtgaagtaaggggaaagttaatgcagaagcgccagtcagacttgtcaagggaataatgaggccttaacaaaaactttacatcacttaatggaatagaaaataacaacattgtacgtgaagagtctaagaatgagcttattaggtatcaaaaaggagagaagagtaaaagttgatcgccgccttcgttttctcttaagagaaatgaacacggaggactttcagatgatggtatatcatgctgctatacgtttttgagtagcttaattgtagcctgtcatcctgtgtatatgttaactatatttggaatgtaattaatatctcagtttagataacatgtttccttttactccccaggaatttttgagagatatcttcaatctcctgtttttgttgccaagtctaaaggaccgacaacagccaaagtgcaaatcacattcttcaagagctgccgcttacgatttgttagtagagatggtaaaggggtctgttgagaactacaggctaatacacaactgggttatggcacaacacatgcagtgtaagcattcttcttttcctttaatctttatagattttgaat

SEQ ID NO: 23516 - DNA, 2300 bp, Homo sapien
tgaattcaggtgatccatgcacctcggcctcccaaagtgctgggattacaggcatgagccaccacacccagcctcagtgctggttgttaatgagaggtcttggtactttctcatgtggtctcctctttaggctgcttgagtgtttttcagtgataggtggcttcctctagagtaagtgatccaaaaaagagcaaggcagaagtgacaatgtcttttatgacctagtctcagatgtcacacattgtcacttccaccactttctattcactagaagtgagttccgtctacacagaagaatatcaagtaatttgtggctgtacttcaaattcacacttggagaaataagattatttccacatgatcatacagggcattggtgatctatttggactacaatatagttgttttgatctgatgctattactgggtgcagattataaattatagttgcttagctgtcatctggtacaagtattattagaaccaggtacttgcgtatgtattaattgcctattgattcaccagaccgttccctgcctttttttgagacatggttttgctctgtcactcaggcatgatcagggttcactgctgtctcagcctcctgggctcaagcctctcgaatagctgggactacaggcacaagccacgatgcctagctgattctttaatttttatgtttttgtagagatgggcctcattatgttgccctgggttgtcttgagctcctggacttaagcgatcctcccaccttggtctcccaaagtgttgggattacaggtgtgaaccactgcacctggctgagatccttttaattatctacatatgccaggcattgtgctactaactgaacatgtctaaggagaactggatttgtttgtaatactttttttttgagactgcgttttggtcttgttgcccaggctggagtgcagtggtgtaatcttggctcactacagcctccgcctcccgggttcaagtgattctcctacctcagcctcccaagtagctgggattacaggtgcccaccaccatacccagctatttttttttttgcatttttagtagagacagggtttcaccatgttggtcaggctggtttcgaactcctgacctcaaatgatccacctgcctcagcctcccaacgtgctgggattacaggcgtgagccactgcgcctggccaatattttttttttttttttaaatacacatatatttttttttacaggagcttgggggggagagagagagagaaagagagagtgtgtgtgtgttgttcctaaacacttttgatttgccagatagcgtcagagcacccctcccaagtagccttcaaggacattaatctaaaaatgtggctgttttattagttgacaacaaaattccttatattaaataaccagctggctttactaataagatattttgttataagtttcctaataacttgctaaacatatattgagtacttgacactggagaaacaaaatgtcacaattcttgtttttaaatagttccatgtgtagaaggacagacaaatccatacgtaaaactgaagataatagctgtaaacctaacatgatgactttacactaactaaaatatcagttgttgttgcgatgctatctttatgttattaaggtgtaccccagcaggaaggaaaaaataaaaacaagtctagaaataacttagtatttgcttacttgtttttttatattattaaaaaatacagctgctgctttattactaatttattcaattttttttctcttataggcaatgtctatgctgcttcaaggaatataagcatttggagatttttaatcaagtagtgtgtgcacttattaacttagtgattgcccaagttcaagtgctccgggaccagctttgtaaacattgtactaccattaacatagattccacgtggcaagatgagagtaatcaagcagaagaaccactgaatatagatagagagtgtaatgaaggaagtacagaaagacaaaaatcaatagaaaaaaaatcaaactctacaagaatttgtaatctgactgaggaggaatcttcaaagagttctgatccttttagtttatggagtacagatgagaaggaaaaactcttactatgtgtggcaaaaatttttcaaattcagtttcccttatatactgcttacaagcataatactcaccctactattgaggtatgtaaaataggtggtgtgaattttaagtaataccaagtcttaacttcgcagtctgtttcttactgataaatatgaagacagttttctgctggcggaaaa

SEQ ID NO: 23517 - DNA, 2300 bp, Homo sapien
cccgacctcaggtgatttgctcacctcagcctccctaagtgcgggatttcaggagtgagccaacgcgcccagccaccttttaaatttttgtagacacagggctcccactatgtttctcaggattgttgcttaccttttatcaggaggaactcaattatgtatggccagccctagaaaagccagatcaccatgatggttggtttcaactgctacctgaaaaaacgtgagaccagcacgttggctcatacctgtaatcctaacattttgggccggaggatcagttgaggccaggagtttgagaccagcctgggtaacatagcaagaccctgtccctactaaaaataaaaaacaattagttacgtgtggtggagagcgcctgtagccccagctactagggaagtgggaggatcccttgagcccataaagtggaggctgtagtgaactgtgatcgcaccactgcactctaaccttggcgacagagtgagactttgtctcaaaaaaaaaaaattcaaataaaaataattggggttgtgttggcagggaaaaaagggatacgtgggaatgtatgttgagtggacaacgaatgtctgcctcaggatccaaagtaagtctgcaaaaacccaattctgtgagaaagacaaggaagaagggaagatgatggtagaatagaactacaatcctaaggatcacctgctagtgggaaacaaaacgggttgggcagactgtttatagtatcaacttcaagcagcagaaaggcaaagcatttggaaccaggtggttctggcatggagagatgggcgtgccataacctccacaaaagctatcgagagaatgactacagagccttgacagacactctggttaccgttcagagattctgtacacgatctttcggactttgcagtcacatgtctatgtaaacacgttgaacacaaaaattagcaagcaaggggtaagtgccggcgtgaggaaaattcccttacaagcttcagctgactgcccccttcacctgttctttatcttaatatccttgttattcgctctctgctgaagaagatttcttgctatttcaggtggggctgatgggcacatcgtgaggggccctcttccgtaaaaacgagacgatgtcaggcaaacactccttaccctgccatttctagttacgtcaaggatcttactgctccaggacggaggaccttcaaggaactgcagggtagcgataatcaccgatgcagttaagccgggccctgggctgattcactctcagaccccggggggagtggcccttgcgcccgaaagagggctacggcgtagacccggcccggcacccaagttgactccttgcttcccgtaccccaaaagcctaagcgcggaagaggccggggacaccaaagaaacccgcaccaactccccgacccaggccctggggaaaaatggcgaagcccaggggcgggggacaggacggagcgagtgacctggcgctccccgggcctcagagcccgtggagtgggtcgtggtgggcgacgccacgcaaccgcgacccgtccgttgcctccgccatcttctcctactcacccggactccccccgcggccgcgctggcttcgcgtttcccttccggccgctgacagagatccgggctgggcggggtgggcgagcgcgcggagggggtggaccgagggcggggaggccggacggaagaggaaagggagggcggcgagccggccacggcggggtgtggagcgtgcggcgtgtgtgcggagggagaggtggggggcggaggagaggcgagaaagggagggaggcggaggaatgagagcgcgaggcgcctctcgtccgctcctaagcccgggcggaaagagccgagcgcagcccgagcgctctgttaaaatggcggcggcgtcggcggtggccgcggcgtctggtcggtgaagtgactctgctgcttctctccccacccgccccctccccccctctcccctccccccgtccttcccccccttccccgccgccggcgcctcggcgcccctccggcctgcgcacctcccctcgctcccctcctctccccctcccgctgcggggaccgccggccccctcccccattctcttgctccccgccccgtccccgccgccgcccgccctagtcgcctccccgccccgccggccggccggccccctcctccgcctctctcccctcccccccgccggtcgggatcagtcagtgtgatccgaagcgggggagggggggggcggcggccgaacgatgtgcgagaactgcgcagacctggtggaggtgttaaa

SEQ ID NO: 23518 - DNA, 2300 bp, Homo sapien
atgaagctgtggggtacatgattggtgcacaaacagatcaaacagtacaagaacacttgatagaaaagtacatgttactccctaatcaagtgtgggatagtataatccagcaggcaaccaaagtaagtatttctaccttttcttaaaagttttcatgggatttaacaagacgtgttctttacaaatgtattgaattcaagccttttaacatgtatgtgtgatccataagtgcttttatgtgtgtctttctataatttattatctgggcgaggtgtggtggctcacgcctgtaatcctggcacattggaaggccgaggcgggcggatcacctgaggccagaagttcgagatcagcctggccaacatggcaaaaccccgtctctactaaaaatacaaaaattagctgggcgtggttgcacatgcctgtaatcccagctactgaggaggcttaggcaggagaatcacttgaacccaagaggcagaggttgcagtgagccgagattgagctactgttctctagccgagacgacagagcaagactctgtctcaaaaaaaaaaaaataaatgaaaaatctgggccgggctcggtggctcacgcctgtaatcccagcactttgggagaccgagacgggtggatcactaggtcaggagattgagaccatcctggccaacgtggtgaaaccccgtctctactaaaaatacaaaaattagccaggcatggtggtgggcgcctgtaatcccagctactcgggaggctgagccaggagaatggcttgaacccaggaggcggagcttgcagtgagtcaagagcatgccactgcactccagcctggtgacagaggaagactctgtctcaaaaaaaaaaaaaaatactgtaatttccattctcatttgatattaaaataggaataggctgggtgtggtggctcatgcctgtaatcccagcactttgggaggccgaggcaggcggatcaccaggtcaggggatcgagaccatcatggctaacgcagtgaaaccctgtctctactaaaaatacaaaaattagctgagtgtggcggcgggcgcctgtaagtcccagctactcaggaggctgaggcaggagaatggcgtgaacctgggaggcagagcttgcagtgagccgagatcacgccgctgcactctagcctgggcaacagaacgagactccgtcccaaaaaaaaaaaaatagaactatattacttcattcttaagtagatgtagacaaaaaggcgtttgtgttcgtttttaccatttgggattataaatatggtttagggtaagggaagcgtaatggcttttgctttggtaattatgtggattttttttttttttgagatggagtttcactcttggtgcccgggctggagtgcaatggcgtgatctcggctcactgcaacctctgcctcccgagctcaagcagttctcctgcctcagcctcccaagtggctgggattacaagcaagcaccattgtgcctggctaattttgtatttttagtagagacagggtttctccatgttggtcaggctggtcttgaactcccgacctcaggtgatgcacccgactcagcctcccaaagtgctgggattataggtgtgagccacctcgcctggccattatgatggataattctttttttttttttgagacggagtcttgctctttcgcccaggctggagtgcagtggtgcgatctcggctcactgcaaactccatctctagcgttcacgccgttctcctgcctcaacctcccgagtaggtgggactacaggcggctgccaccacgcctggctattttttttgtatttttagtagagacggggtttcaccgtgttatccaggatggtcccgatctcctgaactcatcatccgcccgcctcggcctctcagagtgctgggattacaggcgtgagccactgttcccagccgtggataattcttatatgataaatggaatttgctttttttcctccaagaatgtggatatactgaaagatcctgaaacagtcaagcagcttggtagcattttgaaaacaaatgtgagagcctgcaaagctgttggacacccctttgtaattcagcttggaagaatttatttagatatgcttaatgtatacaagtgcctcagtgaaaatatttctgcagctatccaagctaatggtaggtgattctgatttcttacacaatgcagtataaacaaaccacttctcttctactgccttaagtcaaacatttgatgttttttacagatttaaatcagacctcccatttcccaaatgaccct

SEQ ID NO: 23519 - DNA, 2300 bp, Homo sapien
ttttagtgccttagaaaataccaaattccaaatgagttattttagaacgacgtatcaaagataagccataatcttttgtttattacataaaatttgtagtaagctacaaatttttatgatgtttccaaaaatttcttaaaattcaggtttggggtgtgttgtggtaatttatttctgcacactttaggagcttggtcttttgggagatacctgaccagacagtgggaaacctgggacttgttcctaacattgtgtctgaaggaattcttttcagccctagtttgattggttatctattaaatgatctagaaggttattcataatactgtgttcatggccaggcatggtggttaatactgtaatcccagaactttgggaggccagaatgggaggaccagttgatgccaggagttcgagaccagccaggacaacataaccagaccatacctacgaaagatttaaaaaatagctagctgtggtgttgcacacctgtagttccagctactctggaggctgaggcaataggatcgcttgagcctattaatacaaagttaaaatgagctatggtcacactattgcactccagcctggatgacagggtaaatccctgtctcttttaaaaaacaaggaaagatagattactatgtatgtttgtgatctgaatgaatgaattgattatttttacatttttcaatgtcagtgagaaatactagaaaaatttaaaggctgtgatagcggcctttaatttatttgagaagagtcaaaatctaagtcctagagatataagaataggtatactggacctaggagttctgtatgtggtttaatattagcaaaagggtgttgggatattagggcttaaaaataatagtgttggctgagtgcaatagctcagacctttaatcccagcactttgggaggctaaggtgggaggattgcttgagccaggagtttgagaccagcctggacaacataacaagataccgtctctacaaaaatgttaaaaataagcttagtgcgatggcacatacctgtggttccagctactcgggaggggctgaggaggactgattgggcctaggaggtggaggctgcagtgagctttggtcataccactgcactccagcctggacagagtgataccttgtctcaaaaaaataataataaaatattaagtgtctttagttgttttataaaatgcgaactgatcgtcccttttaaaatttgcagatgcttcctttaaataccaatattcgacttgcgtactcaaatggaaaagatgatgaacagaacttcattcaaaatctcagtttgtttctctgcacctttcttaaggaacatgatcaacttatagaaaaaagattaaatctcagggaaactcttatggaggtaagatatgtggagcttttgctcctaaaattctgctctgcctactaataactcttaaaagtgcctttttctaaaatgtatgtaccttttgagatttcttattacttaatatttgatcagtacattatatatattctcaattctgaattacagttataagcccagttttctgattttatgttctccataaagctaggactaaaaatttataatcaaaattaaattactaattattatatcatttctaaggttaaaatttcaaagaccttattttaaaatttcagttttaattcaaataacatgcatttgttcatttaaagatatacaattcatcgtgtaatcccagcactttgggaggcggaggtgggtggatcacttgaggcaggagttcgagaccagcctggcctacatcgtgaatctctgtctctattaaaaatacaaaaaaattagctgtgcgtggtgtcacatgactgtaatcccagctcctcaggaggctgaagcacaggaattgctttagcccagtaggctgaggttgcagtgagccaagatcacagtactgcactccagcctgagtgacagagcaagactctgtctgaaggaagaaaatgtctctctctctctctttatatatatatataaacttaagtatatatatatataaacataagtatatatatatatacacacacacacacaattcagtggcatattagtatatatacaatgttatacaaccattaatacctagatccaaaacattttcatcacccgaaggtgaccctttacccctaaaacagtcactttctcctttgttctctccccaacttctggcaaccattattttggtttctgtctctgtagatatatctattctgattataccatataaagggaatcatgcatgtgacctt

SEQ ID NO: 23520 - DNA, 2300 bp, Homo sapien
ccgctcactgcagcctctgcctcccgggttccagccattctccccgcttagcctcccgagtagctgggattacaagtgcccaccaccacgccaggttaatttttgtatcttcagtagagaggggtttcaccatgtggccaggctggtctcgaactcctgacctcaagtgatctgcctgcctcggcctcccaaagtgctgggattaaaggcatgaaccaccatgcctggcctatccttgtgtttaaagtcgcagtttccaagatcctctccatgaccatgttaagtgaggatttactgtatttgcatatactgtatttgtaaacttcccgttactttcatctctagattgcttataataccttatacgatgtaaactttaaatcatctctacattgcttataatgccttatacaatgtaaatgctatgtaaatatactgcattgcgttttattttgtattatttttattgttgttgttgttttttaatgttttccacccagggctggttgaaactgaggatggggaacccaggatacagagggcccactgcacatcatatatcatacatagtacattatatatgtattatatatgtatataaaatggcttgatattattcatttatgtaatgaataaaaacttaggtctgaaaatcatccaaaataattctggtacatctaaacattgagttgttgcgtttttctttattggagggggagttagaataagtggtgctttgaggttagccatagtccatcgtggatgaacatttgctaaagaaaattgttattaattcaataaatcatttatctacctcttggtggcacaaagggcctagtaaattttggtgggctatttgctcttaagcaaagaacaatctgtaaagctgatttggaggacgcttgggaacaaacgagaggcaaccacgtgaaaggcaacgtgcatgtgactttcacagaaaatactatttgatgatgatttagtacgtgaagtgcagctagggtaaaaggaaaatctgagtgttgcagatcaagggcaccaggtgggacgcagttggcatgcaagctcagccagccaaaacatgcgctgtcaaaccaatcacttgggattacaatgttttggttttcaggaaaggttgcttgttgaagcagccaaattccagcctggagagacagagttgaaattttaaggagactttcccaagaagtatttcgatatcttttccgacaccctgagaagatcacgaggcgccaagaatgcacgccctgcgcctcaccccaacccctctctcagctacctggccccaaaaccaggcctctaaaatggattagagaggtctggggcctaaaattggcctcggaagcgttctttttccctcttttctccaccccttccagagttcaaaactgggtgtgccctcccttttccgaacgcagcccccatccgaagggcggatcctgattcccgcgggctcaggcccccgcaggttggcgggagccggtgggggcgggccggccgagtccgggggaagcaaagagaacgctgccgcgcgccccgatcaaactcgcgccgccaccagctcacgagctgcgccccaccctctccgtcaccgaagaggcccagccaatgagcgggcgagaaaggccgggcctgcgaactaggcaccgggagggagagggccgcagggggaagggaagtcgagagctcgagggcgggctgctcttgattgacagctcgttcgaacgaatcctccacgcggctttccttcgctctcttttctactcatccctgctcttcgtcccacctcctcctcctccacccctctcctcttgcctttcgaccctccccacttcccctcccccactctgcgggcaaatcgctgctgaaaagaggtaggggccgaagcggcgggctcgtgtggagccgtgaggcgggattgactggcgctcgggccaatgagagataggctcatggcgcggctgtagctggaactgaccaataggagggcgggctgggggcggaggcccaggttccaaacgctccgcggcgccatgggctgaaaactcaaccgagatggaatctcccagtctgaaccggtttcaaccggttccgagtttgaggcactaggaggagggggagaagcggctgcagcggccgcggcaggagcagcgggagctacagcatcagcaagagcaacagtagctacagccccggcggcggtgcctgttccagtctttgctgctgcagtccgtgcaaccacccagagggggaggggggaaccaccagtcgctgaggaacaa

SEQ ID NO: 23521 - DNA, 2300 bp, Homo sapien
ttcattcccctactaaaatgttaaccctgggtagacaattaataagcctttataacagggacaatcatccattctcaccaattccatttattctcattttcaatgaatgatatcaaggggtcttctcattaacttctcaaaaagtataaacagagttaccatggcagtgaatcgccattgctttttttttttagtacattttttgctgcagtctattttgctggaactattgctgctaattaacagctggtttttaataaatttgcttgcagctatttgctttgcccatttataggagttaattgtggtctcgctgctgctgagtgattccctaacacaatatgcctgtgattctttacagaataaactatgttgtcctgtttcttggaaatcacaggattaattaactgagaagatgttaaattgaattttaaaccaaagtcagatgaaggcttactggcacaaattttgactaatgtctttttaatgtcttatatatttaatttgctgaagtcagaatatactgttggtaatgcattcagagctaggtttggggtttctttattcttctctgcagtctttagggtatagttcttatttctcattttgcccttcctttcagctccccaagacttgtcttttgatattcacagactctggatgggtttttacttacttttctaaaaaatattattgttattcacagtgagtgcgttttagcagcagtgtttctttttcagttttccagagtatcaggaaatgccctggtgatagttttatctattgtaatcagtccttgctatttcaggttctcctgtgtaacactagactccatggcccctcattatactagatttggcaaatatctgacaactacgttgctcaagtcaggctttaggtcaccttcaaactcttgacgaccactaccacttagagaaagtagcatgatgtaatataaaagacctaggaaatggtcaagagacttggttctaccactcactagccttgtgaccttagtcaatttcacctttgaggcgggggccgggggagacttggtttctttattaaatatgggggttagactgggtactcctccacacccttcccagtatgaatgccattggtacattggaactgggccattcctagtattaggaatgcttgctttacttggaggtcttagctttagttggaggtccagagggcaattcttggccctctaacagttcagatccactcatgggagctaaaatgggctaaagtggaggcactagtgtgaacccagtcactatgtggctccataaagcctgccatctctggagctgtgatgagagggtcatcacaattccaacagatcttaaagccgggaagtgacattctacagatttgaacccagttctaaattcatattctttttgttatatcccttgcttcctccacagagtaaagattacaacactggtgcttttatcatctttaatggattggggatatggcttataaagagtaaaaattacagtagatacataaaataaaagaaattggctgggtgccatggctcatgcctgtaatcccagcactttgggaggccaaggccggtggatcacttaaacccaggaattcaaggccatcctggacaacatagtgacgccccgtcctacaaaaaatacaaaaattagctgggcatggtggcacgcgcctatggtcccagctactccagaggctgaggtgggaggatcgcttgagcccagcaggttgaggctgcagtgagttgtgtttgcaccactgcactccagcctgggtgacagagcaagaccctttttcaaaaaaaaaaggaaaaagaatcctctgacaacaattattgcatgaaatctttttttttttttcagatatctttatacagtcataaaagtatataaaacctaggtacaatataaaaaataattatagatcaatctaatgtggccaccacccatgttaacaaatagaccattgccagcaccccaaaaaccctatgtgccattgcagatcacagccctctacctctccccaagaggtaaccaccattctaactttcaggataagtacttccttgtttttctttgcaattttacagtgtgtgtacctatcctcaaacaatatagttgttttgcccatttctgaactttatatagatcatacaatatgtacttgtcagtgctttgcttcttttgctcagtattatatttgtgagatctatccatgttgtggcatgtaactgtagttcattcattttccttgctttgtttcactccattata

SEQ ID NO: 23522 - DNA, 2300 bp, Homo sapien
ctgggtgacaaggagactccatcttaaaaaaaaaaaaattgttttgttaattacaataaattatgtcaaaaacaaagataatttcttaaaactcttcactttcttttatgttccttgcatctactgtatctgtatggtggaaatactatataatggtgtgctactagacatcttttctcaaattcttattaagtgatgtcacattggtggcttgaaattggctatgatgggaatattgacatcatggaaatcagcaaaagctaaacattggacatttaaacttaagaaacggatgtggaaaatattaatgcagagtaaacttaaaagtttgtgttatctgtagcctttacattgtgacttgcagaaaaaattaagaaaaattattccagtgttagaaaatgattatctatttcagcaaagaagttgctcataacattgacaagtgaaattctgacatagatcttggatatgtcactctcatcttaatcacaaataaaaacaaaaatattaaccaacattcatgttggaactaggttgttaaacaattgcaaccataagttggccacaaatacaggagtacagcataaaccaacgaaagcattctgagagaagcaattgtctatgaggaatttacagtaaagagaataggatatttcattatttataattcatctgctataattccttatcaatacttttgttggtggtggtggtggtgagacggagtcttgctttattgcccaggctggagtgcagtggcgccatcccggctcactgcaacctccgcctcccgggagtgcgcctgtaatcccagctactccggaggctgaggcagttttgtagccacaaaactggctgccgtgtctgactggaaattgctcccctggaaacttggccacacctggcggtgcatatctcatggttctggctctggcttctgcttagaacccagtcagcatctgttccagcatgggaagcaactgttcagctaaaaccaagagcagcctgaaggaagtggggacgtaggagactttgtaggtgctcacacccagacaggagaacaaaggtttggtaagggctcagaccttagagacgggttctcgacgatgtgcagcgcataacgaggaaaatactgaccggagggggccggtcgtagggctggggagcaggaggagggcaaaggatagagagggggtagatagggagtagatagggggcggcagcctcggcctcagtaagcaggggctcagggagcagatgtctgagactgcaccacgtccgctattttgaggtttggcttctcttactgccacgtggtgcagagggaaggcgccatttgatgcgtccaaatcccgagtgggaagagaagatacggatgagggagatggatgtgtctgtggtgactcttgggcacttgtgccgttcaatcctgtcactctcaagctgaagaacccaaagcaaacgccaggtttacaatacctgcactatcactcattagtgggagggtcaggcgccacccaactctgggcttttattggtcatgtcaagaaaaaagcgagagggacaactgggagcctccttctgattggtggattcctgctagccctcaagtcaatcagagtagaatgtaccgccctccttcccactctggcccccgcgggagacatgttaggtagcgggacgccaaccttgtcactcttctgagaccgccacccagtaacacgccctgctttcctccgccgccgccgtctcctccatcaactgtctccttctaacatgttattgcagttaataaaaaagcgttcttttcttcacaaaagcagttgtttcattgtataatgtgagaagtctgcgttcaggcggttagacgcaaaggagtggaataagtgccctgttcagcctgccaaccttcggaaccagccaacagactcggtactgactgccatgatccagtaagcacccgactcgggtctctggcagcctgagtggattttgcgtgacttttggtccctggcggctcctgtagcgtccccagttacggcgcccatagcaaccggctccctagctaggcgcccccgggttgccaggggccgcaccagctttcccgtcccgggccagcgcaggcgctcaggcctcggaggcggggcgatggccacctcccaccgagtggcgaagctggtggcctccagtctccagaccccggtaaatcccatcactggagcgcgggtcgcccagtacgaacgcgaagaccccttaaaggccctggcggcagcggaggcgatcttggaggacgaagagga

SEQ ID NO: 23523 - DNA, 2300 bp, Homo sapien
tgtaatatcctgtgtttatcccttccttcccctaatcctttttccttttaaaaatcagtattaagtccatacattcattttgtttgaatgttaggtagtgttagggacactaagtgatactgttggatgtccttagaactaatacagatagtatagcgtaatggttacaagcactaggcattgagtctagactgcttgtgtttgttcagtactgacttcaccacttaactacgctgtttggccaaatgacttaacctcttggcttcagtttctccatctgaagattgaatgagttaatatgtaaagttctaagaccactgcctggcatatgttaagtgattgataaatgttagcaatttttatcaacccctcatcaggaatgtacatacataacattgatgcctcatcacacattcattttagatagaaaatactcacgtaaaattaaatttatgctttttggatttcctgtaaaactttgatattctacagtcccggctattatattaataaaagaaaaaagcaagcatacatgtttttattttgtgcccctggtgacaacctgaatggaaaagacactttatggactgtcttctcatgagtgtttccctcttcatacccacaccccactgcaaaaattataagagtctttcttaagtatctttgtcattgaaaaattaggacttttttctactgtgaaggtaacttttttttttttttaataattctaggtggtttctcagtattcaagtctgctttctccaatgagtgtaaatgcagtgatgaaagtgattgacccagccacagccaccagtgtagatcttagagatattaaaatagttaagaagcttgggtaagcatctctaattacaacttgaataaaaatttgaaaatgagcatcagattgccaaaaataaataaaaacacctagatgaaagtcacaaagctctcttttctctttttggttttgttttcgtgagaatttgtattagtatgggcatctggagattttgtttatgttaccttatgatagtaaggcagcagtggatcaaagagatccaggagtggggcaataataaatgtgaggctgaatcatattttattggactgatgacttttaatctgttcatctattaaacgtacagatgtccactccctcttaactacccctctttgttttcttttatccttagtgggacaattgatgactgtgagttggtggaagggctggttctcacccaaaaagtgtcaaattctggcataaccagagttgaaaaggccaagattgggcttattcagttttgcttatctgctcccaaaacagacgtaagtagaatccaaatgaaattggttctctgtgtttaactttttaataactcaggcatttctttattaaaaatagaaaatactactagtgatttaaagcagatctcaaaagacttactagaattgagacaaaaatagtaattgttggtgccacaagtgacaagtctgtatcctcagttgggatattgaaattgagagctagccatttgcaacgatgcctgtagtcccagctccttgggaaattgaagcagaaaaattgcttgaacctaggagtttgaggttgcagggtgctattccatgacctgtgaatagtccctgcactccactccagcctgggcaacatagtgggaccccatcttttcactgttgctgttaatttacaaattcacacagattagagagggaccctatcttttgaaaacaactagggtaaccattttatattttttggttataaaaaatttacttgcaaaatgtaagataccagtgtacttagttgaaaataaaagactcaagtttgggatgtgtatcttaatccagactcttttctatgcatgtctatataatttattacttgatatagttttggttgaatttatacaacacatagtattttcgcttaaaattctacttttaaacttaaaatatcttacaatgcaaattatgatgttctttttctgaacagatggataatcaaatagtggtttctgactatgcccagatggaccgagtgctgcgagaagagagagcctatattttaaatttagtgaagcaaattaaaaaaacaggatgtaatgtccttctcatacagaaatctattctaaggtgtggggctatttattttgttcatcccttaatgataattttggatctccactagcagtttattttttctgataaaatatatgatttaagcacttactctaagttcgtatttcttaacagacaactcttaggtgaaacgaaatggagaa

SEQ ID NO: 23524 - DNA, 2300 bp, Homo sapien
ttcctggcttcaagggattctcctgcctcagcctcccgagtagctgggattacacccccggttaatgttttgatttttagtagagacggggtttcgccacgttggctaggctggtcttaaactcctgacctaaagcgatccacccacctcggcctcccaaagtgctgggattacaggcgtgagctactgagccaggcccctagtgctaatatgctaaatgtgtgttaaagaacaacttggcgaggtggctctcgccaagcctgcaatcctagcactttgggaagccgaggcgggcctatcacctgagctcgggagttcgaaaccaccctgtccaacatggagaaaccccgtctctactaaaaatacaaaattagccgggcatggtggtgcatgcccgtaatcccagctactggggaggctgaggcaggagaatcgcttgaacccgggaggcggaggttgcggtgagccgagatggtgccactgctccagcctgggcaacaagagtgaaactccgtctcaaaaacaaacaaaaacaaacaaacaaacaacaccaccaccacctcataattacaagattaagtacctttgaacatttgtttctgaacctaccacacgcaactgtcactttgcaggtgcttaataattgtgagcgaacattcaacaaacctcatttcataaacttccctactgaaatatagtggtcataggagaccagcagtttagctcatggcttctggtccttgctttgtattggaatactgcttctatctactgactcgtttaccctgggcttcagttccttctttgggctccagttctctcaccttttaagtaaaggattattgtgaggactaaacgagatataaaacgtgtaaaggtttagcactgtgcttagcagataacggaaataaatgatctttattataatgtttacgttccctaagagtcagtggctacgtcatgcaggagacactagtgtagaacaagcgggcggtggtaactagacagacctgatttggcagtctgtcaaacctccaccacccagtatcaaccaatacgagataactaacctcgcctcattccaaatctcccttttctgactccctttcaaaatgaacaaaactgcataaaatgcaggtctatgtggccgggcaaaaacagactcagtcatatcccttagagagttattccggcgcccaccccacctcgcggatagatccagccggagttaaaggagggcacctccgggtgggcgcggtggctcacgcctgtaatcccagtactttgaaacgctgaggagggtggaccgctttgagccggggaggtcagaccagcctgggcaacacagcgaaacccagtctcgctatgtttcgaatacaaaaattcgctaggcatggtggcgggcacctgtcgtcctggctagttgggaggctgtggcgggaggatcgcttgggccccggaggtcgaggctgcagtgagccaagatcgccccactgcactcccgcctggacgacagagcgagactctgtcaaaaaaaaaaaaaaaaaaaaaaaaggccgggcttcgtggctgacgcctgtaatcccaacactttgggagcccgaggcgggtggatcacctgaggtcgggagttcgagaccggcctggccaacatggtgaaaccctgtctctactaaaaatacaaaaattagctgggcatggtggcggacgcctgtaatcccagctactcgggaggctgaggaggatcgcttgaacctgggaggcggaggctgcagtgagccgagattttgcgccactgcactccagcctgggcaacagagtgagactgtatccaaaaaaagaaaaaaaaaaaaaaaaaaaggaggggacctcatagccgtgcaaggtggagtgaggaaatgcggatgtcctcaccactcgcctttaaaatcgcgcgttgtcattgctgcctcgcgtaaaggttcccccggcgctcttcacccacagcgccccgggcgtacaatctcgccagcccggagcccaccgcacgcatcctcctcgcccggcgcgcagcggacagcctcctacgtcacgccagcgccgcgcggcaaggaaggcccccttctccgcctccgcctcctcccgacgccggcgccgctttctggaaggttcgtgaaggcagtgagggcttaccgttattacactgcggccggccagaatccgggtccatccgtccttcccgagccaacccagacacagcggagtttgccatgcccgagaatgtggcaccccggagcggggcgactgccggggctgccggc

SEQ ID NO: 23525 - DNA, 2300 bp, Homo sapien
cacttttttttttttttgagatgaagttttgctcttgtccccaaggctagagtgcagtggcaccatctctgctcactgcagcctctgcttcctgagttcaagcaattctcctgcctcagcctcccgagtagctgggactacagacatgtgctaccatgcctggctaatttttgtattttcagtttcaccatgttggccaggctggtctcgatctcctgacctcaggtgatccacccacctcagcctcccaaagtgctggggttacaggcgtgagccaccatgcccgacctcagttgtcactttgaaggaagggtaggaatggaataggtgggagagaggtcagatatataagacatcttcccatgcagggtacgttcataaaggtgaaaaacctgtttgttattatctaagcctaaagtcaaactctattttatatagaaacacaatgtattattattattattttatttttttgagacggagtctccctctttcacccaggcgacagagtgcagtggcgtgatctcggctcactgcaagctccacctcccaggttcatgccattctcctgccccagcctcccgagtagctgggactacaggcgcccgccactaggcccggctaatttttttgtatttttagtagagatggggtttcaccgtgttagccaggatggtcttgatctcctgacctcgtgatccgtctgcctcggccttccaaagtgctgggattagaggcgtgagccaccgtgcccggcaacacaatgtatttttagtttagcattaatatatacagaatattccagctttgcaatgactgtagagtgaggaaagagtgttttttgttgtaaactttaccaactgttgttcacatttcagaacatcagttcttaacatttcagaacatcatgttaccagaagcaactgccctccctctggagtcaccaataccacacacctgtatcaatttgcatttgtagaagtcacaggtggttctacataaagatgtaaagatgcagacatctggctactttgtatgtcttttagtcaactagtataggtgtacccaaacacacatattatattataaattccttttcattttatgataaattacaattaggtcattaaattgatttttcaattgagatattcacatactgtgaaactaatcttttaaagtgtacaattcagtgggttttagtatattaacaaggttgtgcttccacttccggaatgttttcatcatgccccaaagaaactctgtacctataaacagtcactacccattcgtccccttctccagattctgccaactattacattactttcagtctccatggatttgtctatcctggacatttcatataaatggatgtccaatatttggccttttatatctggcttcttttactaatcctgtttttaagtctcattcacgttgtagcatgtatcagtactttattccattttatggctgaataatatattgattttaaaaaattatatgggtgggaagttatattagctatgcatttcatttcaggatagtaaataaggtgttaaaatatttgtcatataaaagaacattggatcagagccactgatctagctggaaagacaagtgtatataaaaaggcaattaacaacccaaagaaaaacattatgtaatcaggagatagttaaacttcctgaaaaaaaggatgacaggtaaggattaggcagagattaaatctgagtgatcgatcctattcagttaatgggttggcaagtcctggaatgagatacagccatctaaaaattaaactgccaaacttataggctgctaccccatctccagtaatctctgcgagcaatctttctttccagtaggctctgcagtgatgaaggggatcaggggaagcaaagtgaccctactggaaccaaacggatatttccgtggaggtatcctaaggggatgggtgttgcagagcaaagctgtaagctgccaactctgacccctggggaagccttgcctccaggttccccgaggttccccgtggtggttttgcacaggctatttaggcacatctcggccgccgtggcggggcacggctcagctgttgcggggcggggccttcgcagagcatggcggcgggcgagcttgagggtggcaaacccctgagcgggctgctgaatgcgctggcccaggacactttccacgggtaccccggcatcacagaggagctgctacggagccagctatatccagaggtgccacccgaggagttccgcccctttctggcaaagatgagggggatt

SEQ ID NO: 23526 - DNA, 2300 bp, Homo sapien
agtcttgatctcttgggctctagcagtcctcccatctcatactctctagtaactgggactacaggcatggagccaccatgcctagctaattttttatagagatgtggtttcaccatgttgcccaggctagtctcaaatgcctgggcttaagcaatccgccccatttggcctcccaaagtgctgggattataggcgtgaggcactacaccctggtcttatatttttcatttttgtgtttgtaataaagaattgaggctgggcgtggtggctaacgcctgtaatcccagcactttgggaggccgaggtgggcagatcacgaggttaggagttcaagaccagcctgaccaacatggtgaaaccccgtctctactaaaaatacaccccggtcttatatttttcatttttgtgtttgtgataaagaattgaggctgggcatggtggctcaggcctgtaatcccagctactcaggaggctgaggcaggagaatcgcttgaacctgggaggtgaaggttgcagtaagctgggatcatgccactgcactctagcctggccaacatggtgaaaccctgtctctagtaatacaaaaattagccaggcatggtgctgcatgcctgtagtcccagctgcttgggagactgaggcggaagaatcgcttggacctgggaggcggaggttgcagtgagccgagatcgtgccactgtactccagcctgggcaacagagcaagactccgtctcaaaaaaaattaaaaaaaaagaattgagggattgagcactttttctgtaccctttgttacctgacttttatgtttttagctagttgactttagagtgtttaagatctacataaatattctgttgatatttagaatagcaggtggctgagtgctattcattttgctatagatgagttataattaaaaattttgaaattactgtgatcaggttttaatatggaagcataaacatggaaataaaattttatgtaaaatttttctgaaatattttttaattttgtaatttcaagatggcaatttctgataaaatatgttatttattggaggagactgtttggattaacagtgtgatctgtctgctaggcccagataccaaataggaccttcagaaaaaccagagctaaaactacttcaaaagagaaagtcgtagatgtcatctgtaggcctcccactagactgtaagcacagtaagagtgggtatcctcagcatggtatagggctttttggacacttagtaaaaattcggtgatcacgaccaactctttctaatctgtatgaaatcttgtacatgacccagaaaaaccttaagcagttagagttagggataaaggtttacaaatgtaccagagtggttactaaatgtgcaaaaatggttgctgccaggggttgagttatcaagggcaaaataaatctcaggagcaggatttggagccttaaagtccagctacccttctcacatggagattctccctcagttgccttgttttaagttaatattttgttagttcttcgcttttaaggaaaaaactttttaaaggattttcagacgtacacaaaagtattactgatattgaagtatcaaggcttggtttcattaatgatgcaagttgattctataaagctgccttgaatatgctgtgaagttggctaggtttatagctaagcatacctcctagtatgcatgattcaaatttatgtctgagcacagtcattttctatacatcagagctgttcccaattgcttgagactgttttgaaattgtgaatgttcaatcttcagttgtcataggtgttctgttacatgctatggatgtatttaaccagagtccacaccaaatctaatacactgtgtactcttttttttcccatttccacctatcgccagatttggggcttggtttactgttaaactgcctgcccctcataggccattacagcattcagtaaactggaaatttccttgcatgatgattattacatagtaggtgtacatgaagtcattgagctttggaagccatccagaggtgttctgggtgagtctgtccttggccagattttacttacgaaaccaaataaatttcttttttttaaaatatgtaaatttgttaaattagcatgcagaatatggcagtaatacccaattgaaacactagttggttgtatattaaatctaataataggaaatatgaatttgcctttaaaatgtatttcatttcacttctatttttagctgtgccaaatgaaacaaagttggacttcatgtataaaggctctagtaatgtcct

SEQ ID NO: 23527 - DNA, 2300 bp, Homo sapien
aatgtatactcttttctctcagtcccagtccttgaaaggtattttcatatagcaagtgctcaataacatttgagaatattcctcccacttcactctctaaaatagattgaaaacttcttgatggacaattgtttccaggctacatcaagggctgcaacaaatcaacagaaaaataccaaaagaaaaacagggccaggcgtggtagctcacacctataatcccagcactttgggaggccagggcaggcagatcacctgaggtcaggagttcgagaccagcttagcctagtaaagatggtgaaaccctgtctctactaaaaatacaaaaaattagccgggtgtggtggtacatgcctgtaattccagctactagggaggctgaggcagaagaatcgcttgaacctgggaggtggaggttgcagtgagacgggatggcgccactgtactccagcctgggcaacagagtgaaaccccgtctctataaaagtaacaaaaaattagctgggcatggtggcgcacacctgtagccccagctacttgcgaggcttgggataggagaatcacctgaggttgaggctgcagtgagctgtcatcgcatgccactgccctccagcctgggcgatagagcgagaccctgtctcaaaagaaagaaagaaaagaaaaccaggcaaaaggcaaaagaccatttcatggaaagggaaataaaagtagcaaagacataaaagaaaaacaaaaacgctcaatctcaccaatgattgggaaaaatgcaaaaatgagttttgactcatcatactggcaaaaattatggtattaccaagcactgacaaggataatgggaaatacagtcatcgttgcttaatgacggggatacatcctgagcagtgcatcattaggcaatttcatcattgtgtgaacatcacagagtacttacacaaacctagacagtacagcctacttacatggtagagtttatgggctacaaacctgtacagcatgttgctgtactgaatactgtagacaactgtaacacaatggtatttgtctgtctaaacacagaaaagatacagtaaaaatacggtgtaaaagataaaaaatggtatacctgtctagggtatttatctgaatggagcttgcaagactggaagtttctctaggtgagtcagtgtgtgagatgtcagtgaatgtgaaggcctaggacattactgtaccctactgtagactttacactatacacttatgctacactaaattaaaaaatttttcttcaataaatttaaccttagttcactgtaattaactttttggctctcttttaataacacttatctgaaaacacaaacacactgtacagctgtataaaaatattttctttatagtctcattctgtaagcttttttcctattaaaatttttaaaaatttatttactttttaattttttcttgtcaaaaaccaggacacaaatacacattagcctaggtgtacacagggtcgggatcatcaatatcactgtcttccacctctacatcttgtcccactggacggtctccaggggcaatacgcgcatagagctgtcatctcctatgataacactgccttcttctggaatccctcctgaaggacctgcctgaggttgttttacagttaactttttttttttttagaaactgatgtttattttccatcaaccatttttccatgttgcttaagagcctatgcaagaacagcttaagaccagtcagtggttgctcctacccattcagtggcctgagcagtgggagctgcagaccagtcttccgtggcaggctgagcgctcccgtcttcagtagggaataggcacagagggcacctgtacaccttcagaccagtctgcaacctcaggctgagtaacagtgaactcaggagctggagcagtccattcaccctgaaattcctccttggtcactgccttttcagcagcagcctgctcttctctttcaatctcttcaggatctctgtagaagtacagatcaggcatgacctcccatgggtgttcacaggaaatggtgccacgcatgcgcagaacttcccgagccagcatccaccacatcaaacccactgagtgagctcccttgttgttgcatgggatggcaatgtccacatagtgcagaggagaatctgtgttacacagcgcaatggtaggtaggttaacataagatgcctccatgagaggctggtggtcagccctggggtcagtaaccacaagaagccgtggctcccggaaggctgcctggatctggttagcgaaggttccaggagtgaag

SEQ ID NO: 23528 - DNA, 2300 bp, Homo sapien
aaacccaggaacatggactcaatattattttgatacagaatgaagacatagacttcatttattaatttatactccctagagttctttttttttttttgagacagagtctcactctgtcacccaggctggagtacagtggcacgatttcggcttactgcaacctccgcctccctgagttcggcgattgtcctgcctcagcctcccaagtggctgggattacaggtacatgtcaccattaatttttgtatttttagtagaaacagggtttcaccatgttggccagacaggtctcgaactcctgaccttgtgatccacccgcctcggcctcccaaagtgctgggattacaggcgtgagccaccgcgcccggcctctacttcctagagttcttagagaatttctagcttctgtttctttaaacatgttttattagctttctaaattatgaaagtaaatacaactggaaaaatacaaaatccaaagtcaagggagtaaaaaaatgtaactcccttgtttcccctccccgcgtaaccgtggttaacagtcggtgtgcacccttacagatgttttttctatgaaaatacaaacattcgacttgtttcttggactttacctcgcagtccgaggagaatcatgtgaacagcatgaaagcagcatggtccgaagactgcaaaccataacatttccatatctactgactctgaattcctgtttctagaggacccgcacccacgtggctctgtgcatccgcagcaacttggtctttcttcctttgctgagtttggttaagggaaagggccgattattgagtgggctcagttcacaggtgcctgaaattcctacttagcaatgttcctttccagctgattccgcctccgagagccttaggaaaaaatgctaacagttaggagcgaagcgtccttaattgctcagtccaattatctagatgggtccaggttcggtttcgattcagagataaggaccagggggcggggacgcttccaggtgagcccctggttaggcttgcctccccgcggagcgcacgcgggtctcgctggctggactgggcctttcaagaccaggtaacttctccatccggtatcgccaggcttacctgggggcctcagaattgtgtcagctgcgtctctgagtcaccttggaacccctcgaaggagcgcggggctaggagggcgcatcggtgggcccggggaccccgctgctaggtgtggttggcgccaaggccgcctctggccggcggagccctgcagtgtccggagggtgcggtcagagtccggccctttaggccttgcctcggtatccgccttgccccttgggccgcggcacgggttcgggccgagcgcccggcatcttgcgtttctggcttcctgagacgggcgtgggacctcgaggaaaccactctgcatgaccccacgaagagaactaaggaccaccccccacccttcctgtcctggacggcttcataagccagaggatccagtggcagtaccaagcagggcaccactctgggtcgtgagcacctaagaggtggagcaaaggtcagaccccagggtggcccaggcctccctcccccgcctccccggcggggccattcctcacccgccccagcactggagggggcggccggggtcggtctagttccggttacaaactggacagaaaaggccactggagtctcgctaggcgatgcgcctagtcccctagcctcagacgaaccgcaagaggggccacccacaactggaggggcggaggctggagctgagtttcattagtgtttttggagctgccaggcatttccaggggggtcgccttcctagaggccccctttccccagcttaaccctcggctttgcaggagggtgcgtgggggctggagggtccctggaagccgcagggagcgcgggcccgggtgggtcctggtaccgggtggggagagcggaaccctcccaaaacttggggcgcggggcggggccgtcgggcggtgacgtgaggggcggggccgggccccattggcgggcgggcaggggaggggcggggccgggcgcccgcggcggctgctgcgcctggaaccggagcctggagtgaggcgcagcggcagcggcagcagcggcaacaagtgccggaggctagcagagccaagccggagcagtccctgccgccgacaccgccgggccgcccgtccggggcgccgcgcatggagcgtgagctgcggcggtcgccgggctgagccgcgcggagcggccgggacgtggatgtggccgcgatctcccgcccttgcccccgcc

SEQ ID NO: 23529 - DNA, 2300 bp, Homo sapien
aggtccatccctctccagaaaggaggtagagatgccccattttgggataagggtgcaggagggataatgggtctgctgcggaagaagatggcaccctcacctggaagcactgctcaatcccacacacctgcacacccatgagtctgctgcctttggtggtctggggctgactgtgggaaatgagggggcggctgtacttctcaccccagtttacctcttcagatcttgcccccaccctcacgtctaacatggagtcagcactgctgaaattcttatctcccctaagtctagcaagttatttaaatttttctgttaccctttagttcttaataagtgagacagttttctataaacatgtctgtaattcagcacacatgtgatttttccattgtcatctcttaggagaaagggtgtatatatatatataatctggtttctactgaacactgtgttcagtaaacttgtccagatgaccaaagtatctgttcctttagcaaatgctgggtaagtctcaggtaccacgtgctggagtgtaatggtggtgcagtgtgaagaccttgactgcggagggttcccaggcagaggcatcctgatcaggagcagataccctgactcctgggcaatgaggctggtgtttaggctggggcatacccttgggcaggaaatctctaagagaaagaagtgatgaaaccctgagttcaacctctgggaatggagaagaaaggagttctagaaaacaacagacacatagctagagttaggctctgagggaacagtagcatattggtggtggtctgggggaactgtgggaacagcatgagcagggagggtgtgtccaggggactgaagacttgggaaataagacatatttgggaacatagtgggaaaggaggctgtaggctattgcaggctctggaatagaggagagatgaggagggagctaccagtggcgtaatagaagcacctggctcctggctgaatgcgcagagcaggaagcaactcaaggtaatgtggggttttcaccaggtgcctgagaacttgatccattgcacacagaggcccgaggaagagggactctgcaaggcatgtggaagctaatatctggagttagtttgttgacccatgaaccctccttttggaggtgatgctcatggcattgaatggaggagtttgtagagagaagactactaaagaggcagtgaaggacggaactttgagaaatgtgcttcgtttagggtttggtggaaaaggcagacccctgaagagctattggaggttgtatcatcccattttacaaaggaggaaagtgaggcttagagaggtcgggtaacttgcctaaggtcacacagccagtaggtagcataaccagaatttaatcctggtcctgtcactccagatgccaaactggttttccagtctgaaaatggatctgggacatctccatcctcaaacgtctgctacccttatttttaaattgcataatctttccacctagacctaaaaccctctttagtttactaaaggcagggcagaatggcctctgggagggttaattcccttctcctcttttcctcaaaggttctgtatgtgtttatttgaagaatacttctagtggctaatttgatttgaaatgatgaatatcatttgagaaaatcggccacactgggctttcggggggttgtaatcagtgggggccagaatatgtcctgccagatgctttgatctataatgttgcctgtgggactgtgtaggtgagtagattcattataaatacgtttcccttttaatttgaacatgaaggctaaaagtaatggctgggaaccaaattccttaaatctagctgacaatagttctgtgacttacagactggagagcagaggtagaccatcatcttagctgagtgccagcctcttggtgagggagtccagggagtcctgaggctcccttgccccggtgaaaacccaggccaggcctctttccgcaatcaaggaacaagctgtaggtgtggcccagctcttctggtcccactgagctgctccactcacacccttatcactccaccatctgccagcagtgctgggagctattctctcccctagagccatttagctgcaaactgtctctgtctctgtttatccgagcagaacctggaaggggctggcaaggactaggcaacagatgggacagccagagaggtgaggacttaggtaaaccactcttgccagactcccggaggtggtggggagggaaagggcagagtgaacgtgctcctctggcctcgtgatatggcagggggcttg

SEQ ID NO: 23530 - DNA, 2300 bp, Homo sapien
ataattaaaagacgtggtcctttaatagagcacgtctaataacagtgtttgcacttacttgtttccatgtctctctttcactgagctgtgcttcttgatgaggagggaccatatccctaattagcctagcacgatatccaaataagcagtaggaatgcaataaacgtttgtgtaattattttaaaattctagtcatgaacttatttccacccatatcttcttcttgcatttatataaatgtgtaattttccttttgattgtaaaaataatacttttaccacacacccatcagaagggctaaaaggaaaggataagaaataacaagtgttggtgaagtatatggagtaatggaaatattcacacattgctggaggcagcagaaattggtttgatcactttggaaaactgtaggcagcctctactaaagctgggtctttcgtatcctatgacacggcaattccactctcgatatacactcaacaaaaatgcatgcatatgttcaccaagaggcatcttttccccaaagcagcactatacacaacagctccaaactagaaaatacagacactcatcaacagtagaatgagtaagcttattgtggtatgatcacaaagagcaaggcaaaagaatctacactcaatgacatgaaggaatttcatgaaagtaatgttgaagacaaagccagttttttaaaaaagtacttacagtatgattgcttttatataaatatgcaaaacagaagcaagatgacaaagggagtgtcatcatctagaaagtggtgcgataagatgcacagctagtgctgccctgtgactctaactccttcaaaagtccgcctgtggcaaacgcggctaccctcccaagccaagataaagtataattggagtgccgaggctaaaaaatataccagtgggactggtcgaatgaggcacttaaaaattgtgtacagcaggttaaggcatggattttttaaaggaatgccacctaaacccaagaggacagctgctgcagcatccagttcatcttaagaatttcaggccaggtacggtggctcacacctgtaatcccagcactttgggaggccaaggcgggtggatcacttgaggtcaggagttcgagaccagcctggccaacatggcgaaaccctgtctctactaaaaatacaataattagccgagtgtggtggcgggcacctgtaatcccagccactcggtaggctgaggcaggagaatcacttgaacccaggaggcggaggttgcagtgagccgagattgtgccattgcactccagcctgggtgacagagcaagattctgtctaaaaaaaaaaaaaaaaaaaaaaattttagattagtcacacaataaatgttctgatttaaaaaaaaaaaggcaaaactctcctttgctgttagaattcaggaaaggtcagttatgagtgaggagtgggtttagtgactgaaaggaaataggaagggggagtttctgggaatattgtaaagtttcttgaacagggtgctgattacacatacagatttcagtctatgtatatatattacacttatttcttaagtaatatatattacttacaaaaggtgtacaatttttctgtatgtgtattacacttagttttttttaagtaatatatcttgagagaaagctagaaaataagacgtttaaaaatttttgaatcacctacaatcccactatccagtgaaaacgactgttaacattttggacttttttccagttctttttttcaagccagtgtgcacacgctctctcctcccctccactcatacacataaattttgctaaattaggttcattctcatttagttttatttctgctgtatttttacataaagttaaactataccattcaatatcctttgcaagcattttataagcagctgaaacatactccattgaatgtatgtgctccagtacatttaatcagttgcccattgctgttttcttattaaaaaataatcagtcacatgatgtctctctctctcacacacacccctacacctctagacattctttaagctctgcattcgttctctatttctctccagaaaggttgtaccgatttacagttccactggcaaatgtgagggctccttgtatcgcagtccaaccccagctcatttcttagtataggtttgtttttaggatggtcgagctcaaagcagaactaagggatctgccgttttgtacacggccgaggcgcgcggctccctgggcctggaacgcgctctgagcgcgccggtcccttccaggttgcgcgggctccggacgag

SEQ ID NO: 23531 - DNA, 2300 bp, Homo sapien
agcacaatgtacccacagaactgaatgatcagcaaggctggaatggagacagtggggtggggaatgttgagagatgaggatggtgaggtaagcgggggtagaagtgatacagtattttttgctgcttagttcagctaaaaccaggttcttgtaacacgaccaggaaatattaggaacgcagataaactgaaaggtgaggagagggaaatttattaaaagaaagctctcagtgaaaaaagaagggagtatgctaactgtctcccacctcactgattgaataccaggccaccacacatgagctgaagcggccaggctcctccccgctgcacaaggtgcgaaattcctgtggctccaccccagtctctcagtgtgcaggtgggtcaccagtctgttgcgggcatgcacagacaaaactctggacaggttcccttatctgcacaaaagcatctgatgtaaacacttgtggggtgggtcagagattgtccggggacaaccttcccccgctaactgaccaatccctacccttatctgcctcctgcaactatcagaaggccatagtcagaagctggccattctaagtacaaaggagggccactgaagggttttgaggggacgtgccagcccttgagatagagtgacaaaaagagaaccagatgctggggagctggttctgttttggaatgttgtatagcaatgcactttgtgccctgctttctaccctgttggctcacctctgatgccagtgcagctgtggggaacatgtccctgcactctgacaccatcacttttgcttttctcctcacagctttctccagaattgggaaatccctcaacctggcaaaagtatagctcaaatgtgcctcagctaccatttcctggtggcagtcctcaaccaatgggtgccgggaattggtgaacaacgccccagccccccagcctccagagaaacaattctaagtgacatggatgatgataaccagtctatgcccacagtgattatcagctcagcaatgtaccctttactggcttttctccttccatatgtcactattcctgctccctcactcctgcttcctggaattaccttcccagaaaaacttcattcaggtaagccatagtcctaggctctacttgagggtaggggaatccaaactaaagtaagtgtctgtaggacttcaaagtaaagatccaagttagactttcaggagaagagatttggggtagaactataaacttacgttttcttcctaatgggagctgacaacacagaagtagatgaaattttccagtaatagaagaaaggggtctatgaggaaccatgaggaacaacaacatttctggcacaggcagaagaagagtcaaggagacagaaacgacaagagaggtagaagaacaaagaaagtttgcaacatggaaagccagggaggaggaagtttcaagaaagagtaggtgaatctatcccagcagcagccagggtgggcctctgtcctcgagcagcactggagccagactcagttcccggatcttgcagccgaggagcctctcaagcatccacagcccccaccagtgtggggacggtggatcctgtggtggacatccccggggatgtgactgcctgatggtggcagcaacagcagcaacatctgagaccacggagtgggggtctttggcagagaccccagggcagctgaggcagctgggcttcctcccagctccatcagcctttgggtccatgagaatcccttatcctttacagccctgccctggctctgggaaactggggatggcctctgtgacccccctttgagaggtgaagccagctggacttctgggtcgggtggggacttggagaacttttctgtcttacaagaggattataaaatgcaccaatcagcactctgtagctaggattgtaaaatgcaccagtcagtgttctgtggctagctagaggtttgtaaaatggaccaatcagtgctctgtaaaatggaccaatcagcactctgtaaaatggaccaatctgcactctgtaaaatggaccaatcagcaggatgtgggcggggacaaataaaagaataaaacctggccaccccagccagcagcagcaacccacttgggttcccttccatggtgtggaagctttgttctttagctcttcacaataaatcttgctggtgctaactctctgggtccgtgacatcttcaagagctgtaacactcatcacaaaagtccgcagctccattcttgaagtcagcgagaccaagaacccaccagaaggaaccaactccagacacaccctgac

SEQ ID NO: 23532 - DNA, 2300 bp, Homo sapien
tcttaagaaaagacagaggggaatgagatagtctcagcctgactatattgggagttcctcagtttgtttctcaccaggattccaaagaaaatagctggatgttgtgaaatatgagctttcaaaagtgctatagaaaacttttagcactgttcaaagctgggagcactcagccaataaaaataagatacttgctcttattctgaaatcccaaattaaacaaactaaggtcagagtaacaactgtgtttcactctagcatgcctcagtgagaaactggaggagacagccctgggactgaaaagccccctgtaccaccttgaactgttagattcaataagatgacattgtatttatattgtgctttctttctaaaagtcacaatcaagggaatgtagcacctaacataaaccatcagaacttgtcacaataccttccatatgtaatatactgagagtctcacatgacagtctccagtatcctagcctaagatttgtaaaatggaacaaaaacacattctctattccagagaaactcttcagagctcaaatatgtgtttaggagagagagagagagagagagagagagaagagagaaagagagaaagagagacagagagagagagagagagagagagaagagagaagagagagagatgtaaaaacccaatgacattttccagggcctcagtttctagaactttttcttgcagcattgcactgcagaggaagaaggaggcaaagtttgtgagtgtcagcttcctgaacactttgacaataagagcaaaaagaaaatgatcaagaaactataagcagaaggttcctcctcatcacagcatttcaggaataaaaagaaaaagatttactaaaattagccacagtgttaaaccctaaagcagaaagctttaaataaggcaaatggtctaaatgcagagcttcaggcaactttatcaacttcatgttatacatcatagctagcaaattaattattcccagatgttgggatgaagaatgctgctgaattgttttgcttctccaacttttcagtataaacacacactcacagggttacattcccttttttggctcccaacatgcaagtaattatacactgtgcaggataatgttggatgagctctcaaatgaataccaagcaagttctgggttctgtcagccttttggataccatgtccacaagcatttttttctgacagtctttagtaacaacttgtaaacaaactgtttctagttaaaaaaaatattcaacagcagtacaacctcatttataaattattccaaactcctttagagctggagagggataaattcaccttaaatatagtgcagctcctttttgcatcaagaacagtttttctacaatccttgtgagcagggctcataattcataatagtttttatatttttacattccttatgttttgccaacatgtaaacaaagagaagaaaaaagcaggttatgaatcaagtgtgaattgagaatgtgtttaggattaaacacagattctatgaccatggccagaatgaagagagtaaagggtcatattttctaatccagctccaaagtttcataggacaaatttctgctgtcaggtgagtcatggagggattttttagggggctacctgaggccttcacacttcttggaataaacaaacctgatgaatttgtcctgggtcgtcatataatgaggcacaggtgtgtgtgtaaaatatagaagtgggggagataaagacaacacagggaaaaacttagaaatggttaaagaaaaaaaacacattttttgcagaagggagaagttctgtagttctgccaactgcaacacaaatgacaggaaaagttcaaggaaagttgatatctaaaaagaaataaataaaaggaaattcaatgagaaacaatattcaggtcaggtcaaagcctagagaaaaatgcgcattcagaagtgggctgccatcctgctttttctgaagtgaacagctgctgggtattgaaaccagccctcacggttgggtccctgccaccatggcaacactctggtttctgagctggagtggccaaggcacaatggggtggttccatggcccagaagcactctagctacagattaggtaggttgtgtgtgtgttttttcctttgtgtatatttgggggactttgattcctgggtttgtgttcggctattggaaacttttctaacctatcataagccctgacctaagcagcaaattttcatgcaaatagcagcatggaaaggaagaactgaggtgttcaacaggcaaataatgtat

SEQ ID NO: 23533 - DNA, 2300 bp, Homo sapien
ggtgtctagaaggaaaaataagagtttacatccaagacaaatatttcccctaaaaagaagagctgtcataagaaactatcagtctcttgaaattttccacaacttgaggaagattccctagggatcctactcctttatttttttttaagacaccatttaaaacttattacttttaagggaatttctttacaataaagtcagtctctctattttttctctcttccccctctccctttggagtaagggaagcatgttaaaagaaaccagaatgaccacataagaaagtttgagaacttccagagaacagtaataaatagggtgcaaaaaccttctgatcatcatgtggattgtttctgaagggtaacttggatgaaaataatttatgaccatttctacaaataagccattaaaaaactccacacacttaaagcctactaaagatgcagaatatattattatatgagatcataatggctgtaggttgtagtgacttcgtaaaccactcaggaaggacatcagagaactcttaatagaaaataagaatcaatatgattattacgattatcttaacattttagaattgactagcaaaataagcgataactatgctgttttctgtaaaatgcacactgtgctcttgtattattagatcattttctttattgaaagtggaaattgaattagatactggattcaagccttatatctgtctccccatctctcttgattcttcaacatgtctctccactttgtcttggcccccaatgtctacagatggactcaattctcacccatcactgctctctcttcctgtccctgaaagaatcctccctagaccctaacacctttcaagctactttgtccatgcaccctgctttccaaccttcgtaagattgaatgatccttgtttccagaacccatcccgcttgctttctttttatgttagcttgcctctcttttttttccaaactgtctgcccatagcttgctgatgcgcctacttctctgattattccttctcggtctctttcccattttactctgtttattccttagatgctaggattcccctgaagtttcattctttgtcctctttctccacaccaggggtctgtgaaccacctaaaactgaaaacaattttttgtgttttgagacagaacactttttcccccttgagaaagtatctgtagctttcatattctcaaaagggcccttggctcttttaacaagattgagtgtccctgccctcactctgcctcctcctttttgcctttgaccaccctttttatatgctagctgttcccaaatccatctacagttctcactaggggcaaaagagtccgacagcgaagaggaaaccaagattcaaagaaatgttgaagactccgaacaataagaaattgtactgtacacattttgtgtctagctcagctgattcaatcccactgaagaccagttgactctatgttgggcggggagcggccggggtgtcggggggtgcctgacagggtcattacttcaggttgtcaggtaagatcccaggaggaactggtgaaataaaggctatgcgcaaaaaccctagttgccagtggcggaggagagggcgcgcccaggtcctggcggagatgagaacaggagagaaacccacaggcagctgcactgcccacagctgcagcgaagccaatctctaggtctgcaatcacccttaggggccagaaacccagccccgcaccagcggcgcctttgacggacagccaccttctgcaatcaccttgcagttcactataaacactccctattcctcccgcctatcgcttccctctccaagccaatcagaagaacgggcgggatcgtccttagtcggttccttctttttttttttaaaaaaaaggtagcctgtgcgtcgcattccggcttcggggaaaaaccacctcccgagcaagggcaaggcggagcccctgtgatgggcaggcagttctaccaatgaggtgccccagccgctgtaagacccggccgccgaggtgggcggggcacgcgcggggcctggccaatggcggcggggcggtggaggttgagctgccgtgggtagggttagtgtgagaggtgcggcgggggaggtaatgatgatggtggcggaggagaaaggcgggggagggggtgctgggcgctgagcggtggctctggcagggcttggtagggtgggggacggtcgcggggcgatctgtcagggagggggtgggcgtgaggggcgccgtccgcctgaggggctgcagatcccggctaccgcgagcgccgtggct

SEQ ID NO: 23534 - DNA, 2300 bp, Homo sapien
aagaaagtttgagaacttccagagaacagtaataaatagggtgcaaaaaccttctgatcatcatgtggattgtttctgaagggtaacttggatgaaaataatttatgaccatttctacaaataagccattaaaaaactccacacacttaaagcctactaaagatgcagaatatattattatatgagatcataatggctgtaggttgtagtgacttcgtaaaccactcaggaaggacatcagagaactcttaatagaaaataagaatcaatatgattattacgattatcttaacattttagaattgactagcaaaataagcgataactatgctgttttctgtaaaatgcacactgtgctcttgtattattagatcattttctttattgaaagtggaaattgaattagatactggattcaagccttatatctgtctccccatctctcttgattcttcaacatgtctctccactttgtcttggcccccaatgtctacagatggactcaattctcacccatcactgctctctcttcctgtccctgaaagaatcctccctagaccctaacacctttcaagctactttgtccatgcaccctgctttccaaccttcgtaagattgaatgatccttgtttccagaacccatcccgcttgctttctttttatgttagcttgcctctcttttttttccaaactgtctgcccatagcttgctgatgcgcctacttctctgattattccttctcggtctctttcccattttactctgtttattccttagatgctaggattcccctgaagtttcattctttgtcctctttctccacaccaggggtctgtgaaccacctaaaactgaaaacaattttttgtgttttgagacagaacactttttcccccttgagaaagtatctgtagctttcatattctcaaaagggcccttggctcttttaacaagattgagtgtccctgccctcactctgcctcctcctttttgcctttgaccaccctttttatatgctagctgttcccaaatccatctacagttctcactaggggcaaaagagtccgacagcgaagaggaaaccaagattcaaagaaatgttgaagactccgaacaataagaaattgtactgtacacattttgtgtctagctcagctgattcaatcccactgaagaccagttgactctatgttgggcggggagcggccggggtgtcggggggtgcctgacagggtcattacttcaggttgtcaggtaagatcccaggaggaactggtgaaataaaggctatgcgcaaaaaccctagttgccagtggcggaggagagggcgcgcccaggtcctggcggagatgagaacaggagagaaacccacaggcagctgcactgcccacagctgcagcgaagccaatctctaggtctgcaatcacccttaggggccagaaacccagccccgcaccagcggcgcctttgacggacagccaccttctgcaatcaccttgcagttcactataaacactccctattcctcccgcctatcgcttccctctccaagccaatcagaagaacgggcgggatcgtccttagtcggttccttctttttttttttaaaaaaaaggtagcctgtgcgtcgcattccggcttcggggaaaaaccacctcccgagcaagggcaaggcggagcccctgtgatgggcaggcagttctaccaatgaggtgccccagccgctgtaagacccggccgccgaggtgggcggggcacgcgcggggcctggccaatggcggcggggcggtggaggttgagctgccgtgggtagggttagtgtgagaggtgcggcgggggaggtaatgatgatggtggcggaggagaaaggcgggggagggggtgctgggcgctgagcggtggctctggcagggcttggtagggtgggggacggtcgcggggcgatctgtcagggagggggtgggcgtgaggggcgccgtccgcctgaggggctgcagatcccggctaccgcgagcgccgtggctggcttggctgttccatgtggctccggcggggatggaggactcggtggcggcggcggctgctgctgcggcggcgacggaggagcggctatgagaagggaacggggccagactcagcccgacagcgggattagaggtgtgaggagggggcgggagtggacgagcggcggggccggggctcggggtccgggctggggtcttctggtatcgcctgggtgacagggaccgcggacgagccaccgcctgtctccgctggggggcaggggtctgggctccgtgcg

SEQ ID NO: 23535 - DNA, 2300 bp, Homo sapien
gaaagtatctgtagctttcatattctcaaaagggcccttggctcttttaacaagattgagtgtccctgccctcactctgcctcctcctttttgcctttgaccaccctttttatatgctagctgttcccaaatccatctacagttctcactaggggcaaaagagtccgacagcgaagaggaaaccaagattcaaagaaatgttgaagactccgaacaataagaaattgtactgtacacattttgtgtctagctcagctgattcaatcccactgaagaccagttgactctatgttgggcggggagcggccggggtgtcggggggtgcctgacagggtcattacttcaggttgtcaggtaagatcccaggaggaactggtgaaataaaggctatgcgcaaaaaccctagttgccagtggcggaggagagggcgcgcccaggtcctggcggagatgagaacaggagagaaacccacaggcagctgcactgcccacagctgcagcgaagccaatctctaggtctgcaatcacccttaggggccagaaacccagccccgcaccagcggcgcctttgacggacagccaccttctgcaatcaccttgcagttcactataaacactccctattcctcccgcctatcgcttccctctccaagccaatcagaagaacgggcgggatcgtccttagtcggttccttctttttttttttaaaaaaaaggtagcctgtgcgtcgcattccggcttcggggaaaaaccacctcccgagcaagggcaaggcggagcccctgtgatgggcaggcagttctaccaatgaggtgccccagccgctgtaagacccggccgccgaggtgggcggggcacgcgcggggcctggccaatggcggcggggcggtggaggttgagctgccgtgggtagggttagtgtgagaggtgcggcgggggaggtaatgatgatggtggcggaggagaaaggcgggggagggggtgctgggcgctgagcggtggctctggcagggcttggtagggtgggggacggtcgcggggcgatctgtcagggagggggtgggcgtgaggggcgccgtccgcctgaggggctgcagatcccggctaccgcgagcgccgtggctggcttggctgttccatgtggctccggcggggatggaggactcggtggcggcggcggctgctgctgcggcggcgacggaggagcggctatgagaagggaacggggccagactcagcccgacagcgggattagaggtgtgaggagggggcgggagtggacgagcggcggggccggggctcggggtccgggctggggtcttctggtatcgcctgggtgacagggaccgcggacgagccaccgcctgtctccgctggggggcaggggtctgggctccgtgcgtgaggagactgggctccggcggactgtttccctgaggatgggggagggaggcaccgcaccctgcacagtccacttgccccgctggtcattgcttcacccccaggcaggagtttccatttccctccggttggcagcgaaggagcccaagtggcctggagccgggacattgccctctctctgcctggagatttccctccactcctcgttccccatccatttcctccctccgactgaaaaatagcattcctcctggctccctaatttgttccaagcacatattgtcggacttgaggctattaattatcgactgaaaaacaaagtttattaaaaaatactccacttctccctctttctggcggtggacattaaacagcatccctagactttcccgctctgctcgcccttcagtgatgctaacagggggaggtagggccccgagttaccgtctctctggattgttgttggtgctgactacctgatgtgtcgctccacgtcttcggtgtgaattgtaatttcttccttggtgtcttgcatccttgatgttactggcttttgaggtcagtgttttgtttcattgtttaaaagacatgcagagaactgggatggtcttttgcagcgttatttaacatgggtggttagtcatttctcatgattctctcctcatattctttctctttttgtctttgttttgcttttcagccctccagaatacccatcatatagcccctgaggtggcatggtgatgtctccatgagggaaccccttcccactcatcctgtcacgtatatcatagtgttcttgactgggccattcatctaagatgggatttaccctgtgaaacagggagaagacttatggaccccaagcatcatttcgagttgtagttgagtttttaaaa

SEQ ID NO: 23536 - DNA, 2300 bp, Homo sapien
aaggcattttcctgtgacatctgatcttaaccaatatgtcagtgtttttagataatttgggaatgtttagaatactgcctgtggtgctttccctgatggcctgcaattgatgcctgtcagtcaagttgtcaagacacatgaaaaggaaaatgacttcaattttcctaaaacatgtaaaataacaaaccaagcctatacatgcacaccaactgagtcattctctctagtaaatattttgaggtacctatattatgaagcctagtgctgtgaaaattgaagaggttttaatatcacaatttatttttcattttctttcttacttgttccataatgtttgttaaactacaagaatatgagacaaagattaaattcaaacatagcaatgtactttaacaagtaagtacagaagactgattcattctcaattgttacataatttcctaacatgtcttttaagaaaaactttgaattataatccttaatctaggttgctaaaaagagtaaacattttacatcccagagcaagaatatatctagacggttcttactttctctgagagtatatctaaacctttagccatacttttaatgcttcctagcaacacaatgctgttttcaagggttagttcaggatagtaataattaattgtaaattgagaaacagcttagattattcaaaactagaaaaacctgatgtgccacagtcatttaaaggctaacaaaaataatacaatgcagcctcacattctcaactaggttgtagtactcaaaacatttcattctttccaaaatgaatgaattaaatgaagtcactcttttcattatgaaaatcagtcttaattgagcatttaaaaatgtttctgtttctaggcttaaattgcatttatttgtattttatatcaggtaatctagtagttcttttgacttatctagctgtgcttttcttcacaaatcactgcaattacatgactgtggaaaagagaggttgatagaaatgataaagctcaatatggattagtctaatgtttctttatactttagttccttatcttaaaaatccattctcagagttttaaaaaatttaactctcatttttgcttgtttcatttattggaaaaaatattttaattcttatttattacacttttttctcttgcctctccccccacttttacacatgtctgacttttggaaatttgttcttttcatgtgacataatgtcgataacatgtacccaaacaacaaaaattaaaaatgtgctctttttaaaatgtgtgaattatatgaactgttcaatatatcttttgtttttccttcctttgaaggcatacgatggatttgccagcataggaatttcccgattattggaaccttctgatatggtattattagcaattcctgataaactgactgttatgacttatctctatcaaataagggcacatttcagtggccaagaactaaatgtcgttcagatagaggaaaacagcagtaaaagcacatataaagttggaaactatgaaacagatacaaacagttctgttgatcaagaaaaattctatgcagagcttagtgatctgaagcgggagcctgaactacaacagcctatcagcggagcagtagacttcttatcacaggatgactctgtatttgtaaatgatagcggggttggagagtcagaaagtgagcatcaaactcctgatgatcaccttagtccaagcacagcctccccttactgtcgcaggactaaaagtgacacagaaccccagaagtctcagcagagctctggaaggacttcaggatctgatgaccctggaatatgttccaatacagattcaacccaagcacaggttttgttaggcaaaaagagactattgaaagctgagactttagaattgagtgacttatatgttagtgataagaagaaggatatgtctccaccctttatttgtgaggagacagatgaacaaaagcttcaaactctagacatcggtagtaacttggagaaagaaaaattagagaattccagatccttagaatgcagatcagatccagaatctcctatcaaaaaaacaagtttatctcctacttctaaacttggatactcatatagtagagatctagaccttgctaagaaaaaacatgcttccctgaggcagacggagtctgatccagatgctgatagaaccactttaaatcatgcagatcattcatcaaaaatagtccaggtaagtgagttagaatgctgaatactatatttagtaattagttattctctgtttttgtttctttttgcattc

SEQ ID NO: 23537 - DNA, 2300 bp, Homo sapien
tctacctgggtggacttttaaaagtgcaaaaaagagttttcgttccaactctaagctaggcgaatcttttaaatggcacctcctcctgaaaattaggcactttattccctttcgaggaatttctaccccttgtttctaatctcccccactcccccaccccgacaggcggggtaaaaagtttgcacaggattaagtgtgagggcaagtcaaggagcctccaggcgcatcgcagtggggagcactcgcgctgcccgggctgcggggtcgggcgccgagagcggaccgggcgctgggtgaggaggaggagaacgaagggggagcccgctgagtgaaaaggggccgcggccgccgctcatcaaagtgcttccccctcccccaagcgacactttcctttggagtccgaataaaatacggtaacagaatatgatggagggcacactgtttccttaactgcttctcaaaggacccgggagatcttcttaggacctttaataaggctttggtcggttcttttgttgatctctcaaaatcaactccttctaattgaagttggagctgaaagcgagctaatgttcaaagaaagtggccgccagaccaacgaaattacattttttttttgacgatgagggaacatctaatcaaagaggcaggggaggaggggtgggagtgggggcgtacgaaggagaaaaggaggttttacaagatccttctctggttcacaaaagtcagcgacacgggcgcttctctacagaacaaagacaccgcggcccattcacaaaagggagagaaagagagaaagctgaataaaagaacgagagaaatggggaaaaaatgagagagagaaggagggagagagtgagtgagaaagaagctttaagaggaaaagaaacagtgcagagcgcagcgctaacccaggcggggacacaccttaggctcgcgcaggcccctaccaggagtagcccgcgaggcccgcggtcagccgcccgcggctcggagccactgtgatcgtgctgaggtttaaagaaagcaacgaaatataccccttccttaggttccgaggaaaggcgccggctggagcgcactagttttgggggaaagaatatgcggacgtcccggggtgcgcttcgccggcgtccgcgtccatagcccggcgctgccctagtcccggccagtccgctgtgtgccggggttggccctccagtgccggggcgcgtgaccttgccccattcctccaccttaactcattcctccctccaccaggccctgtttcgcctgcagcctcagcacctgacctgggtccggcgcagcgaggtgggacggcagtgcgctctggaatgtgccagcgcggtccccggggtacgcctcgcgggaggccggcgctctcggttccagatgctgccaccattctcggggaagttgggaggtatcaagtagcacggattttttttttcctaattagagtatttatctaatcccaaattgcaggcgaattttcttaacgctcagcccataaaaccccaggattaagaaaagaaagaggagagggggagagggaggagagtggagagggagagagactgggatgaaagtttcttgaaagcagcgcagaggattgaggcggccgtcgctaggcaaatgtccaggtgggagatgctgggccagaagccatgaccgttccagcatcggccgcggtgcgggaaggggaagtggggacaccactggaggaggtgaagccgtccagctcaaggccctcgagccgggaaggggcgagggagctgggtgtggagacaaggatccagcatccaggtgacctccaggcccggccaggctctggaggacacttgggacaaggggagggctttggatctgaggccgagggatctgaccaggggcggaagttctgctccggcccgcagactgtgcccaagcaagcccgctgccaacgcccctgctcctctgcgaccctcggaccgatagtctcttttcccgcagcgcgggctttcgagttccgggtcctccggcgtgctgggctcgtgcccgttctcgggagccagcgtctgggcaccacgcagcgatgtccggatgcagcgcccttgccgcgggccttaccccgccaggcgccggagtccacgctccaccgccgctgaggggcgttcgggcgccaccgagcagcccaaattgaaaccccgagaggctcgggactaaagctgaaggggcaggtagaggggccgcccggcggtcccagaccatcctagcaaatctggggcgagggaagggttgtcagttggccgattgggagc

SEQ ID NO: 23538 - DNA, 2300 bp, Homo sapien
gtgcgctccagccggcgcctttcctcggaacctaaggaaggggtatatttcgttgctttctttaaacctcagcacgatcacagtggctccgagccgcgggcggctgaccgcgggcctcgcgggctactcctggtaggggcctgcgcgagcctaaggtgtgtccccgcctgggttagcgctgcgctctgcactgtttcttttcctcttaaagcttctttctcactcactctctccctccttctctctctcattttttccccatttctctcgttcttttattcagctttctctctttctctcccttttgtgaatgggccgcggtgtctttgttctgtagagaagcgcccgtgtcgctgacttttgtgaaccagagaaggatcttgtaaaacctccttttctccttcgtacgcccccactcccacccctcctcccctgcctctttgattagatgttccctcatcgtcaaaaaaaaaatgtaatttcgttggtctggcggccactttctttgaacattagctcgctttcagctccaacttcaattagaaggagttgattttgagagatcaacaaaagaaccgaccaaagccttattaaaggtcctaagaagatctcccgggtcctttgagaagcagttaaggaaacagtgtgccctccatcatattctgttaccgtattttattcggactccaaaggaaagtgtcgcttgggggagggggaagcactttgatgagcggcggccgcggccccttttcactcagcgggctcccccttcgttctcctcctcctcacccagcgcccggtccgctctcggcgcccgaccccgcagcccgggcagcgcgagtgctccccactgcgatgcgcctggaggctccttgacttgccctcacacttaatcctgtgcaaactttttaccccgcctgtcggggtgggggagtgggggagattagaaacaaggggtagaaattcctcgaaagggaataaagtgcctaattttcaggaggaggtgccatttaaaagattcgcctagcttagagttggaacgaaaactcttttttgcacttttaaaagtccacccaggtagacgtgtttgggaagttttttcgggtgggaaatgggcttcgcccgtacgaacaatccggggaaatcgcctcaaggaggatccttacgcagcatgtggaaaaaagttgagggcaggggtctgtggccacattttccatcaaaaagtccctgttagaggcagtctaagaaagagagagaaagagcgaaaaagaaactttcctatcaaaatgtttcaattaagaagtagggtgtacgtgtgaggggaagaggacgctgggctccaacgtttcagtagaagcgcttaagacttgcaaacacccttggtggggacctggaaccccgggagatgccgacgagcaagcaggtaagtggcggcgccctcccagtgggtgctcttcccaggcgcgagagtccggaggggccgaggagagatctgcacgcccggagctgctcccgcgctctgcaaagtagcctgcgccggcacgagcagcccgcggcgtcggtctcaggtggcggcgccggggaagaaaacgctggggcccgcggcgccgggagaggggccgaggcccgggctcctccagcccgccgcccccgggtcctggcgcccacacccgagcggctgagccctgtagcgcgcgggagagcgaaggaaccggttctccagcacctcgcctcctccctgccactccctccggagcgccgagagcgcgagaagggcgggggcgcccagggcaggcctggagacccacggccccctccgcggccaggactcgggctctccgctcgccttcctcgcctagctctgcgccgcttttgccagccgagtcccggagttagcgcgcgaccggggcggggcgggagggcggggagggcggggtgtggggggcgggggagggcgggggcgcgcggaggtaacccccggctcgcgcagccattgcccggctccctgtcactcagcccgcgcggggcccccgattggcggcctagccccgttacgcactcgcctcgcgttcacatacccggggagggcagtagaaaggtgatcaatcttcatcaggctacatttccaatcacctaaacaaccgagcaagacaagccactccgacaaggtaaatcgcttgatttatttagtttgcaaagtgactctgcaggacttcccagtccccactgcctccacgttgcaccgggagtgccgcggcaacgccgagccacctcccaactctgcccctcgaattcccccc

SEQ ID NO: 23539 - DNA, 2300 bp, Homo sapien
actgaagagtagtagctacctgagaacagagagaaactgtcaagatgtcatcttttcttatgaaaagatgaggaaaagacatctagcgtttgggtccttaaaccttaagtaagggaattacttacttgcttattcgaatatgcctttggatttaggaaaataggaacattggcactccatgtcattcctatacattagagaagtaatctgtttcccttcggaaaactcattaatttcatttcctggtttaatatttaaaatgtatatttttaatacttagtcaaatctgctatttgtccattggaaggatattttaagaaatttgtttattttacattccctcttggtcatcatgacagaatactgataatattaaactcataggaaacatgaaatttcctaacatttcataacgtaagtgatttgcattatgtgacaactgaaaatgtcagtcactcattgtgactcaatttcctcatctagaaattcataggtaacacacttatgcagcaaatcagacattgaaataatgtatgtgtatttttaagtacttagcaatttcatcgtggtatttctctcaaataagaagacttaatgatattgagagcttaaatataagaaattacacttaatagcataaagtacatctgtgttgtctgtcattgcccatttggattttaaaacaaggaagtggtatagagtattgtacttttgcttttctttacagctgtaccatagtttaattctttcagattgacataattttggcaaagaaaattgcagagtaaacatccttaaactattgacctttaacaagttttcctgtctacatctgaaaaaaatccaattcaatttatttaacagtgaagggacactgtgaggagttaaatgtttaccatgagagaacaacactggtaattactttgatttcagttccttttgatgtgcattcagaggatgaagaggtcaataatattatggccatgcaaatagaaaagggttccttttgaccatattgaaaaaaaatagcagaggattattaaagcattaaccttggttttaatggccttggttgagtggtgagatcacaatttggatgagcctgattatttactaaatacaatacataaatgcaacgggttcttaacacccgttgcactctggcattatcgcattactgccatcctttgttgccttgcagacaggaatatgaaagcaatctgtcatgtagtgagactggctccagaagcatttctctgataagaagaccccctgccctttgctagtgtctggtccagtaggcttagccatgcgcttaatccccagaaagtggttcgattattgctgaccagcaatggcaagatagttttttttttcttccaagctatcaaccttccattaattccttaagcagaaatacggtgcaatctatatttccttggcatgtgtcacacagatggtgccgtgcttatgttttcaaataaccatgttccaaaataacatagtttgaataataaattctacaaatcctgcctaagaaagagaagcataattctcagaagctgcataaacttttatgcatgatgctgtggcttatcccttttatgcagaatatatgtgtatacgtcgcatatattctttaaagagatatttgcctcaagttgtttttcctttttttgttgtcagtcattgttaacacgttatgtcttaaacagtagtgagactctcttggtcagcagtactgaacttgtcattttatacagctggtcctaaatcatatgtgtaggtcgatgctgtcaggcaaccatgactgtacattttggtattgattggaattgctacattcaatttcttcctagctcacatttctccttttccttcctttgctaaaaatggggagaattttgaacatatgtcttttttatatatgtgtcagaagaatttggtaaattctgacaccttcttacgcacatgtttaacatgcatatttacttgcatgtaactacatttccagatgctttaatttttgtaatacttgaggattttgcatcttttaaaagaaatgtttcatgtatgcttttttaaaattgttagattttctattatgaaatacccggcccaataaacaagacaacagagcgacatctagctatcaactgtgttcatgatagagttgtttgctggtggccactggtcaacgatgatgcttggccttgggcccccatttcttctgagaaggacagagccaatctactcctcctgggttatgctcaaggaagactagaggtaaatctaaaaca

SEQ ID NO: 23540 - DNA, 2300 bp, Homo sapien
aggtttctgcatgtagctttaatcaatgcatttattgtgttgcatcctttagccacctttctctttttactcacaatgtcagtaattgtttttcagtgaagaaaatctttataattttgtagtgtagatgcatgtgtaaaatatctgtataagttgtatatttggagagaggttttttaaagattctaaatcacagcatgtcttcctccctctctcccccacttacctggttttagctcctttttggttcaggtgtgctggtgtctctaagcctttctgggccgcagctggagaaagtggtgattgacagaagcctggtggggaagctcatctcagacaccatcagtgatggtaattacccccatgtgcaaatcaattgcctacattaacagtggggcaggagaaatagtgtgtcaacaggtagactaattattaccactggggacttgcaaacacaacaagtaattgcttgtaatagcgtacttacaccccctgggaccaatacaagtttcgactaatatttaatatcaaagtttttttcttgtcaactgttaagcttatattctgagttgttttttactttttccttaaaagaagtgaacattttttcaaaatagggttttgttttcattctttcaaaattatttctctataactggcacttcaaatatatattttatttccaaatgaattttgaataaataacacaaatatatcaacacaaccaccagtacacaattgatgctttggctctcataggaagattctttgttcctaaagtcttagagagattttgggctatattttctaaatagtaaagaccaatgcctaatatactggacagtcaggtcctattaagtgacatctcaatcagtctgtaattggtacaaagcacataagaaaaagatattaagccagttattgaataggaaggatactgacatttattgaaccaaaaggctctatatgctgggttcctaacctacctatttaatacaagaaaacaattgtataaggtatagttatttccatttttacacataaggaaacgaagctgagctactaaggaacatgtccagagtcatatagctagaaagtgactgagctaagatttgaatacaggttcgggctgtgaagcccattttcctttcactatactgttctgactcctgaatttttaaagattatattcttttattcaaggtaaaaaggttgagaaacattgtattatcatgaaagattgaaaatggtcagtatcttaaatttagtaatcaaaggaagtatgtcctagtggaaaggacagaggtgagaataaagaaatcttccgtctgctgtgttctctcactagctacctctgaataaatcagacacaatcacatcatcttgaagaaaagaactctgcaggatggccataattagcaacattactgatagtaataagctgggggtaggattgtaagcatgccattttcccttccttacaggagtaaggtgctgaggaagcttccctgtagaagaggttccattttcatatgtctaataattgaccccttcattggtactgcaaataaaatactggctgtgatgattttgttatattgatgctcctcaatgagaattaaaaggaaactttcagcacaattcgtgtctctgagttatcctttttcatgtatttcttttatttgtacccaaaataatacactctcatgggaacatggtaacaatgtgatttcttggcagttctccagattctcttgtaattgtgtagatccactgttggtcactgtttgtatggtcaggggtgtgaaagtaaaggaaaatgtataaaacatttaataatttctttatgctaggaacaatgcaaaacatttctcaaattcctgtaacatgtttttatcaataattttatgtaacattaatagccctttatataatccacaaatattagttatttacctacttgtgtgctttggtgacaaagctgtagaaatattgtgctaattttcattattagatattaatttatgtaatgtacatattggtcataatatgctttatttcatccagcttgtatacccctaaaagaagattcactgatgaaaattttttaaataaatagactggtagagaacactgatcagtatcccctaataaatccactttatcctcggatggtttctatcatgtaaacataggattaaactcttagcacaaataaaatggaatgttttcgtctctacattcaggtgcgaaatagttttttaaaaatacctttatagccctgtttctaaatacatctc

SEQ ID NO: 23541 - DNA, 2300 bp, Homo sapien
agctttactgaattagtttatcagttctaggagccttttggaggagtctttagggttttcaaggtaaacgattgtatcatcagcaaacagtgacaccttgacttcctctttacccatttggatgcccttgatttgttgctcttgtctgattgctctggctgagacttccagtactattttgaatagaagtgttgagagtcagcatccttgtcttgttccagctctggctgggacttccagtactatgttgaatagaagtgttgagggtcagcatccttgtcttgttccacttctcaggggaaatgctttcaacctttccccattcagtattatgttggctgtgggtttgtcatagatggcttttattacattaaggtatgtcccttctatgccagttttgctgagggttttgtcgaatgctttttctgcatctattgagatgatcatgtgatttttgtttttaattctgtttatgcagtgtatcacatttattgaattgagtatgttaaattatccttgcatccctggtatgaaacccacttgctcatggtggattatcttgtgatgtgttgttgaattcagttagctagtattttgttaaggatttttgcatctatattcatcaggaatattggtctgtagtgttcttttttttgttatgtcctttcctggttttggtattagggtgatactggcttcatagaatgatttagggaggatttcctttttatcttgtggaatagtgtcaataggattgataccaattcttctttgaatatctgatagaattcagctgtgaatttgtctggtcctggacttttttttgttggcagttttttatattaccatttcagtcttgctgcctgttactggtctgttcagagtttctatttcttcctggtttaatctaggaaggttgtatatttccaggaatttatccgtctcttctaggttttctagtttatgggcataaaggtgttcatagtagccttgaatgattttttttttttgtatttctgtggtattggttgtaatatctcccgttttgaacttattttgatcatctctcttcttttcttggttaatcttgctaatggtctatcaattttatttatcttttcaaagaaaccggctttttgttgcatttatcgtgtgtgtttttgttgttgttgttgtttgtttgtttcagtttcatgtagttctgctctgatctttgttatttcttttcttctgctgggtctgggtttggtttgttcttgtttctctagttccttgaggtgtgacctgagatggtttgtgctctttcagacattttgatgtacgcatttaaggctatgaactttcctcttagcaccatctttgctgtatcgcagaggttttgataggctgagtcactattatggttcagttcaaagaatttttaaatttccatcttgatttcattgttgacccaacaatctttgaggagcaggttatttaatttccatgtatttgcatggttttgagggttccttttggagttttattctactgtggtctgagagagtacttgatataatttcagttttcttaaatttactgagacttgttttgtggcctattctatggtccatcttggagaaagttccatatgctgatgaatagaatgtatattctgcagttgttggatggaatgttttgtaaatatctgttaaatccattttttttctagggtatagcttaaatccactgtttcttttttgacttggtcttgatgacctgtctagtgctgtcagtggagtattgaagtcccttgctaatactgtgttgctgtctatctaatttcttaggtcgaatagtgattgttttataaatttggggcctccattgttaggtgcatatatgtttaggattgtgatatttttcctgttggacaagtcattttatcattatataatgtcactctttgtctcttctgtgctgtgtctgcactcccaattcaccccctcccttgagttctgtccagcaaacttcacattcacatttggttgaaattgttacaaagttgagctggaagtttccttctccctgtggtctcttcccagggagcccttcccaaggatctctgcaagacaaaagtcagaaatggcttccctggggactgagagcccatagttctcttcccactgctgcttctacccttttgttttgcttggctctctaaaattgtctcagctccaggtaaggtgagatccttctcctgtgatctagacctttaggttccctatttagggtgtgtgttcgggggtggatgatcctcc

SEQ ID NO: 23542 - DNA, 2300 bp, Homo sapien
aaatcatgagattgttttgttatactttaagttctagggtacatgtgcacaacgtgcaagtttgttacatatgtacgtatacatgccatgttggtgtactgcacccattaactcgtcatttacattaggtaaaatcatgatatttttaaggacaacaacatggaaaaatctttctgttagcagctagtagaagaattcatttaggaggataatggaagaaatttttcgtaactgctcagagtaaaaagtaaaactcagagaacctaggtttgagaataatgcacacctactaattcaggactagacacataaatttgagagtttttgacattaaaagtagcatttgaagtgatgcaacttatgaattagctcactgagggatttagtatagacagagaatacaggcaccccaatgttaagagatcacaactaaaaaaaatttagaaactccgcagaactgagaaccagtaacaaaagaggaaaaccaggaaagtatgttgtctgagagccaaatgaataaagagatacaaggagagtcattcaggtatgatattaataaatgctaaaagtaaagcattacatttctttccaaaaatagcaaatcctccaaactgaaatagagaaaaattgaaagatattacttggcattcatttatcagtgacagagaaaaaacggaagttctaacaatgttatctaatagagatgttttattcattttcattacgtatatgctgtgtatgctactcccgagcatcatatcttccttttaacatccacaagaaacaagctttcaaaaagcacagcaattctcttggcagcattaattttaaagagaacctcttaagttgttttaccagctgagactgactgactaaacaaccagtgtctccccttcagtcgccagtctttccttagaaatgcctgtttggcataactttaagactcaagatggtttaaggcgcatcctgtttcttccaaaagggaatggacaaaactcaacattcacggagggcttagagcaaattagaaccgtatactgtgacctcctggaagggagaggctcacctcctacaaagtaaatgctcaataaatatttttgatataactctggaagagctccatttggggtcgggggtgcacctactccagggcaccaccccctccaaaatagctgcattcccacagccctcatactccgctcagaaaagggaccggcgagcttgcaggcatccgcacagcggataaaagcaaagcgggacggcgcaccaaccgcattccggatcctaaggttaaaagaaaaccccttgccctcgggccagggctcacctgtctcgggagtggggaagaagcgcgactcccggccgctttggagtaggcgtcccagcaaaactctcgcctcatcaccagacactaccccgggcagaaggttcctaggctaggtcctcggacccgagagggagcgacacgctcgcttggtctcttgggtctccaggacgccgccgccgccgccacagtttcctcaggtgctacaaagcagccagggtgtgcgtgcgctcccgcctcgtcgcttagcaacctgagaagctgtccggtcgtcccaacttatcaattcccccgcccctccagagtgtcaatcgttttttaaaagattttgtttccgggtcgatccagctttacgcagcggaaggtctctttacctcccacgtttaccctcatgggaggatgcagtctcagtcacgcgcgtgggggtgatgtcgctaaggggtgattctcccctccctagagttacacacgctatctctcccgccaattgccgggctccatcaggcaggtcctttcctcctgagcccaaaccatccgtttgttgtcgtcctccaatcacaggggctcatcctcagggactactttgcaatcggcgcagagcgcagtgagaagagcttgaaaaaaacctctggtatcgggaagtgtagttcaacacttgaaggaaatgctttggagattgcgccacaaccagggcagcgtaaactacagttcccagagagcgccgcgtcgggagcggagccttttctcgctaacaccgctcgccctctccgagtcagttccgcggtagaggtgacctgactctctgaggctcattttgcagttgttgaaattgtccccgcagttttcaatcatggtgagtgtgggccccgggttcctgcccacctctggccctcgcgcccttgagtggggtttcttgcactttagggacttttgggaggcagctgtgcaaggcactgtccttcgcgccctttggcaa

SEQ ID NO: 23543 - DNA, 2300 bp, Homo sapien
atataatctccaaattcccttttaattctacaattccagtattttgaatggcaaggaataaagctatcaagtaatctacatgctgataacatatttgagtttgtatatgcagtatgaactggtaacttcatccggaatctcagctagtaaaaataagttttcagggagttgagtacactgtctctcccccgctgcgagacctcactgcggtggtccctataaaaataaaaattcagaaagacttggtaagtgtaagacacaatatagaaaaatggcaagagtgtgagactcttggagcaaatcacattctctttgggtctcgataaactccattttaagatctgaagtggggagattcgtcaagatgacctttaaaagatcccattcagttctaaaagcaaaaagtccaaggttatcagataataagtacctctgctttctagctaaggttattaggacagaaactaccgaaaccataatttaaatgactaattatgtgacaaaacatttaggaaacctaggtttaacacctactggaaattagtagctgtctccactggccccgttagacaggcagagagagtaatgcccttgccttgaaaacgtgtcttttcaggttctgggaaatttccaattcattcaaacatttctccacattctccagccgttttagtattttgcagataaagtaggaaaaacagtcgcaactataaatacaagccattgtattgatagtatgaagcgatttctctgagtttgatgacaaatgtcaccttcaagcagtacgcagattattcctacgccagagttccttcaccaactctccccctccccctctctttcagcagagacaagcgatggagatgcaggttacccaggtcttccatgacaaaatggttactctgttacatttaagagaggtgcttctggaattcacaatatacagttcaataaagaatatttgcagtagttatttagttagtgatgctgtcacttcaatatatcctggcattacaaaaaaggtcaatgaacgggttccaaataacattttgagaaattagatatggcggaaacacgtctgctgcaaacgcagatcgtaatctggagcacctggtaaatactacctttccagctttttgctttcaaggtccctgtgacaaaagccgttataaacactgtgggcaaatgaggagaaaaaggggttaggacccaacctttccctcccatcgcaaaccttatcgtccttatcaaacaccgtaacgtcctttggaaaatagctgcagcgtcgcattttgtcctcccgtcatgcagcaggattaagatcgctcctctcccaggacaactacttctccagagtcctcctaagagcgccccataccccgcaaggtggaaatcaatcccttcccattactgggtcactgcggcaatccccagaagatgagtccgagcttgccaaagggcgcgaaggacagtgccttgcacagctgcctcccaaaagtccctaaagtgcaagaaaccccactcaagggcgcgagggccagaggtgggcaggaacccggggcccacactcaccatgattgaaaactgcggggacaatttcaacaactgcaaaatgagcctcagagagtcaggtcacctctaccgcggaactgactcggagagggcgagcggtgttagcgagaaaaggctccgctcccgacgcggcgctctctgggaactgtagtttacgctgccctggttgtggcgcaatctccaaagcatttccttcaagtgttgaactacacttcccgataccagaggtttttttcaagctcttctcactgcgctctgcgccgattgcaaagtagtccctgaggatgagcccctgtgattggaggacgacaacaaacggatggtttgggctcaggaggaaaggacctgcctgatggagcccggcaattggcgggagagatagcgtgtgtaactctagggaggggagaatcaccccttagcgacatcacccccacgcgcgtgactgagactgcatcctcccatgagggtaaacgtgggaggtaaagagaccttccgctgcgtaaagctggatcgacccggaaacaaaatcttttaaaaaacgattgacactctggaggggcgggggaattgataagttgggacgaccggacagcttctcaggttgctaagcgacgaggcgggagcgcacgcacaccctggctgctttgtagcacctgaggaaactgtggcggcggcggcggcgtcctggagacccaagagaccaagcgagcgtgtcgctccctctcggg

SEQ ID NO: 23544 - DNA, 2300 bp, Homo sapien
ttagtggctctgagagagtgggaagctcgcttacaaagtgtttgtgggttcaaaatttaaatttataccgatgtataaagaaatttcattttataagtactgtttggaaatatttggaaactaagcttctagagtgctacttctctaagaactagtgactgagtagttacagatgtagcccctgaagatgggtagttagttactttttggagagttcttgaggcagcaagtgtacaacaacctttggtactatatctcaatattcaatcactcataaatcaagatgccattcttagatattaacaaatgctcttgctgcaattaaaacccatttcctttttaatcttccatgaaggcagaaaatacagtaactgatcatcgtttcttataataaaccttgtataattaaaaactcgccaggcgcggtggctcacgcctgtaatcccagcactttgggaggctgaggcaggcggatcacaaggtcaggggtttgagaccagcctggccaacatggcgaaaccccgcctctactaaaaatacaaacattagccaggtgcggtggcacgagcctgcggccccagctactcgagaggctaaggcaggagaatcgcttgaacccgggaggcggaggttgcagtgagcctagactgtgccattgcactccagcctgggcgacagagcaagactccgtctcaaaacaaaaacaaaaacaaaacaacaacaacaaataaatctcttcattgtccttcatcttttgcaggctaagtaaccctacgtggcccaaatctttcggtagtattttattttggtactaatgctcattggtaaagactgctttttcagtgctggaacaatttttgtactgtatacaaaggatgtagagattttgttaagatcttcagtctccaaatgctgttattaaactgtagacatctggattttagacacttgttttgtctggggaaaattcgttttacggccgagaggtttttgagtgtaatctttttggatttcatgtaagaaacacagtaccaatggttgtcattctctagtataacaatttttcactagccttttctgtgttgtttgttctaataacatttccatataaagacgtagaaccaaaaaatcaaagttcctttgtttagacaatgagtcattaaaaaattctcactttaccttggttgattagtgctgcccaaagcctcaaactcttctgtaattaccgtacttgtttattgaaggcacttaagagaaggcgctggcaaatcatctgccctggtgcgggctatttgagtcttaaagtggaaatgcaaagtctgaaatgcactcgctgccaggcacactgagtcttagatgcaggtggggttgacggtaccaggtgtgatttgacaagccgtgggctggccctgtaacagtccccaggctagtgtcaagttccgtgtaacatcctctttccttgaggacttcaagaatctaccaaaagaaaagcatctcttgaggagtaacttaggccagttccacgttgaagagaaaagtaaacgcctatcacagcagctctacaggattaggaaccggggcaatggggatggtggtggttccggtgagggagccttcacttgtcactttcttcaatgcctaaaccctccttttgttagctggcccacacaggccaatgcctactccctaacgcatcctcaccctcccccaaccagatgtgatgaggggagcaagcgtcccctgagaagcgtctgggctccctcggggcagctgcggtggggagctccggctctatccgcagggctttctttagtccctagtcagcgggaatatttttactgattggaaaaataaccagtcgtgctcaggtgctctccctcactgagatatactggcgaggcttccctggccgcaacgccgccgtaagtgctgctcccacgcgcggtatccccgcgtactgctcagtgcccaactccgacgggctctcaagtgccgcaacgccccgccccttgccacctccacacgtctcattggccagagcctgcgtccgcctcggctcctgactggcggctgcgcctgtcggtccgtgcggcagggacatttccgcattgaaggggctgctccgaatggagggggaggggaggtgtttaggagaaagtaggggctgtgggtgtcgggagccggctgacgggtggacaagggggggttagcagctgggctgcgaccgttagggaggggctcaaggtgtgcatgtgtgagggaagagagagagagagaagggcgcctcagaggtgactttc

SEQ ID NO: 23545 - DNA, 2300 bp, Homo sapien
tgttaagatcttcagtctccaaatgctgttattaaactgtagacatctggattttagacacttgttttgtctggggaaaattcgttttacggccgagaggtttttgagtgtaatctttttggatttcatgtaagaaacacagtaccaatggttgtcattctctagtataacaatttttcactagccttttctgtgttgtttgttctaataacatttccatataaagacgtagaaccaaaaaatcaaagttcctttgtttagacaatgagtcattaaaaaattctcactttaccttggttgattagtgctgcccaaagcctcaaactcttctgtaattaccgtacttgtttattgaaggcacttaagagaaggcgctggcaaatcatctgccctggtgcgggctatttgagtcttaaagtggaaatgcaaagtctgaaatgcactcgctgccaggcacactgagtcttagatgcaggtggggttgacggtaccaggtgtgatttgacaagccgtgggctggccctgtaacagtccccaggctagtgtcaagttccgtgtaacatcctctttccttgaggacttcaagaatctaccaaaagaaaagcatctcttgaggagtaacttaggccagttccacgttgaagagaaaagtaaacgcctatcacagcagctctacaggattaggaaccggggcaatggggatggtggtggttccggtgagggagccttcacttgtcactttcttcaatgcctaaaccctccttttgttagctggcccacacaggccaatgcctactccctaacgcatcctcaccctcccccaaccagatgtgatgaggggagcaagcgtcccctgagaagcgtctgggctccctcggggcagctgcggtggggagctccggctctatccgcagggctttctttagtccctagtcagcgggaatatttttactgattggaaaaataaccagtcgtgctcaggtgctctccctcactgagatatactggcgaggcttccctggccgcaacgccgccgtaagtgctgctcccacgcgcggtatccccgcgtactgctcagtgcccaactccgacgggctctcaagtgccgcaacgccccgccccttgccacctccacacgtctcattggccagagcctgcgtccgcctcggctcctgactggcggctgcgcctgtcggtccgtgcggcagggacatttccgcattgaaggggctgctccgaatggagggggaggggaggtgtttaggagaaagtaggggctgtgggtgtcgggagccggctgacgggtggacaagggggggttagcagctgggctgcgaccgttagggaggggctcaaggtgtgcatgtgtgagggaagagagagagagagaagggcgcctcagaggtgactttcagcctgcgagccttcttcccggggcgccataaacgcccccaatttcccagctgctaaaggaagaggaaggtgggtctcgctggcggcttgaggaggggcggggttgggcttccggcgaccccctggatgagtgtgtttcccgctctcgctggcccgctgtgtggtctcggaggcggaatttgggcttctgaggagcgcagggcaggcggggcgagaatatgtacgggaagggtcggtgccctcccttgggactcccgcgccggtgcacgggtctgcctctagccggtgaccccttagtgtccgctgcgggggaggggcagcgtagccttcggcccctaccgagaaaaagctgcggccgggtttcactgctcgaggcgggaaggcggggagctgaggccccgaccggtcggccagccagagcgtggaattggtagcgcctcctagtcccaggatgtttatggctggtgaaaatggttgcactgcccccgctggccggcctcgcccgcctccccgacccctgcttgggcgggagccgctgttaaccggggttttcgggggaggcgtttggggcctggacggcggcgcggggagggggcagctaggggcgcggcctgccagtgcctcctgcagtacagccctggagggcgtggggacttgggggcggtgaaatagccgctgtaggtccgcctctttcattgaagaaatttaagttcgtgtggttttaccttttccgggagtctccagctggccctcatttgtgtccggagctcaggagttcccaaaccgactcagtcgcaccaagtttccgtcttttggaattggggaaggagtttctttctttcttttcttttttcttgagccagttttaatcgctttgaataaatact

SEQ ID NO: 23546 - DNA, 2300 bp, Homo sapien
ggaagtagatgtttattttcagaaatgagagtttttggccttaaacaggaattatcttcttcagctttttctctattttgtttcgtctggtactcttgtctctcgtttatttgcttaactctgtagccacagaagaaaggaaaccagctgaagttcttattgtcgagggacaacagtatgcagttgttgggtgagtgacacatttttctttagtagttgagtcaactatttaaaacacaagtcttctagttctcccttgaagtgaattggaaattttggattaacagttttaacagtgttaaatttggattaactgttttaaatcctgcaaagaacttaaaggaaactttatggatttctttatcttctctcttctgtagcatacattattaaggactgcactggcttaacacaaaaagcttgatttttctcatataacaagaaatctagacaacccaagagtaattgtagtggatccatgatattattgctatcccaggctctttctatcttttcttctgttgctttcttagaatgtattatagcataatagtttaagttgtgaactctggaacccacacaatgtggaaaatagtactatacacagaattattgcgaaaattaagtaattcatgtaaagcatttagcacaggtctagcacctaataagttgatagttgttggtagttattctcattggcatcatttgattcactagatcttttaccaataaaagtatctcaaattcaagttaactaagaagcatacaaattccatctttttttgtctagtactatgtcttttattaaattggtaattaaaatatatcttcatatgctttaacagtacttcacagcttaagtgttttcatatatatgtgatctcatttgatctttacaactacattgtaaaataaagatattggggattattctttcctttttccactatgagaattgaagcttagaagattaagtggttcaagtgacccaaatggagccagaattcaaatctaggtctaactgccaatatctagcccagcattctttttcacttttcttcttgtcaagtgttttttgaaatgaccaccacctccaggaagaatgtaattctatgttcctcaatcatggcacttaccgtagtataatagaattgtttatttatgtatatgtcttctaatttgactctgaattcctcaaaggtagagatgaggtcttaccgtttttatttttcttggcaccataataagcactcaaaaagtatgtatagaattaatcctttttctgtatctgtattcaaatacctgaagtccacacattctaaactaaagcctccattcttttctcttctgaagtccttccctgtttctggtagggaaagctttcttcagtcttcctgtaatcccatcccttcaatataattatgatttccctccttaactactggttatctggtcactcttcacttgcttgatggatatggtcccctctggccatcttgcttttggctctttaggcagagagtctgttgccaaaaaactaaattccctggctaaaggggaactattacaacttctgagagacaattacaaaagataagcaatggactcatgctcatttaggcagactctaggagaaataagcatagagaccagtatgcatatatggtctgacaaggtgttataaaggctagacaccatctttcttgaatcattagttcctgatatctttcaggctcttataaatccttattttacgtagatcttatttctgagcatgtcattgaacttagatatcctatgatgaatggctttctccttaatttcaatcttctttaacttcccagtagtgtgtctttttaacgtgtgatttgtccttctatggaggtgataactttatcatcttcggaaaactttttttttttttttttttttttttttgagacggagctttgctcttgttgcccaggctggagtgccatggcatgatctcagctcaccacaacctccggctcccaggttcaaacgattctcctgcctcagcctccccagtagctgggattacagatgtgcagcaccacgcccagctaattttgaatttttaatagagacagggtttctccactgtcaggctggtcttctccattgtcaggctggtctcgaactcccgacctccagtgatctgcctgccttgacctcccaaagtgctgggattacaggtgtgagccaccgcgcccagccagagaaccttttgtgacctaccaataaaattcttaggagacatgttttccttagaagccatt

SEQ ID NO: 23547 - DNA, 2300 bp, Homo sapien
ttattttggatatatacccagaagtagaattgctggattatgtttgaattcgtttgttttttccctattgacgtgaaagttagagatctaactgaagttaaaaaataatttttttttctttttttttttcctcactcctttgcccaggctggagtgcagtggtgcgatctcggctcactgcaagctctgcctaccgggttcacaccattctcctgcctcagcctcccaagtagctgggactacaggcgcctgccaccacgcctggctaatttttttgcgtttttagtagagacggggtttcaccatgtgttagccaggatgatctcggtctcctgacctcatgatctgcccgcctcggccttccaaagtgctgggattacaggcgtgagccaccgcgccccagccccaaaaaatctttttaagagcagaattacaatgaatgaaattattttaaaaaactaactttgggctttttggattaattcactctttttttttttttaaggacttgagttgtttttatttgctattttctgtttatatttttgtgaattggtaggatattgccaagagtttcaaattccttaatcattctgttacatgggggaaattttaagtaatgtttcaggaattaaaaatttacttcagtagtaaagttgactttgaaatttaagcaagaattttgcaggtatcctgttttgaaatactactagactgtttatatagaaatgtcggagcagaggaagcttaatcgattagaagtagactaagtctaggttctagttctactctcttaatattctaaccttggataggtcactttaactttctaagattcagtgttctcctccataggtggttatttatctacctacctcagagtgtgagaatgaaacgagataatgtttctgcgagtactttaagaatattaattcttctgttattttgaagcattagtaaacaaatttggtgatattatgattttgaaggatagcaggtaataaccttctttaataccataaccaattagaatggtagtttgcctcaaagtaatatacaccagagcctctttgtagtatctttgaaaagtattttaattcaactgaaagagagaaaaatgaggttaaggtacttcacttggctcatggtaacactaaactgaactgatggcatggaatcattggtctttatatatgcccctgggggaaaatgtttaaaaatagaaagttttacattccccctcaaaattgaaaaaaagcacattatgtcttataaatactcctctttgagtttaggttccttgaaagcagcaacctattatattccctctagtgcctagcgcttaagcatggtaaatgcttagtaaatattagttcagttgaactgaatatttatactcattcataattataagtaaaaagagagcctgtttgtcatgaaataacattccttccctcttcttgcttccactgtatcatcctaggtgcctatgcacaactgtcccctgacatagctactaccttgtacctaatctaaaaatttaattttgctatagtttctgcagactttccaattggagtctgaaccaagtgttgaaaatactacagtggagaatgaaaattcttatttaaggttatgacaaaatacatttgtggatgggcacagtggctcacacttgtaaatcctagcactttgggaggctgaggtgggaggattgcttgaggccagggatatttgagaccaccctgggcattgtagcaagactctgtagtcccagctacttgggaggctgaggtagggggtttgcttgaggctaggagtttgaggtttcagtaagctctgaatgtgccactgcactccagcctgggtgacagagcaagaccctgtctcaaaacaaataataatatagataatagttgtattatctgagcatgtttaagtaatgtttcactataaaaactataagatatttggtacatcatagaatttttcttcaaatgtgaattttacagctttttcatcctttttattgataggtcacctgtggagaatactatgtttacaactttccctgactaaatcttattttgttattttcagggtcagtgaagatatgaaattaactgactcagagctaggaaagctggcaaataatatccaggaattattatatagtgcctcagatatatgccatgatcgagctgtcaaatttctcatgtcaagagcaaaggtagctattttcataaagctttatatattttatacgtaataattttgaagatctggaattatgtctttgc

SEQ ID NO: 23548 - DNA, 2300 bp, Homo sapien
cagaactctttttatcttgcaaagctgaaactctgtacctattacataataactctgggcctggcgtggtggctcacgcctgtaatcccagcactttgggaggctgaggtgggtggatcacctgaggtcaggaatttgagaccagccgggccaacatggtgaaaccccatctctactaataatacaaaaatcagctgggcatggtgtctcatgcctgtaatcccagctattccggaggctgaggcaggagaatcgcttgaacccaggaggtggaggttgcagtgagccaagattgtgccactgcactccagcttgggtgacaagagcgaaagtttgtctcaaaataataataataactctggccaaggtggggctgaaagtcccagtcctctaatcctgccttagtctttcaggtgaccagccttcatcctgtggctatgtaggggccctcggctatttgtcatctctttagcatatgaagacatttttaccactctggagattccaagagtttagggagctgcatgccagggaatggggacaaagaccaaatataggcctgacatagtagctcatgcctataatcccaacaccttgagagactgaggcaggagaatcgcttgagaccagagtttgagaccagtctgggcaacctaggaagatcctgtctgcacacacacacagccacgcacacatgcacacaagtcctgggcaaacctagcaagatcctgtctagacacacacacacacacacacacacaccacacacaccacacacacacacgtttccactttccccaatcccctggcaaccaccattctactttctgtctctatgagtttgactcatagagcactcatgctgtgcaccgattattaggtatttcatataagtggaatcatacaatatttatccttttgtgactggcttatttaatgtagcttaatgtcctcaaggtgccatctgtgttgtagcatgttagaatttccttcctttttaaggctgagtaatatgaataatattccattatatgtgtatctactacattttgcttatccattcatcaatggacatttgtgttgccttcaacttttggctgttgagaataataataatgccatgaacatgcatatgcaaatatctctctgaggcccccttttagttcttatttttgtcaaccccagaattggaatttctggatcatacggtcatcctatttgtaattttctgaggaaccttcacactgttctccatagcagctgtaccattttacatttccaccaatagtgcagggtttcagtttttctgcatccttgccaaaacttgttattttctggattttgtgagactagccatcctaatgggtatgaggtggtatttccctgtaggtttaatttacatttttctaatgatgagtgatgttgagcatcttttttatgtgcttattgggcatttttatgtcttttttggaaaaatattttatttgcctattatttaatggggtggtttggtttttttgttgttgagttgtagaagttctttacatattctggatattaaccttttatcatatacgtgatttacaaatattttctcccattccgcaggttgcctttttactctgttaatggtgtcttttgatgcatagaagtttttctattttgatgtagtccaatttgtctatttttttgttgtcacctatgtttttcatttcatatccaagaaatcaatgccaaatccagtgtcctgaagctttttccctgtattttcttgtaagaattttatatttttagagcttatatttaggcctttaattgactttagtttgtttttataggtggtataagacagcggtctactttcattctttagcatgtggatattcagttttccgagtatcatttgttgaaaagactgacctttctgcattgaatggtcttgccacccttgtcaaaaaacattttactgtatatgtgagagttcatttgtgggctctctctattctatatgtcactctttatgccaataccacactgttatgattaccatagtcttgtaagttttgaaatcaggattataagacttccatacttcattctttacgattgtattttgactttttattaaattcttgtttattgttagcaccctatagattaggctaatttttataggtaagaaagataacagcctttaaatgcagcttaccttcttttcaaggaattcttagcttttaaatttcattttgttgtatggataaataatcctagtctgtcatttcagaatgacaatatcagtt

SEQ ID NO: 23549 - DNA, 2300 bp, Homo sapien
atttacattctgactccttttcgttctgctctgttcttagaataggaatagaagacaggattccaagagagcactttgaaactccttttatgatggacaacagctggtttatcatgttcgcttttaagagcaaggatgctataactagaattaaagaaatttgtattctattgtactgtgcaaagtgctggtctgcagtaaaataaggagtttgcactggaatgcaaatcactgcactgcttacttcattaagaaagtctgaaaaaaatacagtgtgcttaatgatgtagttgatttactttctagcaaaattctttattttattatggccctgttaaacagtccacagattggcagcagcatataaatcacattctgggtagcactgtcctaaagttatctattctccatttactattctgggaattgagtccatgttaccttgcaatttaccctagtatatttgtgcccattttgcttttttagtgaataaatgaacagccatattgaagatgaaagagcaaaagggcataaactcaagatttaaactgtggaaaaatttcttgtttgtaacctatttagatattgtaagattattgaaggagcattattgaagatatgaatgatactctgtgtttccttagggaaacagatttgatgaccaaatagtctcttctaatcttatgagacctaaatgttgaaagttcattaaccctttgaaactatgaattatcccaagacattcagagataatgcccgaagtctgagctgtgggttaaaaaatctcaaagtaaaaaaatgggtgaataatggaaagataatatagccaaaaaaggcatatgcagttagaaaggaagaaaaggcaaaacaagttttagaagtccatatttgaaatttagaaagcattttaaatatatattaccataagaattaatcttggtaatgctactaaaaaaatatatatgagctaattgtttaaggtatttgtcgaacttttaagaggaaaattcattggaaataaactgaattttacaaattgataaaagaatcacttttgaaatgtaaaataagcagcctgaaaaaaatccaaatgaattttagtaccttatctataatttgtgactgaaccatcagtctatcttggattattcagcattttgaggcagaatggtataatagaaacagcttcagtttttcagtcagagatataccaacattttagttttgctacttagtaactacatgactgtgtttcctcatctgtaaaatgataataatactacctatatttcaagattgttaaaattagaaaaattagatgtgtataaaatacctgtgcctaatccataggaggaggtcaataaatggaaggtgtaatcatctatttagtcagataaatgatgtgcaatgatattgggggctaaggagatcattctctttctctcagatcttagaacatctgaaactggaattgtaatttgagatgtctgtggggtactcttttagaaagcagttggtgtttggaaggtgataatgacaggaacagaggaggaaagtaaatgaccttgtactcttttgtcttacatttatatctttggggtgtaccctttatcttccttccattttgttgtgcccaatttcaaggatctcacaatcaaacaattcacacaatggaatttaaagtatatgtagaaatcttttatcattgtcataaagtatttggataatcaaggaaggtatgctcatagtacttcatattttttttccttctcttttaagctgagccattatctggatattgtggaagtaaacattgctcaccagatctctctacgttcagaagcattttttcatgcaatgacctctcaacacgagttgcaggactacctcaggaaaacttcccaggctgtaaaaatgcttcgagataaaattgcacagattgataaagtaatgtgtgaaggatcactccacattttaagactggcacttaccagaaataattgtgttaaagtatacaataagctgaagttaatggccactgtacaccagactcagcctacagtacaggtgttattatctacttctgaatttgttggagcattggacttaatagcaacaacacaagaggttctacagcaggaacttcagggcattcacagtttccggtatgttcattaagtaagccactagaaataatgttagaaatttttaaaggataaaattgagcatgtaatgttaaaagtgtgaatatattcaaagttaaatggatattttttcttccagattgatcatttgtttaa

SEQ ID NO: 23550 - DNA, 2300 bp, Homo sapien
ctcagatgcggttgtgatgttggaatgatcaaactgggaactcaaagtaactatgtttaatatactaagggctgtagtggaaaacatggacaacatgcaagaacagatgtaagcagagagatggaaactaagaatcaaaaggaaatgctacaaatcaaagatagtataacagaaatgaagaatgcttttgatgagttcattaatagacttgaagtggcaggggaagaaatcagtgagcttaaagaaatgctgatacaaacttataaaaatgtgtgggatgcaagggaagtaaggcttcaaggaagtcttgcttaaataagcactgaaggcttcatttaatgcttaagaagaaaatttaaaattaataatccaagcttctaccttaggaagttatcaaaagaagagcaaatttaatccaaattaagcagaagaaaagcagtaataaaaattagagcagaaatcagggaaattgacaatagcaaatcagtagagaaaatcaacaaaagcaaaagctggttctttgtgatcaataaaactgataaacatttagctagattaagaaaaaagagaaggctgggcatggtggctcatgcctgtaatcccagcactttgggaggctgaggtaggtggatcacctgaggccaggagttcgagaccagcctggccaacatgatgaaaccccatctctactaaaagtacaaaaattagctgggtatggtggtaggcacctgtcatcccagctacttgggaggctgaggcaagagaatcacgtgaacctgggaggcggaggttgcagtgagctgagatcgtgccattgcactccagcctgggtgacagagcaagactctgtctcaaaaaaaaaaaaaaaaaaaaagagaagatataagctactagtatcaaaaatgaaagaggggctgtttctactgatcctgcagacattaaaaggataataagagaatattgtgaacagttctatgcccagaaatttgatagcctaggtgaaatggaccaatttattttgaaagacacaatttaccaaagcttacacaacaagaaataaatattctgaataggcctatatttattaaagaaattgaatcaatcatactgctcaaagcagaaatcaccaggcccagatgggttccttggtgaattctaccaaacatttcagtaggaaattataccaattatttataatctatttcaggaaatagaagctaaggacatacttactaatgcatttggtgaggctgtcatgaagctaatactaaaatcagacaaaagcattataaggaaagaaaactttagacctcttgtgtgtttttttgttttttgttttttttttttttgagacaaggtcacgctctgttgcccaggctggagtgcggtggcaggatcacagctcactgcagcctcaacctcccggctcgagcaatcctcccatctcagcaacccccaagtagctgggactgcaggcgagcaccaccacaacaccacgcctggctaatttttgcatattttgtagtgacggggttttgccatgttgtccaggctggtctcaaactcctcaattcaagcagtctgcccgtgttggctattcattatttttaaaaaaagaactcttagcaaactaggaacaggaagaaatttccttaacttgataaagaatgtaccgggcgtgtcggctcacgcctgtaatcccagcacttcggcaggatgcttgaggccaggacttgagaccagcctggccaacgtggtgaaactcatctctactaaaaacacaaaatttagctgggcatggtggcgcatgcctgtaatcccagctatgtaattgccaatgggttcaccttgcctgctgctggctaggcagctgatttattgagacaggggaatttcaatagagaatgaataatccacacagagctggctgtgtgggagactagagttttgttattactcaaatcagtctccccgagcattcgaggatcagagtttttaaggacaacttggtgggtaaggggaatccagtgagccggcagtgctgattggtcaggtcagcgatgatatcatagggagaagccatctccatgtgctgagtcagttcctgggtggggccaacaagatcaaatgaggcagtttattgatctgggtggtaccagctgatccgtcgagtacagggtctgcaaaatatctcaagcatggatcttaggagcagtttagggggagggtcagaatcttgtagtctccagttgcatgactcgactcctaaaccgtaatttctaatcttgtggctaatttgt

SEQ ID NO: 23551 - DNA, 2300 bp, Homo sapien
gtacccagcttattttttttatggtgagaacatttaaaatgtactcttggctgggcgtggtggctcatgcctgtaatcccagcactttgggaggctgaggcaggtggatcacgaggtcaagagtttggagaccagcctggcaaatatggtgaaaccccgtctctactaaaaatacaaaaattagctgggcgtggtggtgcgcgcctgtagtcccagcggctcgggaggctgaggcaggagaattgcttcaacctgggaggcagaggttgcagtgagccaagatcatgccactgcactctggcctgggcaacagagccagacacagtctcaacaaaacaaaacaaagaaagtactcttttagctattctggaatattaaatacattgttattaactgtggtcatcgtgctgtgcaatagatcactaaaatttattcctcctacctgaaactttataccctttgactcacatttcccctttcctcatcaccctttaccccccagtctttggtaaccaccattctactctgcttctatgtaaactcatctggttttataagtgatcagggatttaagaggacttcactcttttacagttaaatttatttcatattggggaatgattttctcactttgtttcttacataattttagaggattgaacttagaaaaatataatgtaagagttttctctcaactatttttgatgcttccttactttttgtcctctttccccaactttagctctttggtggggaaaatattatttcataaaagttatgtttgcagttttcaaagtgacttcttagaagtgaaacttggatcaacatttttttcaaccccccaactataagagttacattttcacttttgatttgttaaaacatactatgtcttataaatgcttgaaatttatttttaggcaagaatttcaacattgaataaaatcttcccaaaattaagtcacaagcactcaaaggattgaggatctttttcttcctaaaatatatgtgtgtgtgtgtgtgtgtgtgtgtctttatatttatatactaagaccttccctttcttgtggactgtgttttattggtttaaagttgcaagtcctgtgaaaccaggctgaagtcagaattagaaggtattaattatcatacacactccaagtatctcagtcaagtaacaggaataactgattacagtgtctgggaggaaggcctggaacttggggaagacttggaggggaggactggatggggaaaaggcctcaatagagagaactgggttgttgcggaggggtgacctttaacctttggaagggcatttactagggaacagctgaaaagcatttacttcgagggggtgggggagaggaggaatctcgtggaagtatttgctttaataggtcccgggtgatttagggatgtttcgagtcggttggtcttgggggtggcgagggctacgctggaggggtcgcgtcccagtcccggggaaggcggcaggaggttttctgggtgttcctgaaaactgggagttggggggaagggtggtggggaaagtggaattcagcgtggatttgtctgcgtgtaggactattagaggaggcgcaggggagccacgcggtgtattccccgccccgagagaactctggctgcgcctgcgacgggcacgccggcctgcgccaaggccgctttccccaggcggcgggcgctccccccggcccgggccgcggccctcccgccccggcggagccgcgcggtggattgtgggctgggggctgcggcggcctccggcgctgtctccccgcacccgaccgggccgagccggctgggccggcggggtgagggaaagcagtggagtcgggagcagaagcgctagaggcagtggtcgtggcgcggcggcggcggctcccctggaggccggggatgtgggagaggcggtggcagcagcggcggaggcggcgctgcggacccgggggaaactgctggctgacaggacacccgggagagacgtgagggagccgccgctgccacctctcacccctgagtgaagctgggctcgagagggcggccctgtgctccccgggccgactggccagcgggcgcggggcgggggcgggaacccgggctcgggcccggccgggcgccgggcggcggcggccgtggagcagcagcctcggtgcgacgtggagggctggaggcggcggcgatgcactaggcctcgctcagggcggctgccccgggacccgcaggtaggtgtgccccgcggccccccgcgcgtctcagcccactctcaccccgacctacag

SEQ ID NO: 23552 - DNA, 2300 bp, Homo sapien
tgagtaattgtttcattgaaaagtgagctgtttaacggggcacagtggcacatgcctgttagtcccagctccttgggaggcagaggcaggaagatcacttgagcacaggagtttaaagctgtagtgtgccattttcctgcctgtaaatagccactgcacttcagcctctgccacatagcgaaacctggtctcttaaacatatatatatgtatatgtgtgtgtgcgtgtgtatatatatatgtatatatatgtttaaaacttgtaaaacaattatatagtatatatgaatacctaaatgtgtagaaagaaatatgtaaaacatgcatgtaaatgatctacactgcattcttgaggttggatacctctgtagagaaaagggaactgggagagacatgtaggcagcctcaattgtatctgtagtttaattccttaaaaaaatcagacgcaggccaggcacaatggctcacgcctgtaatcccagcactttgggaggccgaggtgggtggatcacgaggtcaggagttcgagaccagcctggccaacatggcaaaaccccgtctctactaaaaataaaaaattagccgggcgtggtggcatgcacctgtaatcccagctactcaggaggctgaagcaggagaatcacttgaacctgggaggcggaggttacagtgagccgagatagcaccactgcactgcaacctaggcgacagagcgagactctgtctccaaaaaaaaaaaaaaaaaaaatcagaagcaaaagtggcagtattaagctttgataaagctgagtcgttagtataatctcttctatatttggaaatagggtatttctgtattctctttgtatatttggaaatttgacagtcttaaagctgttgttttaaggctttatctattacagattagttgcaaattgaaaccaagtaaaagcttatgatgccaaacttctaattaagaaggattttttcatttagcttctttgctgtatataattattctcttctttgtgtctgttttatgcagcccatttctacttcctttgtgtgatgactagatttttcccctcctttgatattatcttcaactcatatacatagaaaacacttgaaaacaaaactgaaaagttctttttagcaatgtttttagtttgagataaatcagaagtacagtcataagcattacatccctttcctttggtaatgtttaatcattctatgaatgtttcttttgttttttttttttaaatttttttcttttatctcctgggaccaaatcccaaatgcatttttctgtatctcacccagcatatggccaacatttgtcatctgtagagtcacaaaatggttagaaaaccagttaacttggcttatgagtgaactttatagctctctgaatgacttcaaaaataagattcctcttattttgcaagattttcttatcagagcagtactattgttttctgtttttatgtgggatttggttttgattataatttaaaatacttaataagggagtctagtggtttgataaaagaaaattatgggccgggcgcagtggctcacgcctataatcctagcactttgggaggctgaggcaggcggattgccttagctcaggagttcaagaccagcctgggcaacatggtgaaatgccgtctctactaaaaatacaaaaaaaattagccaggcgtggcagcgtgcacctgtagtcccagctgcttgggaggctgaggtaggagaaccacttgaacctgggaggcggcggttgcagtgaaccgagattgcaccactgcactccagcctaggcaacagagcaagactctgtctttaaaaaaaaagaaagaaagttatgtttttattctgtaactgcttctaaatattcttcagtaccccattcaacccgagaaactactgtcacagctgacaggagttattaacctctctaaatttcagggggaaaatgtataaatatgtcatgtatttgataaatagttttccctttttttaatgaaaagattatctgattggattgacctgcctactaatttttgctattaactttttcattcttaggcaataagcaacaaagaccagcatagcatatcatatactttatctcgggcccagactgtggtggttgaatatactcatgacagcaacaccgatatgtttcaggtattacaacatcttaaattttttttcttaagaaacgaaaaagttaaaaatctattgttggtgacttttgctgaggtcagaggattatcagatttttatattgtattttattaaaatatagattga

SEQ ID NO: 23553 - DNA, 2300 bp, Homo sapien
tagtaacctccaactactactgcacaccattatttctccttttatgtaaaaatgctatgtgttactcctgctggttgcaaaagaatgaagaaggtgattaaattttcactcttatcaagaaactgctatgaattaaactccagtcatcagctgaattggtttcataaaatggttccaccgcaaacatactaaagcagttctttctgtttgagtcatccttttgaaatcagccacaaggaaactctagtatagatggaaatctgttttatctgagataatatatgcagtccacattgtttttcatcataaaaaaatgttataacattttcatgttttaaaacattttcctttttttctcagtaccccattatgcctacccacttgcccactaaaatagaagtgctcagaagatatgtaaacaatctgcataagatttgttttgtcccttgcttagtatttgttttgcttttttttttagggcaggaattttgtacttgtgtttagtaggtagtaagcaaaaggctgtgtgtgatgtaaataatgaaagaaaacatttgttaggttgagagacaaagattgatttctcagtttttcttctttaggtgaaactgacagatattatacaaagtctttcctttgggaagacttgatatgaaaataattgtatttcactggcccttaaaaaggaaatgattagaatgtttaacagtcaaattaataatactattcctaataaatacatattttatgagtaacttttcatgttctcccagcccacaaagaaaataacactattccagaatatgtttattttaaaatttttttttaactctggaagtttagttcctgctaatgagagcaacatgctttcgagtatcaagcaaagtttcaaagtaatagataaaatagaagacagttttattaggaagattttctttagcatttcttctagtcttgagtagaattaatggtgctatttcatgttcttggtgctagataacattgggatagggctgaatacatgaggtcaaactaacttaattgaagaccaacaaatgaagccagtaatcgagacattcggatgttttttatgtacatactcatttaaagttctcaagtacatgacttcaggaatttttttttttttttctttttttttgagacagagtttctctccgtcacccaggctggaggatcacagctcactgtagcctcaaactcctgggcacaagtgatcctcccacctcagctttctgagtagctggggctataggtgcatgccatgacatttggctaatgttttctgtttttacttttttttttttaaatcttttgtagagacgggagtcttactatgttgcgcaggctggtctcaaactcctggcctcaagtgatcctctcaccttggcctcccaaagtgctgggattacgggcatgagccaccatgcccagcctaggaattcattttgaagaattcttttactcagattttaaaatatagagagaatatataaagacagtgagtaggaaagcattgtctaggtactggtctttgttaaagagtataaacctttgggaagatcatgaatctttcttcagagaacacataaaaaaaaaagttccaggaagaatagctgtcacagcattttatttgcagtttaataaggccagttgtatattgattgattatatgccatttttaaattttgaaaactatcttgggtcatttatgtatataaataactggtactacaaaagtgttttattttgggtttagattatcaaatacagaagtagaagccaagattgaatgtgttcctgtgattgaaactttgatgtcactgataaaatatccccagataaggccttctaagagatctaagcagagtaagaatatgtctgattggaaatatattgtttttcttggctaatttgaccaagggctctagaaattatatggagggtatatgccagccgtactcttgttttttagtttcttgtctaagcaaaaaaattgttcttttgctatagacgcaatagaactaaatctatagtgttatgcacgttacttgtaaattcttatgtcaggaccaaatggtcgcttatattttttccagctcccaaattccctttattccactttagtcccttcattttcagagatgaggaaacagattgctttgttcaaagacagctagaactagaacacaggctaatacttgctagccatgtgatatactaatgtcagccaaatacgggcatttacactttcagatgtttgccatatctgtgcacttact

SEQ ID NO: 23554 - DNA, 2300 bp, Homo sapien
ccgtcatttgacaataaagctaacaataaagcaattaaaatgagggaaaaaaagtgcctttaatgacatctctgatttgttgaatcagtcatccctatagactgcctttttcctgaactttctagctagatggttcaataaatctcctttattggttaagccagttagagctgggttttctgctgctttcaaccacaagcatcataattcataactttacttttcccttcacccccaaacctaggcaattagtcactatgttctatattctatcccctgaatagtgtctgattaccctcagttttctcttctgccactgccttaccttagttcagtctctcatggttttttcccctgtaatactgtaacaggtcccatacataccacactccatagagtgatctttctaaaatgcctatcttatcaaaattccatctgcttacaatccttgtgtggcttcccattgtttccaggaaaaggttcatgttccttagcatattgtgcaagattcttcattacctaagctgtctcccttacctttttcagtgtctcctcttgccactcccccaactccattctactgccagcaatgcaactatttgctgaaccaaaatacgtttgggtctcacacctttaggtatttgtgcttgatgctctccccaacaccacccccaatgctctcacccacctctctcttcctcctcccctaccaaaatacacaaacatgttaattcctagttatctcaagtgatctttgaagcatttcctgattttgcccacatctgtgggtagctttgcattttcctattgtagtacttctcaaattaagtctatttacctgtctcctcctttgcatagtaagcactctgaaaataagaatgtttcttttacatttttgtatctctatttctggggctcaaaacagtgcctagcacaagtagacactcaacaagcattttttgaatgagtgtataattatatagtctgtagatataaggatttctgatcttgagactctctgaaagccttgctccaaaagtgtgtctgattcctaagcattaatctttttcttccagggtgtggggttctaggtaggtggagaaggaaaacaaaagcgctcaggacgcgttgcctttagctctccggagagccagtaatgtgtcctgcctttctccaccctcctccctaccacctttccacacctgggtgcccaagatgggtgtagacttagctgaccagcccaacaacatactcataccttggttcagacttctcttattaccaaactaaagttggccaatacacataaacaattttcaacttgtcttttgaacgtatactttatgaaatttgtatgtcttaaaaattgtaggccttaaaatgaacgaacccggattcttttatagtaatcaagtaaaatataggggtcttaattctgtactttgcctttgctaatcttaaagttagatgtgactaactgagcaaagtaattaattacgggactttgatagtggtgatattcctaagttttataacctaattgttcaattactggaaacaactacatttcgacaagtcttaggtaaagaaaattgaatttagccggagaagattcaattgagggaagtgagggacagaggtatttgtgatttagggtttgtggaagataaattacgcagcagggaagactgaaatatggagagaaagtcagacctcactgggtacttatgactggtaaggctaggagttggaggtggagaaaagtaggaaggaccgtctaagggttggatccccaacaacaccataatacaagaccgtccttgttcagccaacagcagcactgaacacgttcgctaagtgtgtcggtgaccatggtaacggtgggagggggcggtccaaacctcgccctcgagcatgctcagtgcagagcgagcctggtagggtgctggacaacaatgaatcccttttttcttcaaccggagaactacaattcccaagagccttctcggtgcggcgacaccgccttccgctgtggccctgcccggtcccctccctcaggccccgccccccggctagacccctcccctccttgcgagtgtatgtcagtgacccagaggcggtgtgaggcggagggaccgtcggggggcgccgccgccgcctccactagcagcagcggcagcagccctagtcccgcggtgcggtcgaattggtccccagccctccgggagcgcaccacaaagcagccccaacgcctctccctgcgtccgcggctcctcagcgctcggctccgtggtcaactt

SEQ ID NO: 23555 - DNA, 2300 bp, Homo sapien
gtttgatttttatgtttgttatggtttgaacgtgtcccataaagttcatgtgttggaaacttaatcccctacccaacagcattgaggagtgagatctttaagagatgactttaagagacaggcccccttcctcaccctctctccttctcacactgtcttgctcttctgccttctgctataggataacacaaaacacaggctcttgcccggtgcaggcccctgaccctgtacttcccagcctccagaactgaaagaaacctgttctttataaaatacccagtctcaggtattctgttatagcagcacaaaatgaacagggacaacattcaagggattgaaattgattaagatgtggcacttggagagaagggtaacgattagaacttggacagactcctgatagaagtgcctttctttccaccaagacacagctgtgcttttctcgaggttcttgcacattacatctttcagcctggaccccatgtgatacatgagaggcatacatcatagtgggcatgggaagcagaacttttctcttacctccatgatggaccctggtgcttccttcccctgctcttctgcaggagaatagtgggaaaggcagtgatgctctgctttgaagggaaaagggattttgattataatgtgtaccagtgactgggcacaaacactgaaagacagattcttggctgcttaattatgaagtgttgtaaagtactagatttgggaagacttgtttttttctcaagcacaatgggatgaaagcctaaacctggcgttgcttgtttagccctctctagttgcagagccaccactaagaagatgccttggaaacagtgaagataagaaaaccatgtcccctttagcacaaaagaggatcggtgcccccttttccaaataccacttttggtcaagccagggtcctctgggtcgcgccacgttccttccctggcctgggcattgtgctgattagaatcttgctctctttctaccacctgattatttgaaatgataacagcctgtatatttgcaacttcaaggctaggatatagtttcctagtgattaaaaaataaataagatttactccactcacccacccctggccataataaagctacagctatgaatcagacccaccaatatttgaatctcaaccccttgacttactagttaggtagtttgggccattttttgtttgtttgtttgtttgtttgttttttcaagacggagtctcactctgtcacccaggctggagtgcagtggcgtgatctcggctcactgcaagctccacctcccaggttcacgccattctcctgcctcagcctcacgggtagctgggactacaggcgcccgccaccacgcccggctaattttttgtatttttagtagagacggggtttcactgtgttagccaggaaggtctcgatctcctgacctcgtgatccgcccgcctcggcctcccaaagtgctgggattataggcgtgagccaccgcgcccggccggtaggtttgggccattttaaccttccagggccttggtcttctcactgtttttgttttgttttgttttaaacggaatcattttgcctaccttcatgggtgaggatcaagttaagtcaatgcaggtaaactattaggcaactagtcaactctcaacatttggtggttatcagagttcactatgtggatgaagacaatacagctaggagccctcctagacaaaccctggagaggaagagctgctgcaaagtgtgcaggaagcagggggcaccaatgcagattttgcaccccctttcctcaggaactcccaggaacagccaggtcactccccaagctgcttccagcaccccctcgtgtatgctgatcactcctccagtggaagtgaaaatatttaatacttggagaactttgcaaaggtcaactgtggctaataatccatcccccaagaacctcataccacaagaacacagacacacgtgcacacatgcatgcacagacactcatctggcttaagagcatcaagagtcaaggaggtagagcaattccagaacattattttctctagatgtcaacttccacagagcagggccagagagattctgggacctgtccccaggggaattatttctaatacccttgataaaatgtacaaagctagggtaggaagtagcaaggtgacagcagtggttaggtggaaagtttctctaagagaaagaactaatgaattcgttcaattgaagctttttaaatatatttattcctgtcacctttcaagtcagcagctttttccaggtgacat

SEQ ID NO: 23556 - DNA, 2300 bp, Homo sapien
gccctttcttgagtacctatgagtacctatgtattttctttaatatctatgaagtaaatattctattctcattttgcagttgtgacaactgagattcagagatgtccaatctactcacataaatagtaagttgcagagcctggaatcaaacccagttccttctggctctaaagtctattctcttttggctactgatatggtgtaggatctgtgtctccacccagatctcatgttgaattgtaatccctaatgttggacgtggagcctcgtgggaggtggttggatcatggaggtggatttctcatgaatggtttagcaccatctccttcgtgctattctcctgatagagttctcatgaggtctgggtgtttaaaagtgtgtagcacctccctctcgccttcctcttgctctggttatgtaagatgttgctccccctttgccttccactaggattgtaaactttccaaggcctcctcaggagcagatgccactatggacagcttgcggaaccatgagccaattaaacctcctttcttataaattacccagtctcaggtatttctttacagcaatgcaagaatggactaatatagcaaccagatactcaatttagcaattctgaatactgagtccattatagaaaaaaaagaaaaggttgggggacataggtcatccttttgtcaatatgttcgttgtttttgggattgtgatgaagtcaagcattttgttttttaaaaataaataaaaaggaaatacagtttggcttgactagttctggtgaactcttactggttcttaggagtcacctttctaaagtgctcactagctgcttgcttaactattcaatctagaactttgctggggattgatggcaaatgtgtctgtctataattgctagaatccaagtttatggggatatttgtttatgtcctttgtctgatcctcgtcctatttcccataagatcccgtgggctgctcgcagtggttctaccctcatatctgcatgtttgttcagttctccattatggaagtggggtgggggaggggtttgccttcatttaaggtaagctaaatgctttcacaatatattcctgtttattctttggtttcctcccaatgttatttcttccatttccaatttgtaggtaaaaagcattaagcctctctcttaatggagggattaatggaatagaggcactcaataaagctccagtaatttctgttaagtggattctaaagtaaacacttttatggccccaacaacaacaaaagacagtgaatccacttactcaaaagcccacctagtattatatataagtcagtgaaatgcatttgggaactatctactctttcagatgatctgtgctgggaaatctctccattaataaaaataatagccaaacttgagtgctaataaatagggttaatacttagtgtctcaactagacctaagagtatatccattttaaaagttttgtttttttttttttaagtttctagcccatgacagactgacgtatctaaaaatcatagattaggtaaagaatgtgtgcaaattaaaatccatgcacagaaacctatgtgagaagaaggagcgttgtcatcgcagacgtttaactgggtaagagttatgaagtaagcacttaaaatccagctaaaagcctactctcggttgttttcatgctccccagtgctagaaagagagcctgtctgcgaaacaccagtaattgcacgttgtctgtgtgaaaggacattgaaagactcgataaattacaaggagggagggagctagctctcattgcaaacttgacctagcctagattagcaacccgggatttgactttccatgtgacccttcctctttgtagtcttcaaaagcaagcccgtacaaagcccggctccttccttccttctaactccctatcaggaagctccttcgcccctcaaatcccttcaggggctttgaaatcctgggctcccgagcccaagctgggcatgaatattcatcgggggcgtggccccgccagcgcgcagggctccaagcagctgcgactagcggaaagcgcgcgccagctgcacgcagggaaacagttctcattttgtgtgctcggctgactgcacgtccagcctcgggccagctcgagacggccacattgtgagtctgtgggaggggttctaccgagacgaatggacttttctgaggcagggcccaggagctgtaattcgaggggcctcagatctccctgccacccacctgccagggcaagtgaaattccactgagaaaaaatcaggcgtatct

SEQ ID NO: 23557 - DNA, 2300 bp, Homo sapien
aggtgggcagatttcacagaaccacaaaagatggtgagatacccaggaacctcaccatcctgggactgtgtattcataggtttgtcaccaaatttttgctaaaactcaaggtgcatattattggggtgctatttggcatagaaaacatttgtccaggaaattttctaatatcatgtcaagttaaacataattcattgcaaataagaggtacaaggcatagtataatagcaagctagcacaaacaaaatttgtagacttgctaaaacatgggagaacagcgtaggccagaataacagtgattaagagttcaggctctggtgctggagtccctgggttcaaatccttactagctatgggatcataagtgaatttactcatgtgtaaaatagaggtaatattacttatcccataaattgttatgaggattaaaggattaaatgcaatatttgtaagatgcttagaactttactggcacataaatactagcattatctacaaaattatactacccttcctccgttcactcaataaatatatagtcaggagccacataacaatgtttcagtgaatgagggaccacatatacaatggtgatttcttaagattatagtatcatatttttatgtatcttttctatgtttagatgtgcttagatacacaaatactactatgttacaattgcccacattattcagtacagtaacgtactataggtgtttgtagcctaggaaccataggctagaccagatagtctaggtgtgtagcaggctacaccatttaggtttgtgtaagtatactctgatgctctcattacgaaactgcctaacaatgcattctttagtaggtatccccgttgttaagtcacacatgactgtgtattaaatatttactataggcatcatcctaggctctggggaaagtggtaagaaaaaaaagactacctttcctgatggactgggaagaaaacattaactaataatcacacacagaaataaaatcaaaaccatgagtggtggtgcttggagccataagagctggtaatgactatacaggggtaggccttcttgaggaagtgacatttacctatgacctagatgagtttactagggaaagttcattaggtaaagatgagagggggaaaaataccaggcagaggaagcactatgtcctctgtggcagaaaggatcatggcaggcatattagtcaggacccagccaggaaagcaaaacccactctaggtgatttgatagagggaatttcatacggggagtcagaggagttgaaagagctcccaggggaaccctgagagtagcaactccaggaagctgggactactgtatttgtttgctagggctgcagtaacaaagtgccacagactgggtggcttcacacagaaagttattgtctcagagttctgaaggctggaagtccaaaatcaaggtgtcagaaggggtagttccttttgaggcctatgagggaaggatctgttccacgcctctttccttgacttgtagatgaccattttcacctatgtctcttcacatcgtcttccctctgtgtgtgtctatctctgtccaaacttcccctttttataaggacaacattcatattggattagggtccaccctaatgacctcactttaattcggctactctataaagaccacaaccctaaataaggtcacactctaaagtactgggggttagaacttcaacacatgaacttgcaggggagacacaattcaacccatagcaccaccctggaagctggagaacaaggaaagaaacagtttctggagcctaagacaagataagctggaacaaagagggcctgccaagatgggtagcagggatcacacagagatggctgtgtagtgggaactgcagccacagaagagactcctgagaaagagaagcaggagaagtactctggcttctccttccttcacctccaatatcttttgccctccctcactccccattggctgaactttactggaaggcagttggctctggagcctggaacagcccccagtgacacagagcagatcgggggaccacgggatgggaagggtggacatggctctgacagcaacaatgtaacacccatgcaacgagtctgcgaggccgaatggaagccagctggctgcaggggagagagcaagagagtctggcagaaggtgcacctggagaaggaagtagaggccaggccaggtaggagtttggtctgcatgctaagagccatagaaatatccaaaggtttttaatagagctgggggagaggcggtgatgtgatcaga

SEQ ID NO: 23558 - DNA, 2300 bp, Homo sapien
ttgtttattgatttcctttgcccactagaatgtaagctcagcaaaaaagtagcctgctggatccccagtgcctggtatacagcaggcactcagtattttggtataataagtgcttactatgtccccaatactgttttaaggaaggtatttacttaatcttcccaataacctgagataggcattattatcatcattgtcatctctgagtcacagatgaagaaactaaggcacagagaagtttagtaatttttccaagatcacacagctagtgaatagtagagccaggatttgaacgcgagacaccggctctttaaccaccatcacatgtagtgtcacccttattgtgtcactcagttaatgataaagaactactgcactttaatgcttcttctctataccagactctcagaaattgatacatactaaagtatgctttcaaatgtcaatcatttcctataagtgcctaacattttaaagtaataaagtgtgattttgagctaagactggtaaacaaagtgtgctgcagccacaagcgtactgcgctttagcctctatctagttcaagaaccacttccagaggatatgagtgaggcttacaggcgtgtgcaggtaattctccctgctcaactgagattaccatcattagctctggtccataaagggaaaactaagacacaaaagccacattgatgttctaggccacacagccaattgcagtgactagaagaaagaagcctccccgggcggcgaaggttgcagtgagctgagatcgcgccactgcactccagcctgggccacagagggagactccgtctcaatttaaaaaaaaaaaaaaaaaaaaaaaaaggagcctctgaggggccctctgggactgcagtaggtcacacatgctccctgcttattagcatagaacgccccggtgattcatgcaatggaatgtttcagccaaggatgtcacctaatagaggatatgttgatacagctttatctgagaagttacataatcgtcctagtgtggaaatgccataaaggaatttctggcttgaataaaagaggtgtgtatcccctgggaagtactccacaaagggtatgaggagattttcagtgagaagctgactaccccagactgggcaagtgacttgttaaaaacagggctcaatggaggctctctgaggacagtgactgcgcccactttgatttggtaaggctttgactcctgctcgagagagtccagggacccctagacctgcctgtccttccacagggaagagcgacctttctgtatctagcctcctgggatagaaaggtccctaccttgagtcctctctgcttcgttctttcaggtcacacatttatttctgcaagccttcagaccttccattctctttctgccctagagagcagaatgaatccttcccccgattttgttggaattctctgaaagaaatcctgccaagtctcccactctggaataccacccccagcacccaatcttccctcgacctcgcctcccatcgccccaccagcgcccaggacgtggcaggaggaaggaggctggagggaggggcgcgggtggcacgagcacctgtcacctgaccggctcgggccctcacttctccagccccggccctgcccaccctctggccggtgagagccgacagggcccccgccctcccggacccggacaggcccgtccctcccgccccggcctccgccaccgtccaatggccgaggggcagggcccgctgagcaagccgcggcagccccgccgggtccccgccctgttcccggttcccgagccgggccccggaggcctttaaatgctgcccagggccgacgcggcacggccctcgccacttttcttggtcgggcagcggcagcggcagcggcagcaagcagccccgtcggcccgggtccggggccgttctgggccgcggcaagcaccttcgccctcccagctcgcgctgcctccctcccctcccctcctcccaggctctgcctgccaggtcggcgccgggccccgggcgcgcgcgcgcgcgccccctcgtgtgtgcgcgcgcccgccgccagctcggacccgcgcccccgcccccgccccgcgcaggacagccccgggatccccgcccgcgcgccgcgtcccacgtaccccgccgcgccgggcaagaagatggcgggatcagtggccgacagcgatgccgtggtggtgagtgtggcagggcgcgcgcgaggcgcccctccccgccgtcccgcactccgccgccgcctgctccagcagtgctggggtgctgagcagccgcagg

SEQ ID NO: 23559 - DNA, 2300 bp, Homo sapien
agtggtcattccattgactactaagcagccaattaaaattaaggttttacattaaacgatgggtggaaatgcttacaacacaaaagggacacaaaatctacttaaattatgattacaagtttgtaaaaagtacgcacaggaaaaaaaaactagaagtaaatacaacaaatgttaactggtaatttttttcttcttcttttcttgatgccaaatcttaggtaatgcagttatggccataatttttaaaaggtaaataaaaacaatactatcattgactccaaatgaaatggactttatatttcccacagatttatcaccttaaaaacactcaaatactttccctttgtaataaaatgtcatgagcattagggcactgtcttcggaattacatgtaagattaccaattacaagttagttggccaaataggtactcaatttccctattacaaaattgtaagctgatggggggtgtgcaatttaatttaatttttttttagacagggtttcactctgtcgcgcaggctggagtgcagtttaaattcatttagtttaaacatgttcttagtgtagggtctgctttaaggtctagtcatatgttcttattttgatatttctgtttagtagagctgtaaaatgaaaacaagcatgtgttcgtttaaaatcaatttctagtttctacacacacacaaattcaagcttgcacacgagctaaaccagcagggggcgaaatacaataggcataaatttgacaagccatatagatttttcttactttagtgactgagcaataacacaaaatccagcataaccacaaagcaattgatactcccatttaaagtgatgcagtctccgtatatcttacagcgattgaatagtaaagagacaaatgcgggtccattggagcgctccgagttaatttgtctagaacattgcagaggcgggataaatcgtgatgaactgctattgtccttatctttctcctgatttgtataattcctccacccaaaggggtggacacttctctgtgcctgaggggatgttttccattcttgtttctttgcgtaactgctgagctttgctgttttggaactattttaaattattcaaattactgatgcagacgtttggcaaatatgggcagaatgaggggccggcgggggtcatgatttgtaggaccccgggctcatcatccgagacagtaatcataatcctgtagccttgtagtctgattgttacactggcaggtgttctaacagatattcattgtaaaggaggaggaaaggtaatatttttattacctttatataaataacagttgattatataaataatcaactgttcaggactgatgatggaaacaaaatcggttacgacctctgttccagaaatgcgtttgaatgcataagtttatggtgatctctttagcttcactagatattctccgtaagggtctatgaaaaacgaccaccttctccatccattagccaaattccggactactattttcttgtcggtctcgaagacgatttgtcagtttggcggctgctttcccaccttaaattctatttatcgcaacctcttgttatttgttaaatatcagcttcttcctctgtcggcataaatttaaaaagaggaagagacaggctgtgaatgaaaaagtcgtttttcggggcgaaaagggcaagctgacgaatgctctctagtaggtttttggtaaaaatgtggttctatatttccaaacctttacaattttatttggagagcaagagacttaatccggtcttgagctgaacgttaaccggctgaaaggagcacctgtccttcgccaggagcgcagcctcaaccggcgcctgagtgcgggaagacgtctatccccctacagctctatgactcgcaaggaagtaaaaggaaagggcagcttgcccgcacccaaaatggcggtcggcgctctgcacgacagcgcctgcgcagggataagcgttctgtgacaccaattcccctggagtgtcctcccccaccccacagcacccaccagcgcccggtcccgacctagccacctgcgcccggaagtgacgtgtcggcggcagcggttcccccgctgcatgatgggagagtgtgtggagtgggcggggggtctccgcggaggaggtggaggaggcggcggcggcggcggaagagggcggagggtagtgggatgggggtcccgcggcagcggtgaaactccgggtgggcgtccatggtgctgctgcgctgacagggctgtgagcagccggccttccgctctcaccagttccgcgtcg

SEQ ID NO: 23560 - DNA, 2300 bp, Homo sapien
aaaccgagtctcactctgtcactcaggctggagtgctgtggcacgatctcgcctcattgcaatctccacctcctgggttcaagtgattctcctgcctcagcttcctaagtagctgatattacagatgtgcaccaccacgcccggctaatttttttatttttagtagaggtggggtttcaccgtgttggccaggctggtcttgaactcctgacctcaagcaatctgcccacctcagcctcccaaagtgctgggattataggtggtccctttgcttgtaatgttaaatctgacctgtggaacttttgactcctcagcacagaggaatagaataactcaggtttcatttaagaattaaatgtattaaaaagaagctattacaaattaattagtatgggaaggattattcaacaaaagggattaagaccattgcttggctgttgagaaaaaaaaaattcaccttacatttttgctttacatcatacaccaaaataagttctagatgtgttaaaattaaatgttttttattccctaaaagtagaagaaaataaaagtgaatatttattaacttttatatgacagcaaaataatgaagaaagttgcataaaactttcttcatcttcgtgaaaaaatcaattgatttgacttcctaaaattaacttgggaaaacagcttggcagtttcttataaagttgagcatgctacatgacgcagcattcacactcctgggtttatatattttagagaaatgaaaacatgggttcacatagtaatctgtacatgaatgttcatagcagttttatttgtaataggaaaatactggaaacaacccacatatcctatatggagtgaatgggtagacaacctgtggtacatctatacaatggaatgctagttagcaatgaaaaagagtcagacccaggagtggtgatgtgcacctgtagtctcagctacccaggaggctgaggcaggaggattgctcagcccaagaaaccagcctgggcaacatagtgagaccctgtctctgaaaaaagaaaaagaaaaggaatgaactgttgacaaatgcagcaacatggatagctctcaagggcattattaggctgagggaaaaagccagcttcaaagggttatgtattgtgtgattctatttatatataacattcttgatgtaacaaattataatgatgtagaatagatcgaggattagggtttagggaagagtgtgactattaagaggtaacatgagggagttttttttgtgttgatagaacagttcttatcctgattgtagtgatggtcactctaatccacacatataaaatttttagaactgtacgcatgcacacacacacacacacacacacacacacacacacacacacacacacacacacaactggtgaaatccaaacaaggtctgtacctgagttaatagtattgtactgatgtcagtttcctggtttgaccatgtgttatggttattaccttattactatattaccattgggagaagctaagtggaatatacacaagaactcttgtatttccaactttttttgagtcttaaactatttcaaattattaagtatttaaaaattaacttgggtcagaaataaacattgaaaagccaagtgaagaaaatatttgtaacaattattactgataaaattttgatgcctttattaatataaagaactcatacaaatccataaggcaagcactgaatccttaatgaattgaaggagaacttaacagaataagcacttaccccaggagagaattttgtagctgtacttttgtaagtgtatattcagaattatctggaatccccacatttcattaatgtactaccagtgctcttggtaacatgtagtctaagagaactttttttttttccagtgcactatagctgtgtaaagtaattgcacctaagagaaaaatagattaaaagatacaaaacatcatgcaggacatggtcaaggaaaaaaggagacaaaatagagcattgtaaatttgcattgttttaaagtagctttgagagaattttgaaagatcttgttctatgtaatctgtcccctccaaaaattctttttttcttttttacaggtgtaaattaattatttgaaagcaactgaacaatggagccagacatcattcgaatgtactcttcatccccaccaccattagacaatggagcagaggatgatgatgatgatgaatttggggaatttggtgggttttcagaagttagcccttctggtgtagggtttgttgatttcgatacaccagattatactcgtccc

SEQ ID NO: 23561 - DNA, 2300 bp, Homo sapien
gatagctctcaagggcattattaggctgagggaaaaagccagcttcaaagggttatgtattgtgtgattctatttatatataacattcttgatgtaacaaattataatgatgtagaatagatcgaggattagggtttagggaagagtgtgactattaagaggtaacatgagggagttttttttgtgttgatagaacagttcttatcctgattgtagtgatggtcactctaatccacacatataaaatttttagaactgtacgcatgcacacacacacacacacacacacacacacacacacacacacacacacacacacaactggtgaaatccaaacaaggtctgtacctgagttaatagtattgtactgatgtcagtttcctggtttgaccatgtgttatggttattaccttattactatattaccattgggagaagctaagtggaatatacacaagaactcttgtatttccaactttttttgagtcttaaactatttcaaattattaagtatttaaaaattaacttgggtcagaaataaacattgaaaagccaagtgaagaaaatatttgtaacaattattactgataaaattttgatgcctttattaatataaagaactcatacaaatccataaggcaagcactgaatccttaatgaattgaaggagaacttaacagaataagcacttaccccaggagagaattttgtagctgtacttttgtaagtgtatattcagaattatctggaatccccacatttcattaatgtactaccagtgctcttggtaacatgtagtctaagagaactttttttttttccagtgcactatagctgtgtaaagtaattgcacctaagagaaaaatagattaaaagatacaaaacatcatgcaggacatggtcaaggaaaaaaggagacaaaatagagcattgtaaatttgcattgttttaaagtagctttgagagaattttgaaagatcttgttctatgtaatctgtcccctccaaaaattctttttttcttttttacaggtgtaaattaattatttgaaagcaactgaacaatggagccagacatcattcgaatgtactcttcatccccaccaccattagacaatggagcagaggatgatgatgatgatgaatttggggaatttggtgggttttcagaagttagcccttctggtgtagggtttgttgatttcgatacaccagattatactcgtcccaaggaagagtttgtaccttcaaaccattttatgccaattcatgaattctcagaaaatgtagatagccttacaagctttaagtccattaaaaatggtaatgataaggacatcactgctgaactttctgctcctgtgaaaggacagtctgatgttttactttctaccaccagcaaagaaataatttcatctgaaatgttagctacttccattgatggcatggaaagaccaggaaatttaaataaagtagtggagcagagacagaatgttggaacacttgaaagtttctctccaggagattttagaactaatatgaatgttgttcatcaaaacaagcagttagagagctgcaatggtgaaaagcctccttgtctggagattctaacaaatgggtttgcagtgttggaaactgtaaatcctcagggaacagatgatctggacaatgtagctgattcaaagggacggaagcctcttagcactcatagcactgagtataatttagactctgtacctagtcctgctgaggaatttgcagattttgccacattttccaaaaaggaaaggatacaattagaagaaatagaatgtgcagttttaaatgatagagaagcactaaccattcgggaaaacaataaaattaatagagtcaatgaactgaattctgtaaaagaagtggctttgggtagaagcttggataacaaaggagacactgatggagaggatcaggtttgtgtttcagaaataagcatagtgactaacagaggtttcagtgttgaaaaacaaggccttccaacactgcaacaggatgaatttttacagtcaggtgttcagtcaaaggcttggagtttggtagactcagctgataattcagaagccattaggagagaacaatgtaaaactgaagaaaaacttgacttacttacttctaaatgtgctcacctatgcatggattctgttaaaacttctgatgatgaagttggttctcccaaagaagaaagtagaaagtttactaatttccaaagcccaaacattgaccccacagaagaaaatgatttggatgattctttaagtgtaa

SEQ ID NO: 23562 - DNA, 2300 bp, Homo sapien
gcaatgctgttagtggattctggttatttattatttactgctctacctcaaggggcaaaccatgacccacaggacaaatctactgcctgtttttgtaaataagtttcactggaacatacccatgcttattcctttacatatggcctacaaggcctaacatatttactgtctggctctctatagaaaagattgctaatctcctgctctatcttattcaacgtaagatttgaagcaatctaatgtaatatctgatcctaaacatatatgaaactttctttagaaatttccattcaacttacatccttttttgcctcagcttcattccactcatttgagaattttactggtgtcttgacacctggcagttatgtgtaacattgcccaagtggttggatgtgttttagggtcatttctttcttcctgtggtaaacatttttttcctatcccattaaaaagataacaaagaggatacaagaaagatttaatttacagagaaataaaatttggccatgttagttttttgtttaccttccctgcccaggaggagccaatcatgtatccaattaggtggttatctgatccctttgaaaataatgtctgtccgttctctctgttgaggcaagtgagagcaagggccccttgatgcactcaagtttcacaggccttgggatcttgaggctaccctttacttagggttcataattgatagtgagaaccttttccaatatcacacacatgaatataattatgatgtgagaataacttttgtagaattacaaaagagtaccctaagactaattatgcagtgttaagtttttgctctgatacagcttccaaaagagatttgggttcagaaaatgttatgaaatttttttttttaattttcctgggtgctcactacactacaaaacagaaatcaagcatcaacttgtttttgttacttggcaggaagtaccaccatgatgtggcattttgcttttacagtctgtgtcaattcaatagtaaacttaatcttacaacaggctttaacttaataacaatttgtattcccagttgatgtttaaatggtaaattgggctaagttggaaaatatattacatgtatctgaaatagttaggaaaataggaatgaatgttattgtaggttgcacatgtatagtaaacctagtggtaccaaaactaagttgatctaaatccagcaagttttagttaataaaaatactttaaaaaaaaaaagccaagaaatgtatctgtttgttcttggtggaaatactctggggaatatgcaggctttacttgggagagaggtagtgtagtattctattcaaaaatatacatgcaacaaagacgagtagagaaatggaatttctaaaagataatgcatatcaccaaaatgatgaatgagctttcgaattttttatcagtaaaaattgagacattctttgctactttggtttgtactgttagcagcaaagatatttccaaaaggctatcaaaattcatgtttatgttcaaaaaaagattgtttagctataatagcataatacttcccacaagcatccaatcttattgttcctaaatctagagtagatgagtggtagtaagagacattccagtgtggtggaaagaatataaatgctctctgggtttttttggttttgctttgggcagattattcagacattgagattgctttctcactgtacaattgggtaatttcttttttgtagaattttgtaatagattaagataatgcatgtaaagtagcaggtatattgcttggcatgttgcttttaattgccagctacgtagctcatcatcatcatttaaattaatcatttagagtgattgtttcatgagtagttgtgttcttttcactcagtgttttctgatggttctcttcctctctcacagtagtggacagggtgtgcgtgtgtttgcattttaatgctataactatgatattatcaaaattaaatgaaaataaacttttggggggtgttttgatgcagacagctttattaaaccgcctggagcgaattttcgaagcatgttttccttccatacttgtccctgatgctgaagaggaagttacttccctgaagcacttgctggaaacaagcactttgccaataaaaacgagagaggccttacctgaaagtgggtaagtaggagactgtttttagatagcatgtgtttttgttatttttagtagttctaatttataagtttatcttaaaacattaaggttcaggccaggcgcagtggatcacctgaggtcaggagtttgagaccagccta

SEQ ID NO: 23563 - DNA, 2300 bp, Homo sapien
tgtttagctataatagcataatacttcccacaagcatccaatcttattgttcctaaatctagagtagatgagtggtagtaagagacattccagtgtggtggaaagaatataaatgctctctgggtttttttggttttgctttgggcagattattcagacattgagattgctttctcactgtacaattgggtaatttcttttttgtagaattttgtaatagattaagataatgcatgtaaagtagcaggtatattgcttggcatgttgcttttaattgccagctacgtagctcatcatcatcatttaaattaatcatttagagtgattgtttcatgagtagttgtgttcttttcactcagtgttttctgatggttctcttcctctctcacagtagtggacagggtgtgcgtgtgtttgcattttaatgctataactatgatattatcaaaattaaatgaaaataaacttttggggggtgttttgatgcagacagctttattaaaccgcctggagcgaattttcgaagcatgttttccttccatacttgtccctgatgctgaagaggaagttacttccctgaagcacttgctggaaacaagcactttgccaataaaaacgagagaggccttacctgaaagtgggtaagtaggagactgtttttagatagcatgtgtttttgttatttttagtagttctaatttataagtttatcttaaaacattaaggttcaggccaggcgcagtggatcacctgaggtcaggagtttgagaccagcctagccaacatggtgaaaccctgtctctactaaaaatacagaaaattagcagggtatggtggcacatgcctgtaatcccagctacttgggattgaggttgaggcacaagaatcgctggaacccagaagacggaggttgcagtgagccaagatcactgcactccagcctcagtgacagaacaaggctctatctccaaaaaaaaaaaaattaaggctcaaaaacattgtgtcaaaacctaaactccctgcctttttacttttgagctatttctttttatatttctaaatcaataatcagttgatgttatatattattttttgacttcttagaatgaaaactgaaaatttagattttacctctgctattctcctcccctcatcttccccatatatcagtttttggttaatttcttatttggcattttcattattataatcacgtatgtattgttgactcaagccactgttttctttatagtacaacttcttcctggacttctctttttcattaatgtttccctaccctttaagagcttgttcatacacttgtgatccaacaccttatcattctgctcccatctagaatggtttcagtctgggcttacacatacattgcctcgggacttcccttcacttagatcccattttggtggagcatatcctccaatagccttctgagaaaaaaggtagatgggaggcaaatttttactctactctcacattcaatttatagtttaagatctgtttgttgctgatattctgaaatttcacagtgaaatacctttttttctttgagacagtctcgctctgttgcccaggctggagtgatctcagctcactgcaacctctgcctcctgggttcaagcagttctcctgcctcagcctcccgagtagctgggattacaggcacccagcaccatgcctggctaattttttgtattttttagtagagatggggtttcaccatgttggccaggctggtctagaactgctgacctcaggtgatccgcctgcctcggcctcccaaattgctgggattacaggcgtgagccaccgcacccagccttagttatttttctagtgactataagtattggctcttgatttcattcaaatagttatacacttacgttggacccaagagtaaatggaatgtgtgttatgtcacagccatattataagtagaactcatggtgaaagttattgagtaacctgttgttgatggcttcatcatggcctttgcagggaattgctagatgtgtggactgagctacaggatatccatgatgcacatggcttgagataccagtggggcggctcccatagcaacaagaagcttttgtcctccttgggaatagacacccgaaacattgtgagtttgttagtaccttgaaaaatcttttaatcaacctgtggatgttttaaaattctgtcatacttctgtttaagctgtggtaagctagttcctcagaaaataaatatttggtttaaatgttcacttatattgaatgtgctgacttttaaac

SEQ ID NO: 23564 - DNA, 2300 bp, Homo sapien
tgttatgaaatcatcaaagaccaatacaacaacaaaaggaaagtctggcttatctaaaagtggttataagatgaaatatctgagtcattaaaataagccactttcataacgaaggcccacttaattttaaaatgccaagtgactctattattatttagtgaccctttctcctgtgtctgcttcttgaacctactgggactccaggagctttcacggagttccctgatgctatgctctggctaccgctcactgactgtttactcatgtgacaaatgtcttattaaatacatccattatttaatacatcaacctcatgaggtaggatcactcccatttttatggataattcaggctcagagaagttgattaattttctcttggtaacacagttaacatgtgggctgtgaacttaggttggtgaaacttgccattataatttagttgtaatgtactatagaagtagccctttatgtttcaattactgaaacatgaaaaattctgctaaggaattttccgagtcatctttttccacccaaaaggtttgctggacactaaaaacttgtgattattttgaaagaaagtttctctgaaaaagaccaaacttttttttttttttaatagttagggaaatggtgggatatggactggataggcatcttgtcactccgtcactccaggccatacttacattacactcaggcaagcgttccaatggccagtgtaatcccctggcaacacaggaatctgccaatgacagaggtgcaggagttccactggcacattcccagagtggatgaggccgactgtcagctgactgcctgttcctgatgcaatgtcatgtgactttttgctgaagcaatatctaatattctaaaatttttagactttttctgcctaccttcatttcacgcttatatattcttggaaagaaaaaaaatccctacaaatccctatttaaccttgccaatactctgatgaagacacattataatgaatcatgggaatttctttactgatctcatgttctatataaaaacaaacagctcagctactaaaagtgctgatccaattcttataggccagattctaattcttcctggcttcaacaaagtagaagccctaccaaagattttctctggattgaaatatgttaatattcaacaaaacttctcattcaaactcattacatttttcctcacataccaaagtacaaagacaccaggctaaatttcttttaaattattttatttttgtataagctaaaaggaaatttacacactgaaatttcaaaagaccttgggcatgcacattaaccttgttagaggttcttctacatgtctctcttttttccataggaatttccccaaacatttaaaacccatagttttcactgtatatacagcctaaaccatagcaatctatgattatgtcattttacactgtgcaaaatcctcaaaaaatagtggtacaatagaacaaaaaaatcagtaacaagtaaattccattgtaagacattcatataatttggtccttctctgaatcatactgattttaaacagacacaatctctttaaacccctccaatcaagttctgacaatgatccataccctataacaaaagagcaattaagtaccttgcaaaaggtcaaacagcaatacgccagattgaaaagattaaaaaagccccaaaatgttaacaaaagccagatctgaaacccatcatacacaaaattaaaaaaaaattaaatgggggactttggagcttatttatgatagcaaaagtaatttgacatgtaatatgaaaaatcaagaggacagtcaatgcaatctgaaaagactgaaggggatttcacagacagtgaagatttgagttttttttttatttcaaaagttttgtaagaaggacaccaccagtgtatttcacaaagacataaatgtatacaccccagcaacacaaaaagaataaatcttcaaaaatgtttacccccgattatttacatttttctaatataaatttaggacttcagtatgtaaataaatatacattactatgtatacctttctagtgcggcttaccaacaaatcagctgaacttgaattttttttttttttttttttaattagagcaggtatgcttttgatggtagggaagggatggaaaaaaggaaaagcaatagaaactgtccaattcacatcagttatccgtctgctttttcttgagagcttgtggaaggtgttaacgtggctgggaacatcaacaccttggcatgcatgaatgttaagtcaggaaggccagcgat

SEQ ID NO: 23565 - DNA, 2300 bp, Homo sapien
gccttcaaacgctgaacaaattctgcattcaactcccagccaagttttgtagcttggagctggcactgagccagagggcccgggcagaggaatcaaggagagtccccggagccagggtggaagctggggtacaacccactgatgagcaaaggagcagggctagcttgtgttttgttgggatcaaaccaacaaatgagacatggcacagtgcaccatctaaaatggagcttctcaccctggctcccagggagcccaggaaccccctgaaactgtgtgcaacatcttgtgaatatttgcttccaagcacctttctggggagagggtctgtagctttcatcagtttcccaagggagtttgtgacatcctcactccacccccaaaaagaagggtaagaaaaacacagtgtctggcagcttttcggatacaggatcaaaattgtgtgaaactcttgctatgcccgcacctcacccaggagctcaggctcatttaggaaacaaggcccgattgaaggaggcaggttcgggttttgttttattttcttttgttgagttatcatttcttgagagcttcctgtatgcacagcacaacattaagctctctgacaacaacaataatagctagctctcaacccagcacttagcgccaggtcctgttcaaggtgttttctgtgtatttgctcattgactctcccaagagtcctaagaaataggtaccattattctcatctcactttacagatgataaaactgaggcacagaaaaggaacttgccccaaaacccacggcaagacagatctgaacccagggggtctggctccaggcccatgtgcctataggacccctcaagctctgttatttcattggaacctacacttacctccaaagtatgtagtcttgttttctccgttctacaggtgataacactgaggttgaacaacttgcccaaggtcacctcatgctttacacacctgtcactgtgagactgacaaccagagaacagtcaaaggaattcagagggggtcatttcaggaaggggagacaggggaagagtcaagcaggggcggtgggaatctgggaggtcatggagctcaagtgtgtgtgcctgaaaaaccgctccccgagtgctgaggagcagccaagcctccttccagagccctcagcccaggagaggtggcttacagtcccacaggtggaggaggagccttaggctcaaggttaacacccactctccttccctgttctgcatcacagtcacgggggtcacccaaggagtgccttgtatggtagagagagattaacagggcagcctcccagcagtccccaccccaaccctgctccctgggccagctgtcccgctgtcattgacccggtccctatttacagttcagtagcagaggcctatgactcagggacagagggaattcccacggtgccaggcctcaggccatgtggagagtggctcattaagagccacggcacagcgattacctccagagaggcgtgtgagcaggtaccttggaagctctgtttctcatgtttctaaagatcgccaaggtgttgtgttctgagtaataatgaattgccttcattattcacacgcacaacctgcaccaccgcccacaaaggccttggacactcctgctgaagaggtcaagtcagccctctggtcccagctctcccattgactggctggtgggtgtcagcctaagagccgtatggacttcgtcagtgccggagtgtgaggccctttgtattttggagccattaccagaaagcagagcctccagtagacctttttcaaactttctgtgtggtttgcacgttcgtccactgtaccgaggtagcatttcttctcattatgactcctggggctgtccgcctgcctccggttcccaaaaccctgtgggtgtggaagctgtgaggtaagcagaacatggcccagcccccgggccctgctgattggttcagaagtggacctctggcgcaggcccctccaaccacaacatcctgagctcttggcaacaattgtttggtgacggcctcagcttttaactagaattttggagaaaagctgcagtgtgtctttaacttgttaagcttgggagctgctatcggagagtcttgcattctgggcccagccacatccctgctcttggtaaaggttagttatttacctttagttaattacctttaccaaaattatttgagcaaaaaataaattatatacatgcacacgcgtgcacacacacacacacccatacatatgtctttaaactacttagaggggcgttcctgccactt

SEQ ID NO: 23566 - DNA, 2300 bp, Homo sapien
ggagctatttgtaatgtgtacattgataagatgttacagccttcagaggtataaagagatggaaactatttcactccaaaaacgcaggttgctggtctcgttaagagcgcaaacctttgtttgagcaggtacagaatacagaccttatggacttcagcagaatcctgtctatcctagtgacacaaaattgtcactttgacttaaatcctgttattttatacagaaacactgcatttggtgtaatctatttgctagaaaatatccaagtgtcacaaaagttctgcaagtgtaacttcctgcttactttaattcaagaatagcagtttaaattcacaaatagcagtttaaattcaccttaaattcaacagagctaatgcctctggcctcctctacaaagatatcacaggaagagattattgcagcttctatttcaatggcttttccttaaagtgagcactgaaagtataagtgagtgggtggttaggaaactgttagtagttaatgccctctctaaactgcagaactctggaaatgaaaaatatcttcgcttcacagcaaaatgtttgaatgttatgccactcaggcgcaaactgagcaagacctgcagagggccggtgagcacagcttccataatatgtcattttgaatgccattataatgagactttgcaaagatatccacaaataattagcttttggcttaggttatactgtataagactttaattatactgagggtccagtaaaaaccttttccatcctccttaaagataaaacaagaagcgttgtctcctctatcaacatttcagcacaagtttaatttcgatgagatcatcaatttgattgataacaaatcattacagaacagtttaaacaagtctaaatttctcttgatgttaacgacttacaatcgcctttatgttaggtcttaaagctttattattcttaaatacaactagtatagtggaccattaaactccaaagtgatctgaaatgatattgattggggtggcagccaaaattttaaggtgcctgcctgcattgccttttacatcttgacgctgaatgcacgtgtaatttttaaaataatcattaattttccagtggaaccatctatctggcctctttccctagtgctcttaaattctcaccatttgggcatacacacattctcttccaactagtataaatttccctggtaaatttaagtagttccaagcataagcttactccacgggagggaaaggctatcaatgtgaaacttgtgggcagaggactgcgcctccgacctggctgcgtctcctagcttggcttccctcctgccgggtctgcaccgagccccggccggccccgaaggatgcaactcgttcggtccggctcccaaagtgccgtggacttggtgacccacttctcgtgtcgggctgaggccacgcgggcaagggactttttctgtccccggctcacggctggagcccccatcctgccgttcggaccagtgcgggcctcggaggagtgtcccgcagcggacccccgcccaggaacccctgcaggcagcgagacgggcgcccgggccagctctctgcccctcgccccccgcggggaccctgcccgccccgctgaccggccccacgttgccaaatagctcaaatgcttgtcatatttgcggtcgcgcggctccgcgggctgtgcacgcgctgcactcgccgccgcctttgtcaccagccgcttcgtcattcgcctgagcacttctagagtgtgtagggggcgttactagtggcagtggtggtcctcgggccggagtgtctccttctgtctcccctcctctttcagcccgtccttacgagaaaatcaggggcgcgccggcccggcagggagctgggggcggcgctgccaccaggcgcccactgcgccccgccgccccttcctgctcctcctgcggccgcggccggccgcggccggccccggcctttatcgcgcctcccgggaccgccggggagaggcgggccggggcggggccggcgggggcggggtcgggcggccaggggcggggcctgcggcgccggggcccggagctcgcgggaggctcgcgggccgcacgtcactcctgcacggcgagtgctggagcacgacgtaccgctcgctcggtcagggcgccccctccgcccgcctcctgcttcctcctccgctgcctgccgccgccgcctccaccattgtataatgctcggggcgcgcaggcagagaacggcggagtcttagcttcagcctcgcctgctgcccgctccccggcgccaccctcgggcc

SEQ ID NO: 23567 - DNA, 2300 bp, Homo sapien
ctgggactacaggcacgcaccaccaggcccagctaatttttttctttttgtatttttagtagagacgagggttcaccatgttggccaggctgatctcgaactcttgatctcaggtaatccgcccacctcggcctcccaaagtgctgggattataggcatgagccactggacccagccagcacattcttaaatgtagttcaataacccactttggaaaagaagtgaatttttcccacacaagggatctaatttgtttcacttaccacagggtgacctggctaagggaacactgtccactttttgcaaatcatgtcttgggatgaggacactggccttcctgcactgtggaattccaaaggagtttcagcatactgagaggcaacacatacacaagctgtgtgctacaagaagtttgtggcacagctcatttttgtaagtggactcaggactactgaaagaaatcatggagtagggctaaaatcagaaagggaagagaaaagaagtgtcaggctgtatgtcttaacaggcccaggggaaggatctgtatcctaaaatgacaataatcaaggaaggtcccaatatgaccaaagtaaacctttgtgttcacttagtatctctcttctgaattccagagcactgtaggtttcaatttcatatatatatttgaaatatatacatatatatacatacacacacacgtatgtaaagatttcgctcacttcaagactccaaagctaaattattcctaggtctctccagatgactcctttgtggaaaggggatgtcgggtattctaagtgaatttgagtagagatacagtgtctaatttgcctttccttagtttcttcacagaagcaattgtctttaagtctcaaattacgtgcagaaatgcacctgtggggaagaaggtgggttcttgccagtgtatttgctttagtgaacatctccattcaggtttattggtggttacagttacagtactttcaagtacaagggtgtgtaaagggttaaggtctgtaaaatgattgctggacagtagccaagaaactgtgaaaagccataactcctgggaatcagcagggaggagaagatctagtagtgggtgctgcggagcaccgacgtcagggttcaaggtgagccagtgggaggaagatccgtgcgggagggagggttggaggaagctgaggtatcgacatgcatttacagcttcgctcataccaggttaagaagtgccttttccagaaactcagtaaagcaacaggacgtattcaggagctgtttcgacctgcccacaccctaccctgactttcccagaaaacaggcaagcaagcaaggggcaaatgtcacggccaagcctcccgcctacggcttccagcctcctcagatcccagcacacagccccgccggacttcccccggagcggtctccaagagtgggcactgcgtgatctgattcactccaaatctggctgtcccccgggagtggggtttggccgtaggggctccccggcagcgccaggcagagtctgagcagcagccgccgcctgcacgcagagttaggagccagcctccgccgccgcctcctcctgccggatcagagtaggcagcacagccagtccccatcgctgtcacgcagccagcagcgggccgccgcccccccgcgcagccccggccctcacactgttatttgcgtgactgacccgagccgcgcgggaggggagggctggcccggagaggagctggtggagaggaggaggccgggcccgcccgctccttcccctctggccggctgcggaagccctctcctccccattggccacacgctcgcgtccatcactcccgcgaggcgctcggattggcagaaggcgcacttctggagcgaggagggccgagtgactccgcgggtctccggcgcctcctccttccctccaccccacacttgaacgtccacccacctctccccaccccccactccactgcccccgccccgctcgcggcagtgtccttagaagactcattgggccaggggtgcagccagccgcttaacgagccgcgccgccataggtcgaggcccacgcccgtcggaacgatgggcctcaccattgggtagctccgctccgctccgccccctcagctcctcaccctctcgtcgccgcctcctagctcacctctttctcggcccccttaccccgcccgtccccgccgcatcacccctgtccagctgggcggggattgctgtacgactctgtaaagtctgtgagtcactgcacaacccatcaatccaattaaatgtcttgagcg

SEQ ID NO: 23568 - DNA, 2300 bp, Homo sapien
cgccgccgaggccgcggccgcctgggcgtgtggcctggcgtgggcacttttgtgttgtttagatgccagcgttcgccgctcactcctttctcaaacatgtttctaatttacccagtatgtcttctacggaaaaaaaacttcagggaaaaaagatgcatgcttaacgtcagtgccagggtgggcaaaaaggggttttgacaccagatgcaggtttagttcccgaaccctccgggcctggggtgagccgccagcaggccccctccacagccgctcctcccgctggggacagaggcgcctggaaacgcacacgcccgaacccggccgccccgagagccgcgcgtggagccagcacgcccgcaggcgctcctcctgaaaacgggttcggtttctggccgggcaggttcagagccggtgcccaaggaggggaaggacgacgcggcacagaacctggcgcgcccacggagggggcctagcctgggcttctggccttgcccgggcactgccggcactcccggggagcagagaggcggagggggcactgtccgtgcgccgggggcagccaccgggcacagggcggggtgggggaggtgcgggaggagaggagagccagagtccggtctgatgggggtcgggggggacgtgggaagcaacaagcctgacgcctgcaaatagaagtcatcaggaaagagacctcaaggcccatttgactgctgggaggtctccggggtggggtcctggggggaggagtgtctgattggcggctaggttctgtttttcagaccagattaaaaaaaaaaaaaattcccctgtcgcctggggagatgtctcagtcacttttctccagcaggaagctgcttcatgttggagcctcctgggattggcagagttaaaaatcctttaacccaggatgccttgggccttttgttcagccctgacaatagaattgggtggagggggctgggaaggcaagtagctgggttagagatgcatccgtggggtgggggtatggggaagcttgtgttcagccactgggtacatgaaagcaactgtgtgtgtgtgtgtgtgtgtgtgtgtgtgtgtgtgtgtgtgtgtgtgtgtgtcgggggagggtataagggagcccagggacactggggcaccagctcgttaacacgtgtgtatgaatgccggctgtgcgcttggcaaatccttaattacacagggagaacttcctgaaccgggaactcagtatcggtccctgaaaggttgggtaatggcttcttcttgcatctggaatccaaggggaccaatctctctggctcccctgggctctcagattcttctagatgtctttgtcttctaaaattctgggatcccaagggaagacacatagttaaggacactcagaaatgcatacctttcaaccctactaatcatcctaaaacctgtgctttcaacatatcacgtccttgatctgtaaccctcaggggcacccacgatctccaatgactgggagtgatggcatttaagtctttccaccatgcagaagtttcttccctcattccccatgaattctctcctgtagccagcctggcccctcataaccccttggatatactgtatcttgaattctccagcctttctgcagttgccttcctgggacattcattcccatgttcacaatctagccaattgtatcccttctctattcagttctagcatcagtcagtcaatcaacaagcatttattgaaagtccactatgtacaagacatgttctaggccctggtaatacatcagagactgagacaaatacctgttcttaaggattttatattttaatgggagaaacagagtagactcatggctcacgcctataatcccaggactttgggaggccaaggcaagaggatcacttgaggccaggagctcaaaaccagcctgggcagcaagtgtcttcttttgcctctgcaaaagaaaattaaaaataacaaaaaaaggaagctaaactagagtattgtggtagaggggtgtgtgtgtgtgcatgtgggtgcatccgtgtgtgtggtaggttgatgggtgctgttttatttagccagggaaggtctctttgaggaggtggcattcgagaccttctgggtgggaaggaggcagccatgtggtgatctggggaagagtgctgcaagcagaaaggcaagtaaaaacaaaagccctgaggcagaaatgtgctccttatgcttaagaaacaccgtgaaggccaacgtggttggagcaatgtgagcaagaagaatagaggggccttgggaacataggtagctgagtc

SEQ ID NO: 23569 - DNA, 2300 bp, Homo sapien
gagtttgtagacagaatcatgtaggacttgtgggtattgagcaccagttcaagccaagggcaaaatgaagtctccatttttacacagaagaatctaggcctgcaaataaacaggtcagtgaactatccactaggaaactcactggaatacaagaacatttattcattactctagaaacaccaagagatggtgccccatgcatggacaagcagggaccaccttggttccaccttcctgcggaacagtcgtctatcagcttgcatggtattctttccttaatgtgacatcttcatatgaaaaagcccttgttttcagcagcaacccagttaggtctctttggttatttttgcattgtgtacctcccatcacacgttagggttggacaaagatccaggaagccaggcttggaagagaggctgtctgagtcttgacctacctgctgctgcctggagaggcagggctcccctacaacatccagcctgctctcctggttgaccagcactccctgggaaaggttagtggcatacacacagccctgggcagcaaagtagagactgaattgaaacagatactaactaaaataagacctgcccattattgtatcgatctgtgcttttcagctttttaaaaacaatttcttcttcagatcgacatacaagtctcaaaggtcatccctgacccaaggttctgatacatgaagaagcatctctcttgtctgtgtgtccccacttgccatgagtattttttttttttttgagatggagtcttgctctgtcaccaggctggagtgcagtggtgcgatctcggctcactgcaatctctgcctctcaggttcaagcgattcccctgcctcagcctctcgagtagctgggactataggcgtgtgccaccacacccagctaatttttgtatttttagtagagtcagggtttcaccatgttggccaggatgatctcactctcttgacctcgtgatccacccatcttggcctcccaaagggctgggattataggcatgagccactgcaaccagccaagagtattttattgaattttactttctatacttttgtcagaaaataaaaatttccaaatataaaattgttattatttataattattaattatattaaaattgaatcttccttttaaaaacactcatgttcctgtgaaccagcaagtacatcactcccttgggctagagcccccagttgagactcgatgaactccagcagagactctgacgaaggagtgacacagtgtgttgggtcagagagaaatgtgaagcccagcaaacatatgttcaaatccagatgccaccattcggtgaacatgcaccccgagcaactttccagggcttactttctttgtctataaaatgggaacaacaggtacagtaccatctagtccatgggggtcaccagaagaaactagaagatgtaacacacaaggaacatttagaagcaagcatgtaacaaacactcagcaaatggcgactacattataacttgtccagccaaatagatatgaccagtggtaacacggaactgagaattttcacaatgtactatttttacatcttaatttctttgggcttctctgcttcctctttttaaaaaagcttaccacccacttgttattctggagggggatgaacatagataaaaagagagtttaagaactcttcatggaaagatagccaaaccactaaaatactatttcaacagaggaggtcacagaatggtggaatggtagatctgtaggactaaaggagacctcagatttgtcactcttatctgactcatgaaactgagacccagagaggtgaaagggtgtgctcggtccggtagctgtgttgcagactatgtgaatggcacctcttggtgtcatgcaatgcataacaaccacctgtgcagcctcatggccctgcacaacctcctgaccacagcgatggaataaagtggtccagtcaggggcattttcagcctctggggatgttgatatagtaactcctcctcttttcccataccctgaaaaaatgcagcccaagaagctgccgatgctcttacagctgtgaggggaggggctgcccgaggagagaggtaacctagagttgagagatggaggaagagatacagaatctggatggctatgctctgatcctgtaatccgactatgcctgaatgtggatctaccttccaaaggtagggtgcttttcgtttgtttgagccatctggtgtcagatgttctgtcacttactaccttgttataattaatagaggagctcaaagagctataaat

SEQ ID NO: 23570 - DNA, 2300 bp, Homo sapien
gaagtttcacacagaggtgactgggtcatcaattatgttttaaccgaagggatgagcaggtttgaggaaggcaaccatgagtttggttttgaacattttagttgggacgcctgcaggatattcaggtgaagatgtaaaacaggcagccgaagactcatttctggagcatgatttgagagtcttttgcataaacgtggtagtcaaaacaaagggaagggctgattggcaaaacacagtgtgtgtctgtaggaattactctttcttcagtgcacatagagaaatgaactgcattctggaaagccagatataaatatgtgcagctcttcatctgacactacctcccccgcccaccccccccccccccacacacaatccttacaagttctagccaatagctggctggctccaagcaataaaatactcactgtctcaaaatttggacagctccttaaagttccttatgaaggcattttgatttgcacaaatatgtcatgacatgttttaagatgactcctttatagcaagaaatctatagtaaattgccttcctccttaattgaggttagccacaattaagtcttcccttgcctggcacagtgggtggtgccagctaccaaggaggatcccataagcccaggaactgggagaccagcctgggcaacatagcgagaccttgtcccagaaagagaggaaagaaaggaaagaaagggaaagaaggaaagaaggaaggaagggagggagggagggagggggggaggaaggaaggaaggaaggaaggaaggaaggaaggaaggaaggaaggaaaaagaaaaaacaaaagaccacccacggaagtctttaaagaacaattcacaagcagaataaaaaaatataaaaatataataactgtgatacagtaaaaagactcagcagaagtttcccttgtaactcgcgtggccaaagcagatatcaaataaaagatgaaataaacaggaaatccatagaacgtgaacaataaggaaccgttcaggatggccaaaccgccgtctgcgctgttttctcgccagggctcaggcctgggaacggaagaggttaaaatccagtggcttgtgtttcagctttggttacgtggcagaaaccaactggaagtggtggcgtgagagctctgtttcttctagaagagctttgcgtcttaaacgcccataccgcagacagctgcctggcgggcgacccagccccatcctgatggccccaggacacaagcccaggagcgccccggtgcgcgcggttccgcggcccaggggcgccgggtttggtggcacagcgagccccctttctctagcggtatggctgcgttagagccctaatgagcgcgtgcgaaggctccccttattcatccatcctccggtccgtcctttgtctcaaggccggggccttgctgggcaccatggcgtgctttaccgcacaagcccctgaggacccctggaagaagggatcttccgcaggaggggacgcgacggcaggaccgccccgggccccctcaccgcgcccggccccctggcgggagaggccggcgagctctggagaggagcgcgggccgcgcggggcgaaagcgccacccgggagagagggatcctcccctctcctcctctcttctcccctcccctccctcccctcccacagtcctcaggaggaggaacgccgctgcgttctaagttctcccgggccctctggccccgaggactcagatcccggccgcgggagagggcccggcaggtgccaaggagcccgggcggtccttcagcccgcacttccccgcggtcgcccggagccggcctccgttagccgggcgggtaggcggctattggcgccaggattggccggcgccgcccgcgcccccgcggcctcgggtggagcctcccgcccggccgccccctgcggcacccgcgacacgggtggggaccagaggctcccggcggcggctcccggcggcggctcccgggctgtgattggccagcgccacagggggcgggacggcgggcgtgaagtgagcgggctggggccgctggcgcgccctcctacttccccgtctgcgtccgcgttcgcggctcccgtttgcatcatctccagccggcggctgctccagggaggctgggcgcgatcctctccgcccgcggctccaacccgcactctgcgcctctcctcgcctttctcgcacctgctcctgcgccaggcccggagacccccggggcggcttcccagaacctgcggagcacaactggccgaccgacccattcattgggaaccccgtcttttgccaga

SEQ ID NO: 23571 - DNA, 2300 bp, Homo sapien
aataaatgcacccactttaaaggtccagttcaatgagttctgacaaatggataactcatgtgaccaccaccacaatcaagatactgaacttttccatcacctatgactcttctcagcaatccccattctccacccctggcctcaggcagctgacctgctttttatcactataaattagtttggctttttctagagtttcatatcaacagaatcattcagtatgcactctcctttgtcagtcttgttttgctcagcacagtgttgctgagattatccatgttgttgcgtatatcacttggctcctttttattgccaagtggtattccgttgtatggagttttcataatctttgtatcccttcatctgttgatggacatttgggttttggactattatgaataacgctgttatgcatacagttcctttttgcaggcatatatttttatatttcttgggtaaatatctaggagtgggccgggcgtggtggctcatgcctgtaatcctagcactttgggaggccaaggtgggcagatcacttgaggtcaggagtttgagaccagcctggccaacatggtgaaaccctgtctgcattaaaaatacaaattggcaggcgcagtggctcacgcctgtaatcctagcactttgggaggctgaggggggcagatcacgaggtcaggagattgagatcatcctggctaacatggtgaaaccccgtctctactaaaaatacaaaaacaaaattagccaggtgtggtggcgggcgcctgtagtcccagctactcgggagactgaggcaggacaatggtgtgaacctcggaggcggagctttcagtgagccgagatcacgccactgccctccagcctgggagacagagcgagactccgtctcagaaaaataaataaataaataaataaataaataaattagccgggcgtggtggtgcacacctgtagtcccaactattcgggaagctgaggcaggagaatcttttgaacccagaggcggaggctgcagtgagccgagatctgccactgcactccagcctgggcaacaaagtgagactctgtctccaaaaaaaaaaaaaaaaatctaggaatggaattggtgagtcctatggtaagtgtatgtttaactttatcagaaactgtcaaaacacatcacatttttcttaggaacttgatttttggggggcagaagttgctcttttgcttctggacccctctgttcccattggattttgcagactagatattgtagacagtctgaaaacaggtcggtgtgccagtggctgttaggtgtagaagttctgggttaaggacagggcctgttctgggtgagatgttactgggttattgcttgtatgaaaagattgggcaggacagatagacagaattaaacaaatagtgttgtgctctttagaagagaatgcattcaaggctgtgggaaaggctgtgcttgtaccaattgaggaaacagctaatccctgaaggatgtgaggtatttgccgggggaaattgtttcccatgaggaaagtggaggtcttctaacccaactcttttctgaacttcccggtcctcatggaaagagaaacttagagcagctcagtctgtcaacaactgaggattgttgtgtggtggatacagaacagagagactttggcacagggccccttgctgcttctgactagggcagaaaatggaaatgaaatgccaaaggtagtccccaagactaaaatatgtaagaaagttgctttgtaatggaaataataacaaatgtaagttgttattcatctatactccgaaaactagccaatataagttgctagtctgtttctactttttaaaaagtaaatatagctgtgataagaatcaaacttctggtcacagttttgcaacaatttaattcagctaaagattaattttttctgcttaaatgcagacatgtactctggtattctctaaatatgctaaaagcaactcaggttctatggacaagtttgggaaatgctgtgttgcaggctgtgtatgctggccgtcctgtgagagcaccctaagtgttctaatgcattgatttttgcatcttattaactttgttggctgatacattgctgcataacaaactactacacatttaacagcttaaacagcttaaaatctcacatatttactatcctacagtctctctggggtcaggaatcttgggacagtttagttaggtcctctgcttcagagtctcttacaaggctgcaatcggaggtgttggtcagggctaggttcttacccacaggtccacctgggga

SEQ ID NO: 23572 - DNA, 2300 bp, Homo sapien
ggcaatcagaacacaggcacataacctagactaggccaagtaaatggtccttcccaaaacttgaatcttaagtgagaagagttgaaaaataattcatgtcaccaccaaaggagctggtacgcaccctaatcagagtaccaaagcaggatggcttagctggttcctaacatttccaggcctggttctccagcattgctgctgcaaggagtataactacagacagctctaggcctacttttcccgcgctcagaaacaccaaaagaaagagcctctttctcccagcctcattctctaaaatccccgacaagggctcagatcatctcaggtttggtcatgtgcgcatccctggggaaatctgaaaacaagaggagggagactacagctggtcaggcctgggttccacacctccccttctccacacccatcctgccttgggagaccggagaagtgcggtgctaaagaaccatctgacccagcggactgcagacaattcccaaaggaaagttttcccgtcaggcaaaaacaaaagctgctcacaacacaaaattacagaacatcagaaccaaaaggaaccttgggactccttcatcctatcccctctctttatagatgaggaaaccatacaggatatgtacgcctgtttggactttgtacagttctctgtccagcaggggtgacttggctgtgggattaggtgactccactggaggtcttctgtgtatagaaaagatcaagggtcacaaacacaaatgccttcaggtaggcagcaaatgtgtgaaggctggctgttacttaatggaccagtggtggtggtgggattcaaattcttattaaaaaacaaaagcaaacaaacaaagaaaagctatgcgatgcccaaataaaaccatctgtgggctagctgctgctgttgtccaaagtttgtggcccctgggttagacaaaacctctgagctgtcctgacaggtctgggaaaaccaaacaagtccttgtctcctaaactacctgggactcaagagctctgtaggaaaaaatttgtaccctgcacccagctggggttgacatttacagacgcctgttttatgaactggggagatattcagttgaagccagattgctgaaagtgctgctgagagaaaatcatcagaagggagggcctcttccccacgccaccctggtggtagttcctctatgcctccggattctgctaagcagtaaaagctaaagggcagtgtcattaagctcctaggggatgggatgcagtggctcacacctgtaattccagcactttgggaggccgaggcgggaggatcgtctgagtccaggagttcaagcccagcctgggcaacacagcaagaccccatctttgcaaaatagatagatagatagagatgtatgaaagttactaggtcccatgctggcaggggagagagtgagcaccctggcctcccacaagctgcctcccacttccctccgactccatcaccgatttcccatcagagcaggctgctcagagtggctaagtagctaccagttcattttccacacccttcccattctccacgagccagagctccacctccccccagaagctgtcttcaaccacccggcctggggagctcccctcagcactggctccccgccccgcctcgcagcacctgttcgggcctcggtcgcgccgccgggtcttgcagacgcgaatgtaaacagaaacacagtgaaaggcgttcggagagcctcgtgactgcggcacggcggcgagccgggaacatcagtgcgtccagagcaaaatgaacgaatgtacgcatgactcctggagcgaccttcacgagggaaagcgcgccccccggcacccacccctaagcgccccaaaatgaccagcctttacacaacccagctcgcaggcgaagctgaggtcggagctccaaaagcgagggaggacagccgctgaagaagtcccggcttcccataggccaggacgaagtagggggcgggctcatcttgcaggagcgtccacgtattggtggagccgcggacttagagctgcgattcgctgcgcgaaattgccgaaagccctcccgcggagggagaaggggcgggaagaagggcgtggtcagcgcggccgaagggcgtggttggcgctcggtcctgccctgcgcgttttgggctgcggttggagggccgcagttgcagtcagggtccgccagctcggggccagcgcatggggctgctgagaccgctccggacgtgcgaagcgttcgcggtgcggtaggtaggcagtgtcccgcgtgcgggtgctggtgt

SEQ ID NO: 23573 - DNA, 2300 bp, Homo sapien
ccagcctgggcaacatggtgaaaccctgtctctactaaaaatagaaaaattagccaggcgtggtggcatgtgcctgtagtcccagctactcaggaggctgaggtgggaggatcacctgagcccagggaggtcgaggctgcagtgagctgagatcatgccactgcactccagcctgggtgacagagtaagaccctgtctcagaaaaaagaaaaaaagaaaagaaaagagagggtcctgcctcctctgccaggcagagccaagcatcttggagggcattcttccagtgcccagctgaggcctgggcatgccctgacttgctgttctctaggatagaacagtcagagccaggcctgagttgcttgctgaggggaccgttacgacaacagaaccactatgggcctgtgcacaggaagggtcccaccaggcctcttacccagtggggttgggctaaaagggcaaaaaggtgacttaggcaggaccccagccttgattggactttggacctgtgttgaccctcttgggtttctgctggtggggatggcaccatccaccatgaaagcagaggggaaatggtgtgcttctgtgtcccctttggaaaggtctggggccagggaaaagccggaactcggtgctcctctgaggaagtagtcaccatttgtttccttttttctttgaccaaaaatatgtttgccttaattgttaaagagcaagacttcctgaacacagatgtagaagatttatatttttctctcccttcccctgttttgtaggaagctgaagtcttcagcagaaccctgacctaggtagggagtctcaatggccctgggtgaagaaaaggcagaagcggaagcatctgaagacacaaaggcccagtcctatgggagagggagctgcagggagcgggagctggacatcccagggcccatgagtggggagcagcccccacgcctggaagctgagggagggctcatctcccctgtatggggggcagaagggatacctgcccctacttgctggattgggactgaccctggcggcccctctagagcccaccagccacaggccagtgatgccaacagagagcccgtagctgagaggtctgagcctgcactcagtggcctgcctcctgccaccatggggtctggagaccttctgctctccggggaaagccaggtaggtactaaggcaagactgtagatggacccattgctgtcctttgggagtttgttcaggatttcctcaccatcttgcatcctttccttgctactgtgcagggtgaggaattggaggggcctgagtatgatgatttctgttttgcgggttcagctagagagctgggcctcaggaccggccggggggactgtccacggttatctcctgttcctcaagagtgactggtgactttttaaggaccagggattataggccaagaggctgctgcccagaggtccaggccaggggaattctggcaaggagagccctgccgtgtttctgacttggtgattaaaggctttaggggtaccctgaagagacttgggaaaggagtgtccagggctttgggctcctgggggctctgaacctaaatcctcttcagacccaagggacatgtcagaaccttggagccctgtagtaggcagcactgtccctggttaaggagaattccttgggcttctctgactgccaggcagcttctcctagtgggagtcacatggggcagggaatcctaccaggttctgtgactgcaggcaaatcaccagatctttcaggccctcagtatcattgggaggtgaccggaatgatctgttctgcccagctcttacattcttttctgttctgcttgccaaggcctttcctgggaatggctttgatcttctcggtgtcattgtagccttggctgctgcagggtccccttgtggggctgcaccctgtgaggaggctctgagcgggactgggagagaacagaggctgggccccacctgcctgggagcaaggggcagtgggaggctctggcacctgtgagtcagagattcggtgaggcaggaagcgaatcataaacagacacagaaatggcctttcacggggatgagtccggtgcttattattagaattcctgttgttcgttaagctcttaccatgtgctttgcacacatgggtgtatttaatccttaccttctgaggagctggtgctatgaggggaggaaagtgaggctcgaagtcatacatctggaaggtggcaaagttaggggctggcctcaggtttgtctggctccaaaacccatgtccttcaacactgtgctgtc

SEQ ID NO: 23574 - DNA, 2300 bp, Homo sapien
tgttgggattacaggcgtgagccactgcgcctggcagggggtaattctttgttgggaaagaaaatagttaattaaaggaagtttgggagtatacttcccaggggaggacagattgtatttttggctgaggacgagttctggacagttttctgagggttttttgggggtgtgtgtgtgtgtgtgtgtgtgtgtgtgcctttactagtgactcaggtcacagttttctgagattttttttctcccctcaagacagaatcttgctctgtcgcccaggctggagtgcagtggcctctcggcccactgtagcctccgcctcccgggttcaagcaattttcctgcctcagcctcccgagtagctgggattacaggcacgcgccaccatgcctggctaatttttgtatttttagtagagacagtgtttcaccatgttggccaggctggtcttgaattcctgacctcgtgatctgtccgttttggcctctcaaattcctgagattacaggcatgagccaccgagcctggccagttttctgagtttttatttgaaatcaaaataagctttttttttttttaatgggctttagagtccagggtaacgaacactttttggtgcctattactgaaccattcagggtattcctggggtggtgaccgtgttcatttcagaaaccaacatgttcatttcagaaaccaaactcgggtaacttttgataagttcatcaactaaggcccatggcagaatttgagggctaaggggtgtaattagtgtatgggtagaaataagtgccttctttctatattttggcgttgtaggaatttaaagtgattctgcagtaagtctcaggagacaattttcttagttcttagaagttggaagataaactttggacaatgtattacactatgccctttgtaattaaataactcaagataatgtgttaaagtttagcggagatttaaattcctgagctgattaaagagagctgttaaggccataggttttttaaaaatgagttaatattactcccagaaattgtaggcactatatagtgatgaattgcctatttttattgcttattattttccagtcttgcagaatggctcagggttagtagcaactaaaagataatacattacaattcaacctgaaggccgggacgaaggtaggaattggattttaggctggctctgggctgtgtccctcccatccatgggatgtggagccattgaaggttgtggggtcacgatgcaggtgctgtctcagaaagatacatccgactgtgtgtgcaaatgggctggggcggagaggagagagagaggtagagtccatttggagactactgcaatagccaggctgacgagttaagagcggggcacagtaagaatgggaagaaatctaagaagaaaatggtagtgcgcggggccaacaatggacgatgaccgaacccaggtggggatgggtgagtgacgagaagaaccgctccgtgccgtccagggagccccttgacttcccttctgttcttagagcggacgtcctcctaccagcccccaaccagcgccaccagggtggcgcaagcctcaagctggtcaggtcagcaacagccgcaacggaggcaggagccgacacgctcgtaccccggccccctccccgcccccgcacccccggcagtccctccggtttgaccactccccccggtcccttgcctcccccgacccccagcctccgtcggccgccggcaccaccctccgcccctctccgccccctcccccgtggggcgctgactcgcccggctgccacgtctcactgatgacatcactagggcagctcggccttagccaatccgccagggggagtccgagcgaagtcctagccagcgagtcagaggggaggggagcagggaggggccgagggtggggaggtgagggagtggggaatggggcgggcgacaacccttcaggtacgcatgccccagaggcgcggcgcttggcgggaagctgagtcctggccttgcgtcgcactgtctgtcctcagctcgcgtagccgcgctcgcgactccctttcccggcatgccaggcggtgcggccgccctctgggccgtgtaaaggcccctcggtctaaggcttccctatttcctggttcgccggcggccattttgggtggaagcgatagctgagtggcggcggctgctgattgtgttctaggggacggagtaggggaagacgtttgctctcccggaacagcctatctcattcctttctttcgattacccgtggcgcggagagtcagggcggcggctgcgg

SEQ ID NO: 23575 - DNA, 2300 bp, Homo sapien
ggactatttgattccattgatcgatatatctgcctctatgccagtattacagtcttcattactgtagctttataataagttttgaattcaggtagtggaagttctccatctttttctgtttcgaaatccttttattctggttccttttcatttcatataaattttagggccaaacttgccaattttttttttttttttttgagacagagtcttgctctcaccaggctggagtgcagtggcacgatctctgtcactgcaacctctgcttcccgggttcaagcgattctcctgcctcagcttcctgagtggctgggattacaggcgcgtgccaacacgcccagctaatttttgtatttttagtagagacggggttttgccatgttggtcagccttgtcttgaactcctgatctcaggtgatttgccctccttggcctccccaagtgctgggattacaggcgtgagccaccgcgcccggaataatgttctttctttaaaaatacaaattagcaatccccttaattccacaaagaggaaaagtaaaagaacacagaaatgcttgagttcaatttgctgagaccaataaaatgcactttcaagaaaactgcacagcactagcattggaggccacaaaaataagatacggactctatactcaaggaatttatgaacaaataaatttttctgctggctgaggtacttctctgactgttaaagcaggtaaaacgaagaaatgttcctccgagacttcctacctattctaacctctcaaacttctaattgcaacaatggcagctttatttttatcttaatatttatgtgttgagggttccatataagattagatttgaataaagcactgtatgcctttaaaaaggtttgaaaatcactggtctaataaaagaacagtgaaaactgacaggcagctatattataaaaagaatactggattgagggttcatgatgactgttttattctagttgttgaacatgtacagccatgtcgaaggaaaagttctatttctcacctctcataaaggatggcattttaaaggtgaattttaatgtcattcatctaataaatatttgttgcatgcaataagcacaatgttattcatatattcatagtaaagtaatagggagaaaggaagtacggaatatcctgaggatatcagctgtcatcagagatgtaacaagctgggtctcagagcacaagtttgccaattgattaaaaaggaaaaaaaatgaggcatcgtagatagaatcataggtccagaagaacagaattagaaatagctaccactgaatgaacatttcctccatgcatagacttttatcctcaccacacctatggagatagaagttattatccccatgcagacaggggtatgccaaaatcacaaaactcgtgagtggcagcgccacgtttgaaactggggttgtctgatttcaaagccaaggctctgggttcacagaagtacatgtacttaagaggtgtgaagcaacatgggactactggaaggaggcggtgagccacgaggctggaaatgcaggcacctgctctcgctcacttgaccatagagcaacttgggcaaagaaggggtgggctgacattggagtatggaacaaacgcatgatttcaaataagcatgtgtgtatccatcccagttctgtccgctgaaaaggcctagaagcaataacacaccaagccctgtcgaatggtggggtccgccaggacctccaggcttgctccccgccctacccgccagcttctccgccacattccactgccgcagcagaaccggtgtccttcacctgcctgcgtcttctgcagttcgttaagcagcgcccttagctcctgtgacactttagggagaaagccgcagcaccggcgatgttggccgccattaacgcccggcaaagcgcccggaactagaagcagcgaagaacccgggtgggcagcgaccgtgacagccgagccggaagcggagctgcgggaggggcctcgacgctcctccatcttttattggagctcaccgctgccagtcgcgctgcctgcccgtcccacccttttcgtgcaggcattcagctaaatgacgggcggagcccggcggcggcttccggtcgggggaaaaaagttgggccgaaggaggggccgggaagacgcaagaggaagaagagaaaacggccgggcggcggtggctgtaggttgtgcggctgcagcggctcttccctgggcggacgatggacagccagggcaggaaggtggtggtgtgcgacaacggcaccggggtaagggccg

SEQ ID NO: 23576 - DNA, 2300 bp, Homo sapien
tctcaggtgatttgccctccttggcctccccaagtgctgggattacaggcgtgagccaccgcgcccggaataatgttctttctttaaaaatacaaattagcaatccccttaattccacaaagaggaaaagtaaaagaacacagaaatgcttgagttcaatttgctgagaccaataaaatgcactttcaagaaaactgcacagcactagcattggaggccacaaaaataagatacggactctatactcaaggaatttatgaacaaataaatttttctgctggctgaggtacttctctgactgttaaagcaggtaaaacgaagaaatgttcctccgagacttcctacctattctaacctctcaaacttctaattgcaacaatggcagctttatttttatcttaatatttatgtgttgagggttccatataagattagatttgaataaagcactgtatgcctttaaaaaggtttgaaaatcactggtctaataaaagaacagtgaaaactgacaggcagctatattataaaaagaatactggattgagggttcatgatgactgttttattctagttgttgaacatgtacagccatgtcgaaggaaaagttctatttctcacctctcataaaggatggcattttaaaggtgaattttaatgtcattcatctaataaatatttgttgcatgcaataagcacaatgttattcatatattcatagtaaagtaatagggagaaaggaagtacggaatatcctgaggatatcagctgtcatcagagatgtaacaagctgggtctcagagcacaagtttgccaattgattaaaaaggaaaaaaaatgaggcatcgtagatagaatcataggtccagaagaacagaattagaaatagctaccactgaatgaacatttcctccatgcatagacttttatcctcaccacacctatggagatagaagttattatccccatgcagacaggggtatgccaaaatcacaaaactcgtgagtggcagcgccacgtttgaaactggggttgtctgatttcaaagccaaggctctgggttcacagaagtacatgtacttaagaggtgtgaagcaacatgggactactggaaggaggcggtgagccacgaggctggaaatgcaggcacctgctctcgctcacttgaccatagagcaacttgggcaaagaaggggtgggctgacattggagtatggaacaaacgcatgatttcaaataagcatgtgtgtatccatcccagttctgtccgctgaaaaggcctagaagcaataacacaccaagccctgtcgaatggtggggtccgccaggacctccaggcttgctccccgccctacccgccagcttctccgccacattccactgccgcagcagaaccggtgtccttcacctgcctgcgtcttctgcagttcgttaagcagcgcccttagctcctgtgacactttagggagaaagccgcagcaccggcgatgttggccgccattaacgcccggcaaagcgcccggaactagaagcagcgaagaacccgggtgggcagcgaccgtgacagccgagccggaagcggagctgcgggaggggcctcgacgctcctccatcttttattggagctcaccgctgccagtcgcgctgcctgcccgtcccacccttttcgtgcaggcattcagctaaatgacgggcggagcccggcggcggcttccggtcgggggaaaaaagttgggccgaaggaggggccgggaagacgcaagaggaagaagagaaaacggccgggcggcggtggctgtaggttgtgcggctgcagcggctcttccctgggcggacgatggacagccagggcaggaaggtggtggtgtgcgacaacggcaccggggtaagggccgcgcgaggaggccttggcggccacagacgccggcggggacgagcagctggcgcacgggccctcggcccccagggctgcacctccgggccctcggggcgaaggggcgcggggcggtgcctcccacctccgcgggcgtgggagcgagccggccgttccctggtctcccttgagcctgccacccatttagcctgccaccccctcacccttccgggtgggggcggcgggcgagaccggcactggacatggagcctactgaccgcccggcagggacctgctccgcgctaatgcgggggcaattgggctaaagcggacggaagcgtaaaaggctcggtttgtgtgttccgagaagggctcttttccccagggccaccggtttgtaaaaaggagaaagacctagaggccttcctct

SEQ ID NO: 23577 - DNA, 2300 bp, Homo sapien
cagaaaggtcatgaagtcctctccatcttccctcactcccttatcctctgtctcataggtaaccattatgaacatttcttatgtatccctccaaaactttcatatgcggatacaagtttgtggacatacatctttaataaggaacacacacttaaactgaatcattctaaaacctttttcaacttaaaatcttagacgtttccatagcagtggatctgcctttttaaaaatattacattcttaaaaaccgtcacattaatatgttttgtttttctttttttttttttttttttttgagacggagtcttgctctgtcgcccaggctggagtggtgcgatctcggctcactgcaacctccgcctaccgggttcaagcgattctcctgcctcagcctaccgagtagctgggattacagacgcccaccaccatgcccggctaatttttgtatttttagtagagacggggtttcactatgttggccagcctggtctcaaactcctgacttcaggtgatccgcccgcctagacctcccaaagtgctgggattacaggcatgagccaccgcgcctggcctcaatgtacgttaacactctttttactctagtccatttttaacacagttcagatgaagctaccataattattgcttgtaaaattgtgtaacaaatctaatcaagggcagtattatggcagtaaataccagctcttttccccctcaacaattcagattccaaagtgttttgttcaagtaaaatgaactttaattcatacatcatatttatgggagggaggggagaaaactcacaaaatgttgcaacatcaaaatggttagaaatcactatagaagtcatccagaataaataatatttccatcttctaatttgctgactttgctacccaaaatacatttttttttaatctggcaagagggaggtctgaatgaaacaattttttttttttataattgagacggagtttcactcttgtcgcccaggctggagtgcagtggcgcaatctcggctcactgcaacctccgcttcctggcttcaagggattctcctgcctcagcctcccaagtagctgggattacaggcaagcaccaccacggccggctaatttttgtatttttagtagagaccggggtttcaccacgttggctgggctggtctcgaactcctaacctctggtgatctgcccgcctgggcctcccaaagtgctgggattacagaaacaattttcaaatagtttctaaatcagtgctttagtcagattttacaatttttgaatcttaaaggctaacattacctgtatactgaaacgaagggaaaaaagggggctgggggtgggataatcaacactaattaacttcccctaaggctagtggaattaacacttgagtcttgcgggatcctaggtcacccaaaaccactcaatggaacatgctggtctccgtgggcctactcctgggccaaatactagtatgtaaaacaaaaagtgaacgatgcgctgccgatctggaccccttccctcgaaaaaactaataaaaagcccaacaaacacagcgaaagggctgaggtccacactccatgacagcacttccctttttttttttttttttttaagtaaacccgcttcctgcttctcgtttggtgtatcttcaactatacaggaagaggaaggcctctaggtctttctcctttttacaaaccggtggccctggggaaaagagcccttctcggaacacacaaaccgagccttttacgcttccgtccgctttagcccaattgcccccgcattagcgcggagcaggtccctgccgggcggtcagtaggctccatgtccagtgccggtctcgcccgccgcccccacccggaagggtgagggggtggcaggctaaatgggtggcaggctcaagggagaccagggaacggccggctcgctcccacgcccgcggaggtgggaggcaccgccccgcgccccttcgccccgagggcccggaggtgcagccctgggggccgagggcccgtgcgccagctgctcgtccccgccggcgtctgtggccgccaaggcctcctcgcgcggcccttaccccggtgccgttgtcgcacaccaccaccttcctgccctggctgtccatcgtccgcccagggaagagccgctgcagccgcacaacctacagccaccgccgcccggccgttttctcttcttcctcttgcgtcttcccggcccctccttcggcccaacttttttcccccgaccggaagccgccgccgggctccgcccgtcatttagctgaatgcc

SEQ ID NO: 23578 - DNA, 2300 bp, Homo sapien
aagtgatagataagtcagggtatggtggctcatggcagtaatcccagcatattgggaggccaaagcaggaggatcacttgagcccaggagttcaagaccagcctgggcaacttggcaagacccccgtctctacaaaaaatacaaaaattagccaggggtggtggtgcacacctattgtcccggctactcaggaggctgaagcagggggatcacttgagctgtgttcatgccacggcactccagcttgggtgacaaagcaaaatcctgtcccaaatacataaataaatacatttaaaaatatatatataagcaaatgagatgaggggaatatacaagtaagaaacagtagccaaaggaaagttcctgtagatttgcaagaaagagagcatctagagatcagaaaaagccttttcttttcatctgtttagttggggaatggtagagggtggagagatatgtcactctaagcaagcagaaggaagggtagggattctgggggtcctggttttaaagatggttgccagctgcatctaacaaggcccctggatagcccctgggcccagagggttgtggagtatgaccaccacctggggtcgcctggcctgctccgttgtgtctcaggtgggagtattagtctattttctcgctgctgataaagacataccggagaccgggcaattttcaaaagaaagagatttaattggacttacagttccgcatggctggggaggcctcacaatcatggcggaaggcaagaaggagcaagtcacatcttacgcggatggtggcaggcaaaaaaagagcttgtgcaggggaacacctctttttaaaaccatcagatctgagacttattcactatcccgaggacagcacgggaaagacttgccccaatgattcacttacctcccagcaggtccctcccacaaattcatgatgagttttggttggggacacagccaaaccatatcaggtggcatactgggtgcctgtgggatctgcttgtacagtgcgcactgatagctaatcaccttccaaagacatggttacggagactccagtcttaacttgacatctctactgggcaaaacagctctgtactcccccttcacagaggtggcctctgtttttctatgcagtcatccatctcacttccagtttaaagtgacctccaagtcttgctcccaaccccaaagatacaaaatttattcttggaaatccagtactcaagatacgccagccagcggtatccttacctctgagactctcccaggtggagatttcccccctccatataaacacgtgggtttcatttttgcctgtgtgcgtcttccctgcttgccataacacctcacaaccagggccacagatgggataaccattcttttatttatgttttgtttttgttgttgttgttgttgttgttgttgttgttgttgttgttgttgtttgagatggagtcttgctctgtcacccaggctggagtacagtggctcagtcttggctcactgcagcctccgcttcccgggttcaaacaattctcctgcttcagcctcccgagtagctgggattataggcacctgccaccatgcctgcctaatttttgtatttttagtagagacagggttttgccatattggccaggctgctcttgaactccttacctcaggtgatccgcccgccttggcctcccaaagtgctgggattacaggcatgagcccccgcgcctggccagggtaaccattcttgatcaaactagaacacaaacctttggggagcctggtatatccagcctttccccccgcacccagtcactattcccgcatttaagaaaaacctacctttccagggtctggtggctgggcttctctgcctgttgaaccagccacattgtgtttagacaatctggccattcaggggtcctcctgttgtagccaagacaaactcaagattttgggaagagcagcaaattgccacaaccagggaatagctagtatttgaatagtgcatgtcagggtttgctgcgtggggtttttgttgttgtttttaaattgactcttggttacctccctctacacagacagctacagacagttcttctaattcctctcagaagagagagcaacctactcggacaatctcctctcccacatcctgtgagcaccggaggatttataccctgggccacctccacgactcataccccacagaccactatcacctcgatcaggtgagcagcagccctgttcctctgagggcatcagggtggtgcctctgattctggaatggcctctttcccctcc

SEQ ID NO: 23579 - DNA, 2300 bp, Homo sapien
aagcaacctttgtattatttcctacaggtggaaatgagaggtgccatgttcattctatcctaaagtatctcttagaggactttgctgtggagaaagtgtagtgccttggagtttggctgggtcagattccagccctgctctctattgcagtgtcgactcaagcatagtaactaaggtttcatgagcctcattacgctcatctataaaatggaaacatgattacacttcagggttgtcataggagggaaggtcataggagttacacagatgaggggactcaacagagcaagtgttccacctctcccaggctctgagaatgacaccagaatctatctttttgccacaagaaagtaggcagaggctcatcgttgctcgtcagagtatgccacctgccacaggaaaatggccccagtctctttgtgaggagaggcttgccctcctaagagaattctccttcctctttgcttgaataagaccagctgttagggccccagtactcagcagctatgacaaatttcactgcttaagacccctcagcctcttaaaacaggagtttttctgtagctaacataagctgctctcagcaagatgcacattagcacttaatgctcaggtgggtgagggggaacactcaatggaacacttggtgtatccactgcaatcctgatattggtaaaaagtcacttctcatctggctttaaagtaggtccagcttctcattttaacctgtttgccaagtccctagtttttactatagctctcgtgtcatctttgattgcaccggtaatgtagggatgctcagcctggaccccagacttggaggccctagagagacagataatcaggccaagggggtcccaggaaaggcttgagcagagagcatccagctgcccctgtcctttctcattcgcttacccttgatatcttcctgaactggtatgttaggttctcagagtactaactctcaaacttcactgtacattagaattactggggaactttttaaaatccagaaattcaggctgtaccccaaacaattaaattaggcatgaattaaaacaacaaaagtaacccctccaggtgattccagtgtgcagccacatttgagaaccaatgtgttagttgatggaatgaaaaatcgagtgcagttacttactgggttgacttttgtgcggtcaccaactcttatcatctgaggatcacacaggacacaatgtcacccctatggggccacactgcctgttctggtcactagtgaggtctcagtggcatatagccattttaacagctctttttcctttttaccgtgaaacattgacagagatagagtagtatatgcccccaccccatgtactcatcacccagctgtcattcatgtctcctccgccccacacacacactttttcttgtatggagggggtggactgcagtattttaaagcaaatccctgacatataatttcatctataaatacttcagtatgtatttctgagagataaggactttaaaacaagaaccgcaataccatgatcacacctaagaaaattaacagtagttctttaatctcatctaataccaaatccatgttctattttctccaatttgtctgaaaaatacctttatacatttggtttattccaattaaagcccaaacaagtgttactcacttttagtagtttgactttaaccccagggtaattaaactgtcattgtgtacacaggtaacgatgcatatgcacttctgaaaagaggtgtcaatggaatttggctcagctgatgtttactggatgggctctctcctccttccttccttagcccttctggtgggatcttgacatgttacagaggaaatgctaattgaagccccagccacaaccacttctgtgctctgcttctgcctgaaggcatgttccctttggtaaacttagaatagaaccttcaggatgcatgtggaaagagagtatgagtcagctccgtggacagcttagaatttcctgcccctttgctggaggctgtgtctgagaagtgctgggactgcccccgggctcctctttggtctctgctgaggactgccgctttgacagttacctagggagttgcccaggacttgtgttctgatggaaggaccagccaacacccacacagccttcctttccttggtgtgcagatggctctatgcagtcttatctccagctgggcatctgggttcaggtcagacgatgaccaggaaaggagggggtgagtttctgccctctgaggtaacacctaccacctcatcagtcattgctttgccacagtgt

SEQ ID NO: 23580 - DNA, 2300 bp, Homo sapien
acactgcagcctcctcctcctgggttcaaacaattctcctgcctcggcctactgagtagctgggattatgggtgcccaccaccacacccaactaatttttatatttttagtagagacagggttttgccatgttggccaggctggtctcaaacgcctgacctcaggtgatccgcccacctcagcctcccaaagtgctgggattacaggcatgagccactgcgcccagcctgaggcaaatatttaatctcttaacctgttcagtggttgctatttagttaacatcgtatctggattgtcccatggacattcaagaggatggaaaagtctactgtgtttggagagcagcaagggatagggactatgtctcttgtttctttttctttctttctttcttcttctttttttttttttttgagatggagttttgctcttgttgcccaggctggggtgcagtggcacaatcttggctcaccgccaccttcacctcctggggtcaagcgattctcctgcctcagctcccgagtagctgggattacaggcacgcgccaccacgcccggctaattctgtatttttagtacagacgatgtttcaccatgttggtcaggctggtctcgaactcccgacctcaggtgatctgcccgcctcggccttccaaagtgctgggattacaggcgtgtgccaccgcgcccggccggggctgcttcttaacgcgagaaattccataatttctacggaaatgcaaacgtttctgggctgtgctgggttgacctttttctttgcatgagtaatgattcttaaaaacatccgttccttggccgggtgcggtggcccatgcctataatcccagcactttgggatgccgaggcaggcggatcacgaggtcaagaaatcgagaccatcctggccaacatgatgaaaccccctccctactaaaaatacaaaaattagctgggcgtggtggcgcgcgcctgtagtcgcagctactcgggaggctgaggcaggagaatcacttgaacccaggaggtggaggttgcagtgagcctagatcgcgccactgcactccagcctgaggacagagcgagactccatctcaaaacaaaacaaaacaaaaatccattcctctattgagacaaaaaagaaaaaaaatcacaagattcacgtgaaacggaaaagcctctgcctttcagaaccttggcaaagtcgaaccccctcccctctctggttgggttgggctggagaagccagcccctggcacctgcgccgcccctaccttcccaccccgcggtgggggtagttgtgcctctgagcctgagcacctcttcagctgttttactccctcccctcccttgagtttcccatctctgcccccgcccaaccccccgatttttaatcttggtgtttggaaggagggagggggcaaaaacgggagccagatgtgtacgagtcctccgctcccgcctcctccctcctctcgggcttcctaaaacccggagccctaatcaaggaggattcggagccagacggtcgcggcgcaagcaaacaactcggctccgcggctcccccgggagtggaagccaggagggagggggagaggaagcggggcgtgctcagtaggcgggacaaagtttttttttttttcttctccctttttttcggtcgcaagtaggaagctttttgcactccaccacctctggccgctgggaagacgtcatcgcttccgccctacttcctcctcctgttggcggcggtgagaatccaatatggagtaaatcggtggagtcgagagatggggctcggacggggcgccctgcaccgcctcccaggcgcacctcccccggccgccgaccgctccccggaaccgtgattggcccggccccccgggggcgaccccggactgagcccccccacccgcggccggcgctctcctcctcctcgcagcagtccctgccgctccgaggcgcgcttgtttttctcctgctctcccccaccgccgtccccttcccaaatctcgccccctctgcccgctcccgagcccccggagcctccgcccgcctctccccacggcgctgcggcgttcactccccgcgcagcctgcctttgcaccccttcccccaaaccctatcccgcgccctgcttccccttctgctgcggcgccctcttcatctctagccgccccccctccccaaatcaggcgatctccggagatgtgaagaaggggggcgagcggacaggaagatgaagggagcaaagctgcccgccgcgggacaggcgtctaggtgaacaagaaaatgaccgaaga

SEQ ID NO: 23581 - DNA, 2300 bp, Homo sapien
aataacaaggccaagcttgtctttatcagtttttgaggccattgagagttcctgagaaagtactaagcaaaggcaagatctcattgtcttccaaatcctcagatggctaaggaatctacccaagtctcacctttggccatggttgctcttctccctgggagtgctgaaagagatcccaccctgttattcctgaacttcccagaacacaggcacttacccatgtcaaaattatccaccctgtgggcatctcttgggctccaccctccagtttcaaggtacacaaatggcaaggtggcaggtgaggtgattaatttctgcaggtaggccagctctatgagcaggttaaattggtgtcatcaccactcactcagccagctctctgcttaatagcagcgaacgactggcccagcctatggaccaggttgccaggggaacaatgataaatattctgaggtccagaagtccccaagtccccactgggatcacctggtaccatactccagctgggctatctcaggcaggcccttaggtccactgagccttgggttcagtgtctgttgggtcggaatagtacccacaacatagggttgctgggaatcttaaatgggctatacagattcctgatagccctttcctctctctggccagctggtttaccaaatgcccccctccactctgtccttcatgttcctttaaatgaagcctgccagttctcttctgtcttgttcaacacccaaaaggggccttttgatggaaacattactagcaggtcacttcttggtcctccccatcaattactgtggttgaggcaagtctgactcctgcagctccatagaataaatgaggacattgggcgaataactcagatatgtctgttgatctgaacatcaaggtgttatcaaagtccattggattgttgctggaataggggatatcacagatttagggctttaattgatgtcactgctgaaagagctaaggacccacatccctgtctctccccacaaccggcagaacagggggctgcgggaatctctgaacacgatcaaatcaatagtgctcagtcagagtaggatcgtaaagcttcaaaagtaatatcgatctgctcacaacttcacgcaaacccagcggggcccccagcaggtcccccacctacaggcttctcagttccgagtcctgggcgagggagcacccccaccccggcccttcccgcgggctgcccggaaagtccggagcgcggagccggagcgaccctccgcggccggggacgggcatgctcagtagccccgcaggtcctgtttcactgggaagccgtccgcggcccccacccctcccgcctggctcgggcgccaggagaagcggacattttagcctcctctgcaatccgctctctcgttcgtgtccttctcccccctctcgtccggtagggccggcagtgtagatttccccaggggcgggggtgggatctgagcaatcactcgccctcccccctcccaggggcggggagggggtgatttagggaggactccacggggcccaaaggttcgcaccgccccgccgcggcccagcctgcagaagccccccgctgccgcggcgcccccgctccccgccccgcgaggcgcgcgcagctgcgcccgggcctgtcctcgcttcacccccactctgccccttcggtatttctcaatgaccggcgctccgaggacacttccgacgcggagggagggggtgtcattagcgctcggttatcagttccttccggtctccccgagctcaaccctgcgcgcggccgggccgcgcctcgggcgatctggtgcctttattatgatgtttaagtaagcagtcgtgtgtgccaagtgagtttgtagcccagctgtctcccccaagccccgctggcaggaatggaaacccaagctctctcgtaatgcaggggatgatgcaaacttagaaactgacccggcgcccgggaatgaggcccccccgccccgggcgtgcggcggcccagtcggggcatgaatggctggagcccgattgcataatccgcgcggtataaatagccggcgggcgggccgctgacgcgctcggttgtgccgttatcgtgcaatgcttcatccccggtgccgttcaatcccaggtcgttttccctttcagctgcaatgccgggattttaaatagcagagatgaaaggcccctgcccccgcctccctcctcccctgagttcatgtattatgaatgaaacggcagcctcgctgcttcctgaggtgctccacttcaggtaggagagagactcaatgtcaaggcag

SEQ ID NO: 23582 - DNA, 2300 bp, Homo sapien
ccgtcagcctcccaaatagctgggacttcaggcataccaccacactgagctaattttttttagagagatggggtcttgctatgttacccaggctggtctcaaactccagggctcaagcaatcctcccgccttggcctcccaaagtgctgggatggcagggataagccactaatttttacctctttaaagaggctctaatcccagcctcacttttgcccctttaaagaccctatatccaattacagtcatattctgagatactgagggttacggcctcaacctatgaatcttggggaggcttacaattcaatccataactatatgtgtatataaaggtaggcctgcatatagtatactgtgcacagataactgagcatctttgccctaattgcctcaaggtttttttttttataaaaccttggtgtgatacatgtggctgtgcttctaatcgaatttttacatattcttaatagaaatgatgagtgtgtgtaaattataatctagaattcgtataaagaataacacacacatacacacacggcattagaataacttccctcaaaggaacagctcctccttaattccgaacattttaagacatccagaatcactttccctaagcaattatgattttacaaaatgctgtcaagaccatcacaaagttttactgcccagacggagctaaatgcctgaagctttcagcagtgatttattatttactctggaggtaagttgctaagcaagatttattcagtaagaacagagctacccgtaacagtacaatacgaattttactgtcgggggggcggatttttttttaaccattcctcaagagaatttgttctttataatcagaaaaaaatacatctacatgtaagttttcatccctttgtgaaatcaagggcgctgttatgcatttgacaaaccagtttggtttcaaacattctttttttttttttttttttagatggagtctcgctctgtcgcccaggctggagtgcagtggcgcgatctcagctcactgcaagctccgcctcccaggttcacgccattctcctgcctcagcctcccgagtagctgggactacaggcgcccgccaccacgcccggctaattttttgtatttttagtagagacggggtttcaccgtgttagccaggatggtctcgatctcctgacctcgtgatccacccgcctcctgacctcatgatccacccgcctcggcctcccaaagtgctgtgattacaggcgtgagccaccgaacccggctggtttcaaacattcttatttgaattttagatctgagaaattttcagtaaattatcataataaaaacagtagaacaatttcaaagtccattgatagaatctgtcgggtatctgctttacctacacagggcttttattttcttgggattggcttctttacactacagtagcctaactctcacactcataccatctcagagagacttgggattcttaagaaaaataaaacactaataatgcagatttgccaactttagttttcagaccaaacaagtactagagaccgattgctggcctacttccgccccctagtgacgataacgtatttttgctttttgcaaaagggaggctggggagctcggaccagcgattaaagtgactgccccgtcctgtacccacttcaacgacctgttccccaagatacctcaggccctctagctacccgttcaccagatacaaacaagggatatgataaattcattcacatttcggtggtttcaatttcaagaaatttgcttctccccagacggcgtgcatttgcacaaaaacattgaagcaagaaagtaatgttgtgtaactcaaaaaagtaagtcacaggctgggcgcggtggctcacgcctgtaatcccagcactttgggaggccgaggcgggtggatcacgaggtcaagagatcgagaccatcctggccaacatggtgaaaccccgtctctactaaaaatacaaaaagtagctgggcgtggtgccgcgtgcctgtagtcccagctactcaggaggctgaggcaggataatcgcttgaatccgggaggtggaggttgcagtgagccgagatcgcgccactgcactccagcctggcgacagagcaagactgcgtctcaaaaaaaaaaaaaaaaaaaaggtaagtcacaaatggtggaaatttaggcttaaagagaaggtcttttccctggatgtttgagttttttggcttttaggtttttttgggggggggcggttggttttgcttgggggagaatttttgcttgtttttttgga

SEQ ID NO: 23583 - DNA, 2300 bp, Homo sapien
tcctgacaattcgaggctcatggccagattggacccagcacacaagcttgcctatctcctctgctgtcccttcctctgaagattagaaccagccagtgccaggtgtgccaaccaagatgtgtcctttcttggtgctcttgggagcttcttacaccccaggctagagggtgcccctttggtcctaggggtgatctggtatctctcttgcttttgggattctgaggggtcctgacctctctggggcaaaatggagatttctaatcatgtgctatctgaatttaacctaaaagtcagtaagccaccaccccagctgtttcttcaatgaatccctagggagacatggaagcaaacaaatttgggctccataactttgactaataaaggtcaaaagtcaactgaaaccagacttacaagaaagtgcttcatcataggggtgagattcaggacttccatgacaaactgttaggggctctacaaaaaccatgaaacaagagcttgtcctgggaacacaggttatacataaataacccattatatattatgaaacagaaagttcttcaggtaaacagacggaagccagtacggttggcacagtgtctttgtccatcgcttggtatggcaggatttatagcgattccatccttgagcatggagtgataatggagcccatgataaatatgcaaggcacagtgctaagtgccttaggtatattttcccatttaatcctcgtaacaaccttatgaagtaggtactattacaactctattatgcagaaaacactttgctcagagaggttaagtcatgtgtgcaggcttggctggatggaaggtggaggagcctccagagctcatattcttactgttctcccctttagaggttctttgctactactgtgggggtggaggggatgttccaaggtgttgagcctcatggattttcctactacaggttaatggatgtgagaataaaatcctccctttcatttagattaactgtgccaacaaattaattgggagaccacgaggctgagagactccaactcttaaaatgtgctaggtgaaatgaacaactccttcttgacttcactgtagttgctttaaatagcaatgttgaatcttcacgtgggactttgagtcatggctttggaccaacttcctcttgaaagtaagttgagaaatctacaattcctagatagatgaacaaactaaatatcccctgtactctgacaaacaaacaatcatttacaaaaccaacaaaactgcagtagggttttctcattttgtaggggaatattttaaggactgtttctctacttaccttgaaaattatgggcatgttcacctgggatttgggcaacaaggtcctcagcggcaccatcgctgaatgaccagacttgatggcagggcagtttgaaaggtgatgcaggaaacagcacagtagcgtggaaaatctggctctggctgtgacaccaatccatcccatgacttgaactagcccccatcaccttccctcagcttgcttcactggcttgggatgggaagaagaacacctgccctcccaccttgctgatcataggcgttcctggagaacatgtcaaataatgaaggtccacatgcaacttgtatattgtgtgactcattttgctcattgtaaatacttgactcacactttctagatgccaggtactgtgctttattttaactcatttaattcttacaacagtcccacaaggagagattacttttatctggattttgcagatgagaagatgaaggcacataggaagcaatttgctcagggtcacttacaaatagcacattgtgtgatattgtaatacaatgagaaatatatttttagtctttgtctctagttcctgaaagagagctcctgaaactcttgtgctttcctgagtgataggggtgaaaggagcatcttttgttattcatgataagccattttcaaacatacctgagttatataatgctaataatgctaataaggtaactcttggtgagcctcaagataatctcggaatgggggctggttgctagaggaaccaatcacttgattagagaattggaattttcagtccctcaccctgacttctggagagggagagggatggagattgaattcaatcaccaatggccaatgatttaatcaaccatgcctgtgtcatggaacacaggaaacctaaacaacataaaaatccttaacaacagggtttggtgagcttctggattggtgaacacattgaggtggtagaaggctagagttcaggagatgacatgggaagacat

SEQ ID NO: 23584 - DNA, 2300 bp, Homo sapien
ttctaataactgctgtagtcctctatctgacctccttcaaagtgtattcagttttgacgtatcttttttcttccggtggtagtgagggttctaatatttctgaataaagaggtaatatgtttgtgcagcctgaaggaggccagaactacagcttaactgttgtgagaccctgtggacttcagatttcagaatcttgccttgtggaagatcatggttcagtttgaggactctgatgtttttattttattaggtattccaaatgcactactgtttttttcccctagagaatattaaattgtgtccatattgtatttttataaattgtaaaattacttctgtagccacatcattcatttatatcattaatatgtgacttacagttgagttagtgcctccttgacaacagtgattattggcgtgcctctcaacatccagcagaatgtgggaatgtaagttactcagcacaaatcttttgattttatttgtttttattaatttaaaaaattacaacaacctgcgttcagtgtggaacaaataaaataatgccaaaatgccaacaaaaagaaagataaaacctcctataatcacaccactctgtgatagttatataaaagcaatatctgtagagttttgtttataaaaggctgtgattcaagaattttatacccagccaggttgtcttttatgtgtgaaagtgacagaaatatattctctgtagaccacgtttcaaaaaaattatatgataggcaattttcctgggcaagatttaacatgaatctctgttgaaaaaatgcttgaagataaattccaggtgaccaaggatgatagatgctagagtgaaggattaaaataggaaagctagagtataaaaaaggttgggagtaaacactgaagccagttaatgtatatttatttatatatctagataattataaatattagagactatatataaatgctttaatttctctttattaaaataaaagcaaatataaaaatatcacctagaagataatatagtacaataataattatgtggtaatctgaatctatacctccagctagcatcatcaaaatctaagatggaagctctgggaatgggtagggtgaaggaatgggtggaaacagtatgagtggaaatgagggctgggatggatttcaaggcatctgacttggactactaatcatttgaaactggggtttgtttatgccctgaaaatgaaatgttattagtcaagtgaggatgattattattttaggtaatgctattccttaaaatatttagctaagtgacttcatggcttttaggcaattacataatttctgcattttgtttgtttttgagcctggttgtctctgagttcctgttttggtgctaatcttcagtgtgtgtttctgaaagtaaccatgatgacaggaagcatatttttctgtatgcctatgactggtgtctgactaccctactggtactagagattaaaagacactttcctgtaattaatattttcccctgtgttttgtctgaaagtcgttaagttgaagctggaattatagatgtgtgtacatctctctttaaggaaacacacaaaacaaatgggaatttaccaaatgatatcattctccactgactggatttatatatgacacttcttgaatgtacttttctcataatgtgggggcacacctgcattggaaatagcttctttgagaaatgttagatgttgcaatttggtaatatcttaagtgtgaatttgtgtgtgtgtgtgggggcaggggggaagggaggataaggaaggattcacagtgttcagaagaggactgatgaggctccctccatgagcaggctagtagcgcaaagcctaatcaacacttctgtgaggaagttagcagccttccttctgacctgactgcttccgcttctggtggtggcagcgctgtcaagcctcattactggaaagttcatcttgttaaatttccacttagagcaggggatgtgttagaagatagctcagactctgtggccattatgacatcaaactcagacagtgacattccaagtggtagtcaaggagttttgtttctagcttcattgaaaaatgtgaacattggctgggcacggtggctcacacctgtaatcccagcactttgggaggccgaggtggctggatcatttgaggtcaggagtttgagaccagcctggccaacatggtaaaaccctgtttccactaaaaataacaaaaacaatttagctgggcatggtggtacatgcctgtatcccagctacttgggaggctgaggca

SEQ ID NO: 23585 - DNA, 2300 bp, Homo sapien
gccataatgaaacatctaataaatactttcaaattcaaaaaaccacagacaagaaagccagaagggcatgaattctttttactttgttgattgatgtatttgtgcttccttctctccttccagagtttaatgttcactattcgtgagaataaattcaacacctaaaattaataacgaatttcagacatatttgatgttaatgtataagcccaagaagactgaaaaactccacagtagccaagaagtgcaagttagcaaagaagaaagagaaaaactgatttcaactatagaatgatattcatgtttcacatcgaataaaatatcatgaaaaaatgatatgaaaacttaaaaagataactagtcttgtcaaatagaaatgggtggtgtgtgtgtgtgtgtgtgtgtgtgttttaaatttaaaaatgaaattcaaggctcctttgcttaatgaagctagttctttcatcttttaaaatgacaggtaaagtaaaagctgaagtttggggggaaagggagatttaagggcctcccttcagacattaataaacactattccacattctaaaactattagacataatttggcataattgccaatctttcctgagcaaatgcatacaactcagttgttttacctactaacctctttccacaaagagaatgatcaccccaattggggatccaaggtttatgctttcagagaggcattttgaagaaatatattcttgatcctgtatattaaaacagaaattttattttctcaaactcaccataaggagtggaacagagacacatatttgttgacaccaaaagatattttctaagatgcttgtatagaagaaaatttatgtaaggagaatgaagccatttatttttatttcctttcagccaaattccactttaagtttgtcgaattcagaaattgtatagaccttaaaaatattttactctgttaacatatgctttcttatggtgatttcctgtccagcttgtctcatctgtccaatttaaatcttaacccctcaaggcagatactgtgtattttacagtgttttcttcagagcagtattatgctgacaagttcagtaaatcttaaacagcaatagatcttcctttgtcattcttctgctaacttttagtttgtctggctccctaatttcaatgcttgtagatcagtgtcctttaactgaactattgtagtagtaggaattttctaaattttgattattcacttgggatctattccttagaatatagcaagaggaaagaagaaagaaaaagatccaggaaccggggagggagggaaagggtcatattgattacagtgaaacgaaagatagtctttctttcttatttgggtaggatatagcttttcaaagaccaccaatgcttcttaacaacggataggatattttactattcctactatattttaaacctgttcatttcctaccttctcaccctatttgtcaaaaatacatataataatcagtaagttaagaattcaccattgatgtcaattcacagaaatgtttgctggatttttttttttcttttttgagatgaagtctcactctgtcacccaggctggagtgaagtggcatgatctcagctcactgcaacctccgtctcccgggttcaagtgattctcctgcctcagcctccctagtagctgggattaaaggcacgcatcaccacacccagctaattttttttttttttgtattttttttagtagaaaccaggtttcaccgtgttagccagagtggtctcgatcttctgacctcgtgatccaccagccttgccctcccaaagtgctgggaggagtatttttaaagttgttttacctttgtacatactgaaaagcatcacaattaatgagaaaaataaatgcagaaaatccttctatattagaaggctctcctgggtcatgcaaacttgttaacagatatttcttcgggataacttgagaaccttcacagtagacgatgctagtgctgtgctgactatagtgtttacaatgaatcattgaataaattgttaccatccacggaggctgcctctctggataattagcaatttcaatttaaggaagatactataaagtacacttcagcttcgacatcagtagaccaaacactggggtaagtagttacattagactgctttaaatactacctagaacttttatttttaatcatatactcttataaatttctatctaaaacattatatataatcctttagagcatgtagtaaaaatttgagatcttataacacagcaatgaaattacactata

SEQ ID NO: 23586 - DNA, 2300 bp, Homo sapien
ccctacctacacccccttgagggtgagggttcagtccgcagctggcgagtgggacgtgggtgggggcgatggaggcgcgggcgggctgcttggagggagtcagccttttggccaccttcagggcgggaatagggactggcagttcgcattccccgcagatcgaagctccctgctgatcgattatttgataattgattttccccgcagccaatgcgcggcggcctgggcgggggcgcctcctgattggccgagcactcctccacggctgcctaccgagatttgggtgagctcattttccagtcgaccgcagggggagttttctgcgaggtttcagctggagggagggggaaaaatcctctcggagccgagcgagctgcgagccctgcttgtggatgtgaggtttccagccactggtagagctgctgcggctgagccatctcggcagatcagagcccagcggacagaaatataaatacgaaaataacgccactaaatataatcacaagggagaagcttagagcgggagaataaagagaaggggtgagggggaattaaagcccaggcaataggtgttaaagttaaaaacaaaacaaaacaaaaaacagtggttggttggagcctccgagttgtaggtacaggcagcttttgtctgaaatctcagcttccgaagcggatttctttttctctggcactgggaggtttcgccgagccgggttggggacgggaaagaggagcgcggggaaggatgtctggggtggtgagggcagggcttcgctggagaaagagctagtggggcgcgaggttcttacaggcccgggagaggtcgaggctggagcccctcggcgcctctaagacaaaggcagcggtggctgcagccggagcctagcactccggcagcgtcgcgccgcgccgcgccgcgccctgggcgcacggccgcctcaccccgagcgggtcggagaaagagcctccctcccagcggctccccggccccggctccgcccgcgaggtctgggctgctgcgagcccgcgccgggtttcgctttccgacgatcataaatagcttggtgtttgtaaacaggcgctgggggcacattccccgcgctcagctcattgttccctcccttcctctctacttcgcgcaggacgcctgggctggggctgggagccgccggggctaggaggtgggggagtccagacccgaagtgacaaaatgctagcattttctttcccccggccgggcgtccacctctaacagcaaagaaacctctaagctgggtctgcagaaagcccgagccacctcaaccccatgttctcaggactccttagcagaggctttcccaacctggcttctccctccttttcctccacgatcccgctttgacttttctccttgcagtgtttagttctgagaattcagtactttgcgcatcaccccctgccccgaaaaacactggcagaccccaataatttcgaggaaagtcatgaagtctatgcgcggagccctgtgcaaaataactcccgctgctgcctgcccggcgttgattcccaatttatttcaagagagtcggctttggggagagagtctgcagggggagggagagaaaagaatactgaaaataaagctggcggccgcgggctactgcctgcgtttgtgtgcgtgtgccctgggtgtgtggtgtttgtgcctgggcgtgcgatttaatggagcgcctctctgcctctccagtgcggccagagctcgcttcgcgcacccacccctgccgaggagcctacttgctgcagcccaatgcattgtgtaagacgcgacctgttatggccaccactacttccgggttctagcattctggtcggaatccacctctccgcctgtgcaacacacactttacacacgcacggggactgcaagcgggcagcatcgatcgtggctcctttaagacaaactcagacagacattttttttaaccctccttctctaatctccttccagtgcagcacttgcaaagagggagagagagggagagaaagaaagagagagagagaagagagaaactgattaggaattaggactgattcaagggaagcgagcgctagggctttgtgcatttgaatattaacatttgaggtgttctgaccagaagaagacagagcggatgatcattcattcaccacgttgacaacctcgcctgtgattgacagctggagtggcagaaagccatgagatttggtagttgggtctgaggggcgctcttttttttccttttctttctttctttctttttttttttttaaactgatttttg

SEQ ID NO: 23587 - DNA, 2300 bp, Homo sapien
taagaggaaagtcagagttctctggattggaggtacatctttggtgacttttcattcacatttcatggataatttggggaggtggcctgccatccctgaagccctacatccccatacacactctgtgcacatccagtgccctgctccaccatggcagtgcccgcaagggggtcccagatgagaagaagctggctaaagggcccttgtcccctctcagactccttcagcgggctggagtcctccctcgctcgatttcgcccgagagcgttaggggtttctaaatgcaggcgcctttgtgttgtaacgaaacttttagtttaagggaaaatctcttttaagccactgattgttctgacttgctgagtttactcagcagccttatgctggctctgccactgcacaataaaaccaaagcaggacagttgcaggtcaagcaagggggaacatgttttgcatttagggagtttgaccactgaagtcaaggagaggagcttgctctgaattgttacacacattaagaaacttctagatgttttagcactttgtgctcaaaggcgaaacctgcaggatttagaaataagtaaattcggggtgctcttcctcggaggttgttttctggctgcggtttatactgctttctcctccgccattcgattagaccctgggctagtagaatcctttgaaactcacttgtgcctactgtgtgccgatgaatttgggaacctctttttactttgcagaaacttttatttctatttatttatttttaaaaaatcaggacacactgaccctccctcgctggaaaaaaaaatatatataatctttttattttattttctgatcccttgtgcgatgggcttgtttaattcccaccgttctgtccgcagagttaactacaagtggtttaggctctgggacagaacatttggggaagctttgtaaaggaccccaaactgttaaattcccagctgagctgtgagagctaataaaagacttgagatacctccttgggcattagaagaagcttttctttctttcttcttcttcttcttttttttttttttttcttttttatgggctgagacaagcgacatctaggcccctcgcaatactagctgctttgccacttcgcagagacaaaatgaaaggctctactgcaggaacatttgaaggaactttctttggggggcggtgggggctatcagcgaagggaggggaatgtgcgtggagctgaggaggagcctcccggctctccgagggccttggggttgggatccctaggtgcagcccgttgacagtcggccccacggccatggacgtcctttccccaagttagctgagcgcctgccaccgagatcccccgagcctgggcttcgcgcggccgcctaggaggaacccgcaggaaccagccctccccaactctccgcccggcgcctttctcctccaccggatcctggatgtgcagtggaggggacgagggcttgtcgggtgggaaacttaattcaaaatggctgctggaaacgcttgggttttattcgtagcaaatgttgccaatttctccggccagatacgctaaaccgatcctcagataccgtccatggctcagggcctccgacttcagggctccaggaggaaggggaggtgagcggtcacctgggtctgggggagggggaggaaaaggaaaaaagtagatgacacaatcggagagggggtctgttcctcttgctcctccagctgtttttcttgggcacctttttccattgactggggactaaccattatgttgtttgtgactgttgtattttcttgcagacaccccctcttccctctcttagcactgatttttgagaaatgtgaattagctacttgtaccccccgcgagccgggggtggcgggcggggacgtctgctcgtcagagtcattcaatgaagatatagccgtgttcgccaaacaggtcagcaaaatagatgttaaaaagtaaaagaaacaaaaagagagcccccccttcgccaacacacacgcgcgcgcgcgcgcgcgaacacacacacacacacacacacacggcacactttcaaaagtagccagcacgtagtcggccttaagccatgcatgttacctccaacctcagattttctctctgtctgagtgtctgtttgcagataacttaaaatcacccatctgcatccccactcaccctccagaaagcaaacgtggagagctcactctgcagaataaaatcaagaacaccacggttgtagctgctgtggactcggcggtctgagcagcctccccgagagccg

SEQ ID NO: 23588 - DNA, 2300 bp, Homo sapien
tccactggggttaactgtggatactttcccacactggaaaccaaactgaatcctgacttggaaggtttagccaatgttttatctgcataaagacatattcttctgctgggatgggaaggggggcagtgaggtgttgggactggggcacatcatacagttactcaacctgctccttccttcaccattccccaatatatataaggatctctccttatcccaacatctacatccaagtgaactaaggttaaagtgaaaataaaagttaagcttgaatgaacagatgctctaaatcagagcttgtgtgtgtgttgggggctggggaatgggtaggagggagatgcagttaagtaaggaagaatgaacctttacctttgtgcacacttctctctctctctctgtgtgtgtgtgtgtgtgtgtgtgtgtgtgtgtgtgtacaggagaccattgcattcatatgaatagcaagatctttcatgctccagctgttgaatcacatcattctctgcttctatggtcttcaagagttgcaacctggccaccattgattagctcaggctataaaaagattctcttcagtgattgtactgttgtgcctatgtggtgtgctttttaggtacagtagacagacagttaaatggatgtggcctgcctccttgagattcgtgcactagaactagcaccaacattgcagtcagaccttctaaaaatctacaagcaactgcacaccttagaaccctgcccttaccactctaaggaagaagcttgaacacactgtgccgtaactgtagcactctcaggcatatagcccactgggggaaatgttgatgactccgatcatttcagttcttctccaagggttcctgggatctctcccaagcactctcaaagacctcttcagaattcccttagctgcttcctggggctttcctctcctctcttctcattactcctgacctccgccactgcctgatgctagtggctgcagctacattcccatttttctctcatgacctcagccatgctggtataatctcaccgggtctgctcccacagctgctgcgtgaaggtgaggagagaattctcttcccactggctttattctttattgttaaagcacaaatgagagagccatgtgctttcagactcttccagcactcctttaattgtttctatctttcagctttttgtgctttcctcctcttcttggggttaatcacaaatgctgaagaggtgcattgggacagaattcaagggtcaaggccagggttacagctgtggccattatcagccctcttatttgagcctcccactagggtccaatggcctccaccttcccaccagacagggtgtccagggagtgcttatacggtttgcaggactcttccctgggagtagccataagctcaaagagccttttcaaaaagttctttgtcctctgacatgctcagttttcaatgatcttatagtttaagctgatgttcttgcattctttcaatgtaaatactccttacagatgttccatgttattgttgagggttcactgtgattaagagacagtcagccctgcataaagttacagtacaaattaattatttatgttggtaaataataaatgtttattcacattaactttaaaaaatggggtattgtcgtaactttaaagtgtttacaaagaccaactgtctaaaatatcaaaaaaaaaagaataaagtcaacgagcagccttttaagttcttaggagactctccataatcctcttaaaaacttaaacaggtactcaagacccacagccatttggtgctgggttcttctgcctcttgaattatctcagcaagatgagctcttgctcaccttggctgaactgtgttcacccaaaattaatatgttgaagctttaacccttaatgtaactgtatttggaggtaggacctttaagaggtagttaaggttaaatgcagccatgagggtgggatcccgagccaatagaattagtctcttataagaaacaccagaggagacttcctctccccccccctcccctcccctcccctcttcccatctccctctccttctctctctgctctgagagccacagaggaaaggccatgtgaggtctcagcaagaaggccatagtctacaaaccagaaaggcagcccttaccagagaccaaccctgccagaccttgatcatggactcctagcctccagaactgtgagaaaattaatttctgttgtttaagtctatggtatttcattttggtagctcgaggagatgaatacaagcccatcagtatgtatctag

SEQ ID NO: 23589 - DNA, 2300 bp, Homo sapien
acttcttaaaggcccacctcttcatactattacaatggcaattaaatctcaaaatgagttttggagggggcattcaaaccatagcatttatattccatttttctttattagtttaatgtgtatggatttaagaaaacttttcaagaaaaacggaaaaaggaaatggctcaaagaaaaaaggggttggagtcaccagatagcaagagttagagaagagaaatcactcaatttgctgagcaggcatagagattaaagtactgagtatcatctggaagaacttggtgggaaggctggcatgcttctcccattgagggagggggcagggttacttgaattcagttaagagcttcctaggcttatcagggataggcttatctctttgttcctccctccccccaccctcatcctgccatttcacccaaccttggtaaacaatctgaacatgactattataaggctacacccagacaacagtaattgacaaagggatcattaaggaaaaaataggattagagtgaaggcttttgaaaaagcattaatttgtatcctgcattctcactcactgacaactctgttaactaataagaaaggaaaatctcaagtcagttccttcctacactgtcacccttgtcttttctctcatttgcttaaggtatcaagtagagtcaacttcagctggaaatagtgtagggcttattctaggccacaacatgggagcaaaacaaccagagatttagccaaatcctaatttatttaccccattctgacagagagaaatgtttgtttatttctgaggctgtgctatgatgtgcagttcaagtgctctgacactttaacgcaccatgcaaggttagcagcctgttcaccctttattaatttgttggtgaatatatttggattttcacttcatgccaataaatgcaagaagggatgcagttttgacattgtttctttacccttacactccatgtaaaccaaaagttgtctatctggcagcttagtggctatatgtaaagcccctgtttacttaatctgaaggtccgtttcatttctgcttggtttgcaaaataaatgaaatgaacgagtgtgtcagaattagaattgtgagagtctgaaaaagacatttgggtcactgagtgactaaaagcactctctgtttacatgtttcttcagtttctgtcgctgcagctgtgtcacagcttataacaactaatccctttttatttacattttactttattttgtattaaaggcactattaagccacgtcttccaaatgtgtctgaggtttcataactatcttaatagtgtatacacattacagttatggcagagaacttcctccaagtctgggttttgttaagagtgactttaagaataatagtttataggacaattaaaacgtgttaatctatatttgaaaacttgatctggttaaaaatcggttccccgtccgcttatatttgccagttttctacatcatgtagctggggttttcctgagaggtggaaagagtgggttgtgggaagagatggctggagaaagcctgggagctaagctgattttaggcctttgggctgaggtcctgttaacataacctatgttctgcttcaggggaaaatgacgcacggaaggttggaaatggggtttgagcgagcacacttttcatgctcaacaaagcctaacatcattttactatacgatttgagttatgtgcatgcttttaataaactgatcctcacaaaaaataaatagatttgttctgcttaaactggcatacaaagggctcagaggaaaaaaactctttaacaaacacctcttggggattggaaggtaacttcacactccagcttcacgttgggaacgtgtgataacaatttgacaggaagtaagtggattctgtcccaagccttgggaatagacttgaccctgagcataatgtgtgagtctgaggccaagagcttcccgcccagcagggggtagccaagcgccgatgactgggcaggaattcaaccccataggttcccatctcttcccaccgcccgtcagcaacacagctctccctttctagaaacagggtttcccctccaggcttggattcttaaatctaaaaagagcctctcacctgaggccttcacctgagagctggagcctgtgcgatggattatctggacagggaccccaatgaacaggtggaaaagtacatttatctgcctaaggcttggaatgaaaattgggggtggggtgggtagaggcagattttactcttcttcagattcttttctctgtctcccagtggg

SEQ ID NO: 23590 - DNA, 2300 bp, Homo sapien
ctagatcaaaaactggtttccaaagtggttgtgccaaattatactctcaccagcagtacgtgacagcttccattggtttactgcctcaatacctatattgtcagtctttttaactttagccattctgatatggttttcatttgcattttcctgattaaaaatgaatctgatttttccataagtttgttgataatattttctcttgtgaagatcctgctcaagggtctcatccacttttggttttgacagtcaatcatttccttagtgatttgtatcagttcttcatataacctatatataggcccttaaatatgtcttataaatattttctcccaatttgtgccttgcccttccttctctttaatgttgtttttgaatggacagaagttctcaaattatcaattttgtgtagtcacatttataattatgcctggtgacctttgttttatttcaaatgcgttctgtcatgaagacaatttataccttctaaaatgttattttatcttctacaattaaatttataatgaatatatatgcacctgatttggggataaagtttgaggtaaaggtcatgtttctttctttttctacatgaacatcaaatagaccaagcactatttaatttcaaaagtccttttaccattgctcagaagggtcacctttgtcttaaatcgtgttcatttatatggaagtctgtttctgtgctatcctgtttctttcatctttgtctatcctgacaccatcataacactgtcttaattaccatataagtcttgatacctggtagatatcaaccctcattattcttcgagagatcttcaagagtttattgatatttttggtcccttgcattttcatataaattttagaaaaaacttaccatgttacacacacacagtcacacactgggccttcatatgtatttatgttgaatctataggtcagtttggaaatagctgacattgtaacaatattgagtctcacaacccatgaacatagtgtaaccatttatttaggtcttcgttttctttcaaaaaaaaaattttttttttttttgagacggagtcttgctctgttgcccaggctggagtgcagtggcgcaatctcggctcactgcaacctccacctcccaggttcaagcaattctctgcctcagctcccaagtagctgggattacaggcacccgccaccacgcctggctaatttttgtatgtatgtatgtatgtatgtatttacttattttacacgaagtccccctctgtcgcccaggctggaatgcagatgcgcgatctctgctcactgcaagtgcagtggcgcaatctcggctcattgcaacctccgcctcccaggttcaagcaattctcctgccttggcctccccagtagccgggactacaggcacgcaccaccatgcccggctaattttttgtatttttagtagagacggggtttcaccatgctggtcaggctggtcttgaactcctgacctcgtgatccgcctgcctcggcctcccaaagtgctgagattacaggcttgagccatggcgcccggcctcaaaaatgttttatagttctctttgtaggaaggacaatctttaacttattcctagttacttgctatctcatgcactattataaatagtatctctttaaaacttcaattttatatctgttgctaatctattgaaacacattgatctttgaatattgactttgtatccagcaactcttaaattaatttagtaattttttctactttcttttggatttttctatgcacatagcatctatgaaaaattaactgtatttcctcttcttgagaaattcgaagactctcaataatctgaatttgactaacgtgcaattttcgttgtaaattcaataaaaagttgctagtgtattcaatctttccaactcacaagctcccactctcagtttacgcggacctgactactacccgaacaacccccaccagtctggaggattttgagcctagacactcctccagagcaggctcctgtcccggctgcggaagtgcgcgcgccctcggcaccttaacagttccgcccctctcccggacccagccaatcagcggccgcctcttgcgcgcgccccaccgaccaaaatggcggctgccgttggtgcggggtgcggtttgtagtgctgttgccctactcatccctttgcaaaatgtgaaagaagaagcggctggtggaggcgggccataggcaatgagtcggcgaaggaaacatgatgacagccctagcccgaagaaaacgccgcacaaaacagtggcggcgg

SEQ ID NO: 23591 - DNA, 2300 bp, Homo sapien
cccgaacaacccccaccagtctggaggattttgagcctagacactcctccagagcaggctcctgtcccggctgcggaagtgcgcgcgccctcggcaccttaacagttccgcccctctcccggacccagccaatcagcggccgcctcttgcgcgcgccccaccgaccaaaatggcggctgccgttggtgcggggtgcggtttgtagtgctgttgccctactcatccctttgcaaaatgtgaaagaagaagcggctggtggaggcgggccataggcaatgagtcggcgaaggaaacatgatgacagccctagcccgaagaaaacgccgcacaaaacagtggcggcggaggaatgcggctcggtggtcgagccagggaggaggcggctgagatcggcccgcggttcgtggccctgcggggctagagaggggcctcccgggccagtgcggcagcgagagcagcctccgaccgccgccctgtgcagtaaaagtaaccccgagggtgagacgtcggcagcgcggcctgccttggcttcggcgccgcatccccacatcccagcttgcaacagggaaatctggggtgggggtggagtctggagcgtgtattctgtctctgggattcacccctcgagagtccaaaaataatcctataccactccccgatgggcttttgtccccgaacttcagcactaccccgttaggtttgaccatccatttgcctccgccacaggaataggtaatgtggtttacctgtttgcgggagggcggctgctttccaggctgctcctccagtcagcagcagtggtggagtgagaagaaacagctgataggcccgctaacctcagtttttgcccggagaagttatttctctttaaaccctttttttccctgtgacctgctttagagaagagttcataggaaaagttaaagtttgtctcaaagcctggtagatgtctcacctcattgtgaataaaccggaagttcctgtgtgtaacatccctccaaataagatactaaggatctctttcgtctcgattagttttaggtgttactttttaaaagacttctagtaaatcttagttggaactgaaactcatacaaaagcctttattctggagcatgttcttgaaatagtgcttttttttttttttttttttttataccttacgtgtcttttttcttttgggaaagaatctcgccctgtcgcccaggctgcagtgcagtagcacaatctcggctcactgcaacctccgcctcccgggttcaagcgattctcctgcctcagcctcccaagtagctgggactacaggcgtgtgccacctcgcccggctaattttttgtatttttggtagagacaggggtttcaccgtgttagccaggatggtctcgatttcctgacctcgtgatccacccgcctcggcctcccaaagtgctgggattacagccaccgcgcccggccaccttacatgtctttaataatactcctataaagcaatttgggaatgaacaaaaatctttataaaaatttgaaagtgattctagacaaaaattcccaagcattggatcactaatggtttttgaagaatggcaattaatgtagattagatagagttggtgaaagggggctaaacatatttaggtttctgttgggttactttggatttttgaatgtacctataaattacagatggttccccaaagcctccaagactcaatggtaataaatagaatgacttaggttatacagtattgtattatgcattcataaagcttctggattatctagaagtgtttgctatttacaatgtgaagtttgcgaagtgccgcgtggatttttatgtgaaacaagcatttctgttacggttcaggtaattatctctgggaaaaaaaattatcttggactataaaagttagtctcagctatttgaccttggggtcttacgaagtaaggtaatgctttaaaatgcaacaattgttattttactcatattttatatagaaaggtatgaaacaccaaagagagcgctgaaaatggactcactgtcatcttccttcagttctcctaatgatccagatggacagaatgatatcttttgggatcagaattctccattgacaaagcagttaggtaattaattattaacattttttatgtgagtaaatatttgataaatgattcagatttaactagaattctagtcagataatagcatcgggaacctctgagaatgttatatgattttatctgtataagtatgtgatgtaaacacataatcctctaagctgcactaaataaaattactt

SEQ ID NO: 23592 - DNA, 2300 bp, Homo sapien
tccttgcctttgagtagcctataatctagtagtaaaattattttttaaattgtgtgatatttatgttcattctaggtactataaaatagagtgaaaatggttacttgatttgatttgttggtttggtttgcaattaatgcctaaagctcattctgtaatttttttgtgtgatcaagtgactgaaaggtacagcaaaagtatccaggtctaaaatgccttttttctgtatattatctgggctaaacttttctgttttctctatttttttattcttattcctgtctcattcttagcatcagttctaaccttgctcttatctcttaattcattcctgatcttaattctgagtgttcttaatttaggtcaacatggattgtccaactttagataaagattataataaggataaagaaaatttggagaaacagatgatacagaaagaattccatatgtatctcctctcaattctgatgatttctgccacacagtttctgacactaatgtttttataagtatcttaggacaattaaaatgtcaattttcttttgataaaaacatgcttctgttattaaatgtacatttgataaatttaattcttaaaacaatatttttttaaaataagcaatttgtaattctgaatgttttcattctctgaaacataagtggatcaattattgtagcttattattgctatctcccaacttcctattgtttttgagtttggtaagtgttacctcaccagaatttaggaaattaattcaaaatcattagtttttattgtcttttttctttcttttgtttttttggaagacgggggatgctacactggtactttatacctctttttttccctatctgccaaaggatgaaaaaccaacaacaaattctatgctggacatgtggattggtgaaactgctattccttgtactcccagtgtagcaaaaggaaaatcaagagcaaaaatcagctgcacaaagtaagttaagacttttcagcttttctgaaattcagtgaagcaaatattttttgataatactccattttggttttgtgaatatatcaaaatttttgttaataaaatttccacagttttgatctatcaaattttggagttaaaataattataactgttaaaatcttagagctttaacatcaaaatatgttaaataacagttggatataatgtttcagaacatttttagttattttttaatcttgtttaataggttaaaaacacaaagtcaagaagaagaacttatgaaactggctaaacaatttgataaaaatatggaagagctagatgtgattcaagagcaaaacaagaggaattatgattttacccagatgatttcagaaacagagattttaagtaattataaagataatatacagatgtggtcattacataatatagttcccgaaatagataatgctacaaaaaagccaatcaaaggaaacaccaagatatctgtggcaaataatcaaaatagcagtcagaagccatttgaccaaattgctgaagcagcctttaatgctatttttgatggttctactcagaaatgtagcggacagttaagccaagaactgccagaggctttttggagcaccagtaatactacctttgtaaagacaaatgctttgaaagaggagaaaatcattactaatgaaactctggtcattgaaaaactgtcaaataaaaccccacgatcactttcttctcaagtagatacacccataatgacaaaatcatgtgtgacttcctgtactaaggagccagaaacttctaataagtacattgatgcatttactacaagtgattttgaggatgattgggaaaacttactaggtagtgaaccttttgctatgcaaaatatcgacatgcctgaactctttccttctaaaacagcccatgttactgatcaaaaggaaatttgtacctttaatagtaaaactgttaaaaatacgtcaagagcaaatacaagtccagatgccaggttaggagattcaaaagtattacaagatctttcttcaaagacatatgacagagaattaatagatgcagaatatagattttcaccaaattcaaataaatcaaacaaattatccactggaaataaaatgaaatttgagaactcttccaataaaattgttattcaagacgaaattcaaaattgtatagttacatctaatctgacaaaaataaaggaagatattcttactaactctactgaagcttctgaaaggaagtcagctttgaacacaaggtattctaatgaacagaaaaataagtgcattttaa

SEQ ID NO: 23593 - DNA, 2300 bp, Homo sapien
acaggagtttccatgcagaagctctctttctctctttgcctgctgccctccatctaagacgtgacttgctcttccttgccttccgccatgattgtgaggcctccccaggcaagtgaactgtaagtccattaaataaatctctttcttttgtaaattgcccagtctcaggtatgtctttatcagcagtgtgaaaacggactaatacagttacgttctagctctccttttttgacatccctggggtcttggagaagtgttatatttcaggggtgttgtagagctctaggctttcagggcacgtcttttttaattttaattttttttacatttaaatttatttgttatttttaaaatttcaatagcttttagggtaagagtggtttttagttacatggatgaattatatagtgttaaattctgagattttagtgtagtcaggccacatcatttggtcaagtgtttaaaccagtgactcttgatagagaaagaaaaggaagatctggtgttggtgtttaagaatttgatagtttgtagctacgatgagtgggctgtgctctctgttcctgtcaggctccatcatcactcagggcactgcgtctcagcttcctaggaagagctgatagtttctcgcctggcccttgttgtttggtttggaagggcttttagtttgtctgttactttgtctgtgccctgtaagtgagtgactggccacccaaaatgagagatactaaagggataggaaccagagaatgcagattcaagaccaacctcttcatattaaggaagagtgggctttggggaaagaggagatccaaaaaaatcaaacaagagatgggatgtgtgtggccataatattgtagagatatcagttgtcactcaagccatgtggagagttgagagtcttgtggtaaacacacgaaagttaagctgttcttcacaaaaacttgggtgcttgtagagaagaacacattatctagagtatcgtttgtctcgattttgctactcccagaggggccaacttttgtgctcgaataaagtcactgctgtgtgtttggaagatgtctttacttgccagaatgaatagaacgtcctgaaattgcctggcttcagcatttcaaagtgaactggaacctcagggtccttcataacaaaactgaccttggtcttctggtcttcatgaaatattaatgcttcagtgaatatttctcagtttcttccaccccagatagttcttactcagccatgtgctgacaattttatttgtagttggctcttaaatggaactggaagtacagccttgtctatcaattattgataaattaaccaataacatttcctttgtttccttgccctcaaaatctcagaatcagaacttttgaaatggctccatgttgtttctaaagtctctgggatgatccacattctttgttgttttcatttgccagcgtgcacaggagcaaaccccccacttctcctactttggaaaacgtttcgacataaatgtctggttcttctgaacactctcattccaagcatagaataattattagcttggagaggctttgttcttttttttttttatttaagatgttgggatccctgcctacgtaaatgaagtcaggaaagacactgagatgttaagatgtttgttttcttctttcctgggtgggttctcctaaaagatgtcagcgttcaattgttggctagcaacctgtggcatttaattattcttgacgtttaatccatcatggtgtgaaaaaaaaagaaaatgtagcctgtctactcctcctcctcttccaagagaaacaatagaataattaagatggtaactaaagttctaagaataatgagaaaccacataaagactagcatgatattactcttagaacattaacaggaaacaagttctgaggctatctcctcctactacattttttttctcttcctgtccagataatcatgagtcatcatcctgtataaatgaataatagtttaatttaaataagccaatgttgtttggaggtcgtttatcacttcacagctctcattcacagtcaagtcatgtggaactacacaacttcctttttgtgcattggagctggaaatctcgttgagtttgggaggccttacttctgcatatttgaatctggtgaccaaattaaacattgttctaagtaagtgggtgggtggggatggtgatgggctggggctgaggtggggagacagagagccttgagaggttttaggcttttgcacctgtgatttcagggcatggaagctggatttgggtttgaatagta

SEQ ID NO: 23594 - DNA, 2300 bp, Homo sapien
cgtcacgttcttctcgtgccacgattttcagttccatcagtcatttaaggacttctctacactgtttattctagttagccattcgtctaatcttttttcaaggtttttagcttctttgcaatgggttcaaacatcctcctttagctcggagaagtttgttattaccagtcgtctgaagctttcttctctcaatttgtcaaagtcattctctgtccaggtttgttccattgctggtgaggagctgcattcctttggaggagaagaggcgctctgatttttagaattttcggcttttctgctctgatttatccccatctttgtggttttatctacctttggtctttgatgatggtgacgtacagatgggtttttggtgtggatgtcttttctttttgttagttttccttctaacagtcaggaccctcagctgcaggtctgttggagtttgctgaaggtccactctagaccctgtttgcctgggtgtcaccatcggaggctgcagaacagcaaatattgcagaatggcaaatattgctgcctgatccttcctctggaagcttcatctcagaggggcacccagctgtatgaggtgtcagttggcccctgctgggaggtgtctcccagttaggctactcgggggtcagggacccacttgaggagacagtctgtccgttctcagatctcaaactccgtgctgggagaagcactactctcttcaaagctgtcagacggacatttaagtctgcagaactttctgctgccttttgttcagctatgccttgcccccagaggtggggtctacagaggcaggcaggcctccttgagctgcgatgggctccacccagttcaagcttcctggccactttgtttatctacttaagcctcagcaatggcagacgcccctcccccagcctcgctgctgccttgcagtttgatctcagactgctgtggtagcagtgagccaggctccgtgggcgtgggaccctctgagccagtcacgggatataatcttctggtgtgccgtttgctaagaccgttggaaaagcacagtattaggatgggagtgtcccaattttccaggtaccgtctatcatggcttccctttgctaagaaagggaattccctgatcccttgtgcttcccgggtgaggtcatgcctcgccctgctctgtgggctgcacccagtgtctgagaagccccagtgagatgaacccggtacctcagttggaaatgcagaaatcacccatcttctgcgttgctcatgctgggagctgtagactggagctgttcctattcggccactttggaacctcccccaaaactttaaatattacatacatggtgcttgttcaaaatgcttttacatgcatttaatatacggacaactgtttcatgcataactttttatcaaattacagccgtggaatgacaagttacaaatgttaagacaatgctcaatcgcttatactacactttcaatgaacagtatgtacagtttctgttaatgcctttattttctattatgtttgttctgattgcatacattgaaatgcaattttacatttatttgaaactaataaaaaatttgggcttgtattttgcacatattttccccatttttctactaattcatttttactgtattttatagaagtaccttttactgacagattggaaaaataaagaacccattcttccccacggataatctaataaagaacctgttcttccccacggataatctgggaagctgctctaagaggctcatctagaggcagacaataaaagggtagaaagaatgagggccctgaaaaaagcttctgggaaagtaaaaacccgaacaaagtttcgataactaagatttttttcctggttaaatacactcaacctgtatttggggtgagtgttagccgggtacaaaggtagacaaaagttccgagtgccgccgcaatcgtctcccacaacatgggtctgagctactcaaaatgagatttgcctttggagaagagttaaggagcagggggcgtggcgagcagcgtgagatcatcgggaagcgccgctcgtggcgggggcagagccggcgcgtcattgtcgtcatcgttgcccgaccgctttccgggagactggagtcgaaggccgtgaggtatttttctaaggtgtagtttcagtttttctcctgctcctgtttaactccgcttttcctctcctgggattcccctgtcatcctctgggcagactgagaaaatcggagtttggctgcgtagccttccaggaatgcagtctctcacagctcttcgttggg

SEQ ID NO: 23595 - DNA, 2300 bp, Homo sapien
tacattagataatctgaactgaacattggaatagcaacaggtagccaggcttggtggctcacgcctgtaatcccagtattacgggaggccgatgtaggcagactgcttgagcccaggagttggagaccagcctaggcaacacggtgaaaccccatctctaccaaaataaaaaataaaaaaataaaaagtacaaaaaaattagttaggtgtggtggcacacacctgtagtcccagctacttgggaggctgaggtggggaggcggaggttgcagtgagctgtgtttgcaccacagcactccgggctgggtgacagattgagaccctgtctcaaaaaaaaaaaaaaaaaaaaaaaagccactggttaccagaagctaagtgatgaacaatacaaggaacgaaggaaaggtagaaaaaaataagccatgtttcatgtttgtcattcagggaaacttaaagcgggatggggtcttacatactttctattctaggcttaacagtccaaattgtattcatcctttatctaccagtttaatccctacctcctccaagcagattctctccataggttttgatccccagagttaacctaccctgcacttgtagtctattacaaccctgatctgataatgactgatcattttttcaggtaacaaaatcaacactttttaaaaactataaacagctataaaatgctagttactatcattattctctaattctttcactagtaatcttcaaaaaaaccttgcaaacctaatctttccacaccctgcttaaatcctttcagttgtgtccgttttttcttagaaaaaaggcataaatcctttgaatgtcctacagatcttgcaatgtctggttcctgcttatccctctagtttcttaaggagataaacttcttcccatcactgagcttctgcatgtgcagaagccctggaaaccttgtcctttactcctagtttgacctagttagcttctgcacataccaaaatctgttttcattcatcccaaatctgttttcactctcattgaaccgtaaccgtgttcctttgtgtgagacaactcatctcggtttgtatttatgtatcgttgctttgattattgaactgagtatctctcccactagaaaataaactccatgagatgggggacattaccattcacatccctgggaataccaggcactcagctgatgcctgtcgaatgtgttaggttgcctcttccaaccacactgcaggcatcctggtgcccgctttggctggactgcactgggggtggcaggacggttgggcgcggaggaactaccccgcggatgagaagaaaggttttaaataggaaacattcctcagtcggcggtcagcttctctggtctcgcgcggctcaagccatgctttgggggacgctgggcgaaggctctggcaaagaggaatgcagaccccaggatccgcactcgcccccaacggcagtccggatcctcgacccggcacccacctcccgaagcagcttcaggtccccgtgctggatctcgtacagctgaatgacgccggtgccccgtgcgaagttgcccatggtcacaaatttggcgctgcagggcacccacttacagtcaaacaccgtgtagttgaagcccttctggatatgggcgatgatctgaggcttctcgaaggccgacatggtgcagccaatttcagctacggcaaccgccacacccagagcccccaaaaacggcaacctggaaaccagactccaaacattggcaatttgtccctcccgctttccgtattctgccccagatgccctggcatgttggctgtagttatccccggataatgccagatgcgctcctgcgatcgcacagaatgttccttcacaacagcacgaatttgtttatcgcctttacccactgcctttcgcacacatacatactagagattacaaaatacttgggctgggagttgcgcggctggagtgagcccaagaccatcaggcatatcttaggacagcctaaccccgttttcccccccaccggccccaaatcctgcaggtccccggcctgtgacgttttaggaaaggggcggagctgcaggggtggttggctgaggctggcttctgcgtggtgcagctgcgcacgtgtttcagccggcagcgctttaagatttccggggatggaatccgaaatggaaacgcagagcgccagggcagaggagggctttacccaggtcacccgcaagggtggccgacgggcgaagaaacgacaggctgaacagctgtccgcagcaggagagggcggggatgcgggccgc

SEQ ID NO: 23596 - DNA, 2300 bp, Homo sapien
aaaagaatccttaaaaaggaaaatataattaatttcggttatcgattctggtatgaaattggcacccagaaaagaaagcccaaagtaaatttaaatgtctaattcccggattgatagcacagaatttaaaatatatacataggctcggtggggcagctcacgcctgtaatcccagcactttgggaggccgagatgtgatcacctgaggtcaggagttcgagactagcctggccaacatgctaaaacccagtctctactaaaaatacaaaaattagccaggtttggtggcaggcacctgttaacagtgagccaagatcatgccactcactccagcctgggtgaaagagcaaaataaaaagatatatatacacacacacacacacacacacacatatatatgcatgtttcttatcaaaataatacattttttaatcaaaagagcaccattaaaacacagtcatgcactgcataatgacattttgatcagtgaccaaccgctcataccatggtggtctcataacagtataatggagaatatacagaaacctgatatatggcactggataccggcaatgcagatcaagtagatgaaatgactgatattcagtaatggtgctgggacatttggttttccatatgaaaaaaatatataaacaaatatacacataccatctaggtttgtgtaagtacactctataatattcgcacaaggactaagtcatctgacaaaacatatcccagaacatattcccgacgctgactgtatatacttcttgtaaagcagcaagtgcttatattcattatttacctgcttctgtttatggcaatctctttactcgaccttttctcaatttgacatagaacattataaaagatacacagaagaagagccagtattttggtgtgatctcagaactaatttacaaattcaattaatatttgtatcgaatgcagatttttaaggcatttgggaagttcaaactcaatatggtaaatttttaaactggacaaaaaccatacaacagaaaagtcccattaagtaaagcctattcatgccttttcatctctgtaggagagaaagcctggtgtattgggaaatgattgagattttccttaccctgatttctacattccttgatttcaagttaaagcgtatctgaagtcccaaatgttccacaataggagtaaatatcttcatccagttttctttcaatggtgtgtatctgttagctgggactggaattttccttgtttcttctttcccactctgtaaataaaagaacacacaactcagaaggctatggagggacggtgatggagtttaaaatgacatctgatccacaaagggcctcctttaactgaactagttacacttcaaagaatcacttctctctgagcatcacggcagaacagccccaccgcagcttcaacattctccagaggccatcggcttgatccgcgtctggcccttgcctcgttgctgtcctagggtcccagccacataccaggagcccgtccccacagaggggtgggaagacgggcctcttcgccggcctggcctcctctgtgtccatgcggcccgcatccccgccctctcctgctgcggacagctgttcagcctgtcgtttcttcgcccgtcggccacccttgcgggtgacctgggtaaagccctcctctgccctggcgctctgcgtttccatttcggattccatccccggaaatcttaaagcgctgccggctgaaacacgtgcgcagctgcaccacgcagaagccagcctcagccaaccacccctgcagctccgcccctttcctaaaacgtcacaggccggggacctgcaggatttggggccggtgggggggaaaacggggttaggctgtcctaagatatgcctgatggtcttgggctcactccagccgcgcaactcccagcccaagtattttgtaatctctagtatgtatgtgtgcgaaaggcagtgggtaaaggcgataaacaaattcgtgctgttgtgaaggaacattctgtgcgatcgcaggagcgcatctggcattatccggggataactacagccaacatgccagggcatctggggcagaatacggaaagcgggagggacaaattgccaatgtttggagtctggtttccaggttgccgtttttgggggctctgggtgtggcggttgccgtagctgaaattggctgcaccatgtcggccttcgagaagcctcagatcatcgcccatatccagaagggcttcaactacacggtgtttgactgtaagtgggtgccctgcagcgccaaat

SEQ ID NO: 23597 - DNA, 2300 bp, Homo sapien
atgcctttagcagggctatttggtacatacatttttaaaaacacatatgcttctgcaggactgtttggtacctgttcccactcacactaagctttacatcaaaatttaatggaaagagacaaaaaggagaatgactacttaccatacttttcccctcagccttttgatgaaaaacctattaaaggtgcattttggatttacttatcttactgaattcagactagtataaattgcctccaacacaacaaaattatgggttattttaaatccactgtattccaaatagctcgaattccttcttagtgcataccccttagttaaaataatttgattttcactgaaaatgtccaagggacacaaacaaatgcagttagcatgattacctctggtaagtggagagaggaagaattttgcatacagtactttttcttaaaaagcacgtctttttatgataaaaaactaattttaaatagtatacctagaaaacgttacacatataccctagggactttttcttgttctgtaatatgttagtatcaaatagcaacatatttaaatcaagaaacttgtggaagaaagtgtcccttcttggcctttccttgatacattcactgtgtgacacagcttgttatgtctaagttcttttccttattcatcctgacacagaagcaaagtagctcctgaagggggaaggggagggatggaggggcggggagggggggattgacagagagagaaagacagagagaaagagagacaggaaccatttagtcctagggcaaatcgctgagcgtttattagaaaaaaatgcatgctcatcatatggaaaaataattagcacataaaaagaataaagttctcatgtaaggatcattaagacttttttaaaaaaaaacaacacaatggctttttataaaatgactcaaaggctttatcaataaggagtttccgatcactcagaaaacatcctctctctctctctcacacacacacacacacacacacacactctcaaacacacacgagtgcgggcgattatcaaggcttgtaaaggaataactggttaaaatagttgcaaaatgttttcttcgttatcctcatcacacctctcctgacagctttatttcttctctcgaacataaatttcctccttatgcttttctggatgtaatttcctattgtaatctgaattttctgggaagataattgccacaggagtggatatagctctactaaaaggataagcgggcaatctacattcgagtttttttctttttttaaacaaaaactgatggactccgccaaaggggagtctggacggtttatgggaatgcagagctgggtggaaagtctttctgcgagtgggaagtatcccttctcctcgtttgcccaggttctccccacgcctcgggctgcggccagctttggctcgcttctctgtctttgcaacctggttcctgactctgccaattcatattacagatgggcctgcgggtgctgcaccggggtgacagcagtcctgatgggccgtgcaattctgtagtggatccaagtcggtacacggatgcacagatacctttgactgcctctcgcaggacttggatttttcctgttttttggtgcggcatccgggtggttctgacaccctaagactgctcctctgctcctcctctcccgcaaggcttccactccagggcccctgtccccctttcgctagcactcgcgcacccctcgcgcttcctcccgccggggaaccctcgcatttcctccttcccctcccagccttgccttcttccccgcccgcctccagccacatgaccggaagggctccgccacgcgacgtcaccgacgtccgcgcccccgcccctggcctccccccaccctgcacgcaaggggcggccggctgaggggcgaacgtggtccgcgcgctcagcgttccccaaccagagctcgccagagcgccgcggcactcgccgcccagcggggcgcgcaggttcccggatgtgcggcgctcgcggaagccccgcccccgccccgcgcgctgcagcactccgctttcccctccctctccgccctccccttttttcgtgccttgaggttgcgggtcagcgcgagccgctgcagtgagtccgtcacggctccggcgcgagcgcgaggctgcagcccccgagtttcccggccgtcttcgccccctctccccctcctttcttcttctctgcctctcctgcctctcgccgctgctcctcccgcgctctccggctctgaatctcgaccttaatttatttccccctaccctgccc

SEQ ID NO: 23598 - DNA, 2300 bp, Homo sapien
aatgactatagtgatgtcttggaactaaaatgagcaacaattttgatatataatgggaaaaacaaattgaaactaagcaaaatcaccattgacaaaatttgtgcctaaagtggaatgggccctgaaactctattgcttttgaatataggtaatttgtttacattttaatgcctctcttccttcagatttgtcacttgagtagttaacagaactctttttgattttgtgaggaattgaacatgctctttaaaatcaaagaacacatggaattcactgaaaaaaaaacttatttaccaaacatttcatttttattcaaaaatatacaattttaaatattttcttagaaatgcaaccaacttccccattctgataaaatgcacaaaatgtatttacagtgcaattttcagctctgaccttgagaattttagcactagtgcaatttgccatttatgcaaaaataaattcttagagtattataaattttatatatcttatacaaatttataaattattttcaaaagagtagacttttttaaagcacactgattaattttagtgatataattttgaacaaggaggcatggctcatttactatatcttaacaatttacaatatcatatatacataaattatatcatatgtatttatttctaaaagtatatttctttgaaatacacctttttgattactttcattttcctggaagaacagcattatagataatgtgctagtgaatattttgagtttggttccaacaagtttgctctaaaataaaaaacaaatgtatatgacaattttaattattacaaagagaaccgatataagcagtcaattcttttttataaaagatatttctaatttagaatatgcacaaggaataatctattctaccaggaaaacagaaggaattaactacctaaaacttaaatcagacttgtaactgtatctagttatgatgttacttttgttgaagcaaatccttctattacattcacagaacatagatatagaggaacaatgttgcagttacctttaggtacaaataagtggctggttttattttctgtcaattacttagggtaccatggagagaaagaacaatatgatataaaattttgcataatttttttttttttcagacggagacttgctccgtcccccaggctggagtgcagtggcgaaatctcggctcactgcaagctctgcctcccgggttcacaccattctcctgactcagcctcccgagtagctgggactataggtgcccgccaccatgccaggctaattttttgtatttttagtaaagatggggtttcaccgtgttaggcaggatggtctcgatctcctgacctcgtgatccactggccttagcctcccaaaaaaattttgcataatttttagaatggtgtatgtgcttggatagagaaatgcggtacagcaatgtatatgacatatagaacattttataaccagatgcatatgtggtttatgtgtgtaattggtacaaattataacaaaataacacatgcagttgaccctataccatatgacattttcagaccatattatcttcagctgtttctaaaaaaaatctctgaagacttcatttgtcagttgtatgggtagctcattatgtggccttaatgtagtatttgcatacattacttgacccttcattgaaaaaatgatggatacattagttttgcttatttttaaggtaaaaatgaagttttcgatgaatttgattagttattcaatagtaaagtagccaatgtcaagtaagacttaattaacccatgttctgtaagtaaaagtttttattaatttactattttaccttcaagtctagtcattgaatatacatatgcaattttcagcatagaagtcatagattaataagaaaaaatagttcacaattaactaggatacctatatattaaggatatgagctctttagctgtcatctgtatgttgtattttctcccatatataggatgaaaaataaactttaaaaatgccacaaacaatcaaaagtcaaactataaacttggtggagtcatcctaacaaatgtatgggggtcatatccttcatatacaaaatgtatagacaaatttcctcaagaaaagtgggcactgaacaggtaagtcacagggatatattcttagtggttgatgtaaaagatcaaaactttggaaaaatgttcaatattaccataaaaccaagaaatgcaaattaagatgagatgccacttgtttaaaagcctatgtttaaaggaaatatcaacatatagtttgtata

SEQ ID NO: 23599 - DNA, 2300 bp, Homo sapien
ctcattttacaaagatgaaacataaagatgttaagttatttgcataacgaaactaaaaagtggcagagttaggttttttttattttatttatttatgagatggcagtcttactattttgtccatactggcctcaaactcgtcggcttaagtgatcttcccaccttagcctcccaagtagtggggactgcaagagtgcactacctagccaggctagaaccagagtttttgtttttgtttttgtgtgggttttttttttttttttcagatggagtctcactttgttgcccagactggagtgcagtggcatgatctcggctcactataagctctgcctccccagctcaagcgattctcatgcctcagcctcccaagtagctgggactacaggcatgcgccaccacgcctggctaattttttgtatttttagtagagacaggttttgccattttggcgaggctggtcttgaactcctggcctcaaatgatctgccctccttggtctcccaaagtgctgggattccaggcatgagccaccatgccggccttagaaccaggttttaaaatggagtcatcatcctccaggtccaatgctctttttgatacacaggtggaagttggcttgagattgtggggttgctaaacaaaaggttgaggaaaaaaggcaaaatttccaaaaaggcttttaaatgaccccaaaaagatactcaccctctttccactactcataaaccataataaccaacattaagtttactgtgtaactctctcattcttttaaaagagctaatacaaacatacacatttatattctttttaaattttcatttttctaaaacactagagatgctacttgcaattagatttcttttcatcattccaggtaaatcgcaaggatctaattaattttaaagatgtgaaagaatttacatatggacatgattaagaccacaaccgtaagtcaattcaacaacgatttctggagcacctactatgtgtcaggcactattttggcatgctggggaaacagcaacaaacaaaacagacaaaatgctcgccctcaggctttgtttcccagccatcccacttttatcattaacagtttttgcctgtgtgtttgccaatgcaacctatatttcattattttgatagttgtgtaacgttctatagtgtgggtatataagaatttattcagccatttatttattggttaacatttcatttaggttttatttttatttttgcaaccaatgttgcaataaacacccatattacatatatattatatgtatagcttattatttcttaaaaaagagcagtctaacttgggtaaacaaaaactgccaaggaaacgcatccctacccatttgttctcactagcccacttcatttcccaggtgtgctccctggctctggtactatccatctgggtggtgctgaagcaggtgctctctctgctccgggaagccattcccagtatagtcctcaccccctgagtctcccctcgcttccaaaagtcagctgtctaccgacctctgccacgaaaactgtctaatcacgcttaatatgcaaatctaaactctgcggtgtcgcatatggccccctgccaataatcctttgacccatcccacctcttggccattttgtcaccagaatgccttaggctcatgtcagttgccttttacagggttaatagctcacccttcaaaatctgtgtaaatatatgtgattcattacatatatttatgtatgtgtcatttttgggacgagcatacgtataatggaaatgtacacccacaagaagatgtagctccttgaatatggttattttcttcctcttgcatccattcctcatccagcgtggctccatcacgtggaattgcgcctttcctcggccatttcccctaagctttggaaagactcatatttcctgaaatttaaatcaccggctagcggtttcctgtccccccttcccgcctccctttaccccccctcagcctcctcccgcctggctggcgccggatccgcgagcagcagtgtccacctcacgtagctggccgaggcggtatccagattccgggggtctcgctccttggcatagtggtcgcttaactccagcgccttcccagtgcctcccaaacctctcctcctcctgcccggggctgttctaggaggagcctaaatgtccgcttccccagctgaaggggattgtggtgcgtaaacaggattaactccctcgcccccagctgcgcggatctgcgcggcggcctgcgggccagagcgagccttcgggtgcgtggagg

SEQ ID NO: 23600 - DNA, 2300 bp, Homo sapien
accccacaactgccctgattcctgtcctttcaaagaccccagtcttcatttttcctgcagtctgtgggccactccattctcttccagtaaattcctatttgcctctattagccagagttgttatctgttgattgcagtgaaagaacactgacgggtgtaatgaggaaaatctagtcctacgattgctttcatcatctctgttgaacttatcattgaaaaggatcagctctaggataacggagatttgccttgaagatgaagaacaactaatatttatggatactagttatgtttcagacactcttctaaatacttccatgtctatctcatttaatcttcagaatgacctcattggataggtgttattatccccgtattacagatgagaaaactgaggcacaaagtaataacaaacttgctcattttcacatggtcagattaacgggtctctaagtttattctatggaatattcgtttttcaggattatattggtttcctggggctgccataacaaagtaccacaaactggtggcttaaaacaatggaaatttattgtcttacagttctggaggccgtaagtctgaaatcaaggtgtcgtcagcaccatgttctctatagcaactctaggagagaattgttgcgtgcctcttccagcttctgggggttgctggccatccttggcgttccttggcttgtaaatgcatcactctgttgtcacatggctgttttctgtgtgcccttttcttataaggacaccagtcacattggattaagggcccacttgtttcagtatgacctcatcttaactaattatatctacaatgaccctatttccaaataaggatgcattctgaagtgctaagggttaggacttcttttttgggagatctaattcaatttatgacaaaaaaagttaacataaattgttcaaaaaagaatgctatggcgaagtaagtttggaaaacaccattataggattctttactgtagtactttggcggggcgaaggtctttaatttgttcatcatttagaggagttgccaacctgggattattttgtaaagtttctcaaaaacctgtttgatgatggacttctttttacaggctgactgtgagatcagcactcaacgtggaacacctgttctcatgcctgatgtgaggcagtggcaccctagcacatccctccctggttcttctgctttcccctgtgacctgcagcgtcaacttgagacaacttttcttctctgagcctgagtttccttactctaagataaggaaaataatatactttccctatgggtttgatgtgtggactcatttttgttgttgtttgttttgagatgaagtctttctctgtcgcccaggctggagtgcagtggaccaatctcggctcactgcaacctccgcctcccaggttcaagtgattctgctgcctcagcctcccgagtagctgggactacaggcacacgccaccatgcccggctaatttttgtatttttagtagagacaaggtttcaccatgttggccaggctggtcttgaactcctgaccccaggtgatccatctgccttggcctcccaaagtgctgggagtacaggcgtgagctaccatgcctggccgatgtgcagactaatttagtttaaaataagtaggctgagaaacacttgatacagggcttggcatagagagaagtaggcattcatttagtagttaactttgttatgctaaccagatggttctgaatttcttggcatttttattgggcatttccaggatctcaagaataatccttactcaggacaattttcaccaacaagtttttcttgttcatcttcctcttcctttcatcacttctttttctctttaaaagagggattttctgtatggtagtaagaatttcccttaggtaaatattcaacccaactgtggttttaataagtctccagcattagcaaggaatgggtggtttactctgcagttccttattctgatcttccaacccagtgaggggaagaggatgtgatcatgcgaccgccagcagaagggaaattgtgaaagcgacctgctgtagaaaaggcggcccacagccacctcagcatgcagaggaggcccagctgctgagaggagttgcctgagagtgacctttgcatctgcctgtccagccagcatggaaccaaagcggatcagagagggctaccttgtgaagaaggtgagcgaaggtgccacttaccagggtgtcagtggacatgggctggggagacttgggttcagctccaccggctacctgctcatcttagga

SEQ ID NO: 23601 - DNA, 2300 bp, Homo sapien
tgatgctgatacaaataatcagtgtcttatgcagcttatgtacaccaattatatgtcagattcttgacatatacagtttttaacccacacgtgaggtaactgaaggaaacttaatgtctaaagtagttaagaactttaataccttctcaggaaactctgtctttaggtttagttctgcagctgaaaaagggaatatttctggaccaaacatttctttaaaatatcaaatgagacgctggaagctatgtgagagtggagggttggagaagggagaggatcagaaaaaataactattggatactaggcatagtacttaggtaacaaaatgatctgtacaacaaacgcctgtcacaggagtttacctatataacaagcctgtacctatactcctgaacctaaaattaaagttttagaagaataaaaaaaaaaaagagaatcttaatgcattatatcagagtgttcaaaaggtcccagagaaaaatgcagtaattatggaagatgtaacttgtaaacatgaaaattatggaagatataaattgtaaaactatcaatacaaaatttcactatttaattccaggcacattttctagattggcttttacaatctgagagaactactctcactaattaaaaactatttattaatttaaatccacatgcttgacaaccctgactctatcatccccaatttttagtgagacagcttcacttattagaaatttagtcttcatatttttgtaatttagggagattaaaatatgagcatacaaactttataacagcaattttcattgcaagatgtttttaattgtttaaaaaaacaaacaaaaacttgcagaaatgttcctattcacttgctcttctcaggatactagcacaagtgatcaggaaaggaataagtcaatattaattattaccaggtctcgccaattattattggtgcctattgcaagtaatcttttacacttctatgtataagtgtgtcttttccaaaggatgtttcgaagcacagctggctacagagattagcagctgagggcccacttattctccagtaccaactcatagctctcaccatcacaaatacactacaaatcctaacttggaataaatctgctttaagaaaatgctggagtaatgaacaaagttcagtgccatgaatcagaaacctaagcatcagagaaggagtggctggtcacaactgtcatagccatgtgacttggggcaatcaccgagccttctgggtctgtctcctcttctgcaaatgaaggaattaggccagatgacctagggtccctccagcctgaagtcaaaatggaagcaggcagcaatgtgtgctatttaaccccccttacaggtagaacattgtaggttaaaacgtgaaacaaatgagtagcctaaaacagactcacattcactgttcattcaactaaaaagctaagcacctgaaggaaggcactacgttcagctcatttctgaaacaatccactcactaaggttagtgtgagcatatctgtgtatataggtgttgcccacaggacaccaagtcctatgtgtgaattcacatcccggggagctttcacaaccacacagcacacactcagcatccgaagaaagacaaacagcactaagaaaattcaattttcatgatgcacaccagggaggctaagcctttttcagtaccctaatctttaaaatggtgcatctaccacctcgatgccacattatgcaaatttactaagaattgtgagtgaagagatttcagcccaattaaaaaaagataaggttttttttaaacgtgtcaattccaagaagatggcccaagaaataagccgtaattactctatcattatatcaactctttaatcacttttttccccttgcctcccaaaaaaagaactgaggggaagtggaatttaaataaaaaatgaatagtccctccaagaaacctccatagaagaggagtatatcttctgacagaacacatctgtgtgcctcttaaaaaggatattctaaatctggagggagttagcttagatccccaccttccaggccctgccatctggaattctcagacccgtaatatcaaactgtaaggaagccggggctggatgagtatccccactcccctaaccccactccaacattctatgtgctaccacgctcccctatttcaacccaactggttgaacaggaaacattcctaagatgagcaggtagccggtggagctgaacccaagtctccccagcccatgtccactgacaccctggtaagtggcaccttcgctcaccttcttcac

SEQ ID NO: 23602 - DNA, 2300 bp, Homo sapien
acatttggatctcccagggaactgttaaaactgcatgccaggccaatttaatcagagcctctggatttttacagctcccaagtgattctgatgtgcagccaaagctgagaaccactgagccagcctttttcttaaaagctaatttattctattatcagtatacaagttaaatagtctttcttagaagcttcctttttatgtgaagaaaacagaaatctacgtgcattcaggaattttgttcttttacaatattctttcctctgaattttttttcagaggttggggagcaaaaacctcttcgatttgaattgacacttccccttaatgtttctaatctcttagctcagtggttagtaaccatagtttacatcaaaatcacccaagggattttcagaattttaaaaactttttcttaaaattccaaaagtaagcctcccttgtgtttactgctgggagttagccaggattaacttcatagaaggcttgttataatgggaagcctcacagatgggaagtagctgtggctaactggaggccattatccctgccccattattttctcatcccaggataaataatcctacttggcagcaagtttgaggatgaatgatcttagattatattcagtataatccctttttacataattgtttctgttatgacaatgaataaagcatctgcttgtttaattctcaaccacatttagattccttgagggagaggaacaatgtgttatatatgcttctcttgtatctgctgcagagttcagcatccttcttgatttatcataggcaatgaacacttggggagctaattaagtcaaatataagtagatggctttgacagttcagtaacaattcttggaaacctgaggcatacatgcatttcttaatactccttagaaaatgctcattaagtgaaagatgaccagaaatgtacctgctaacttccaactcttcaacacgtcacattgtgatgtcagtgagggcttaaagggaatatggtggttggctgatttcacatcctcctgttaccttcctcttccattggctcataataagttggtgattgtccagcaattgcataatacagcatgacatgtgtgtctgtcagtgaagaggaaatggtatggggtggcaactttagtgtcgttattctgaagggcaacattagttaaggcaaagagcagcaatgtatacttttggaagtctatgctttgcaaaagccattttggacatgatatagcaggtaggaatattttctgtccttgcatatgactctgcaggggttccagctccatccttcaggaagtagaaagttctttggaagtgagttccttcaccaaatgttttgccaaaaaacttaggcccatttctgaaagcttccttgaagcacctctggatttatgaaggaggcactgtttgctaagaccacacatgttttattgctttcagcacaagtaaaatgaaaaatgttggaaaatttgtatacatgcttgccaatatgtggtgctttagaaattacaaataatatttcttgtattggcaagatagaaactccgtatcttttaatataatactatttttggcttctggagttaagtcatttgaatttcctgtgggaaatcatagagtcaggtttaccatgacagtttaaaatctgctacacactaatggaaataacttggtaactcacagcaagtacaaacagatatgaagcagctgctatatgccaggcactgtggccctgggaaacaaagataagcaagacacaaatcctgcccttaaaactcagtctagacaatgtcagtgtttaattctgttgggaaaggccaagtcgtcaccttctttcttcttcttctttctttcttccttcctctttccttcctcctaccttcctcccccttttctcctcctcctccttcttcttcttcttctttctcctcctcctcctcttccgcctcttcttcttccttcatcatgtctgttacagcaacaggcatttccattcctactgcagctacctaaggtttagttcctaatgattttatgcctggattattgtgatccttccctaatgaattcttttttacttaccatcttttcctgggctttcctttaatctagccagctggtccatcctgcactttgtcaccatattaatcttcttaaaatgtaattgtaattctttcacttcctactcaaaagccatcaacaacaaaccctgccttttatttccactaaatctctgtccacttttcccaccttgcctctgctactcttcatgaaccctacattcta

SEQ ID NO: 23603 - DNA, 2300 bp, Homo sapien
cccgcccctctttaaaaaaaaaaaaaagaaaaaaaaaaaaacagaaaaccaaaaactgttttacggagaaatggttcttgctatgttgtccaggctggtcttgaactcttgtcctcaagcaatccttctgcctcagcctcccagagtgctgggatgacaggtatgagccaccatacccggtacttttgtacctttgaaaatgtatatgagtcaatcctattaaactcctgaatacttgttgtacatgggaactgatgcctcatcattaatttgcaatttgtgacttaatcataaacttgctggacttctagttgtttatataagaattttatctacttgtatcttataggtaggtaggtgcttacatttgacacaactactatctgaaatggacaagaagatgagatctggattatgaaacaaagtctcaaatattcaactcagtcataagagtagtgttttagaaatggccccttgaagctatcctacatgcataattacaagctaaggataatagtcactgaagacatcaagcaacagtgagtgacaactgtaaacaatgtttagaactcagctaggtacagtatgtgactctttgaagcccagatttaaagctcagtttcagctaatttacctaaggtgaatggtgtaggcttcccaaatcagttgaaagcatgactgggtacatcaccatccttgagttacttttgtatataaagacagcttgtattcacttaaaatcagtttattccattttgcacttccttttataacgggggttggttgtgcaagaggagaggtttgaggtaaatacttcttttaactcagctgaacacaaatctcttttctagacgagctactcagctatgttttcggacttgccaagaccacggtggctcccattcatgatccagattagctgtggtggctggaactgcagtctgtgttcaacagaggtcttcttcttgagggttaggagaagtaagaaagcaaacgtaaaaacgggtgagtcaagagcaagtttttgccatgcaccttggcccctcccaccaccaatacaaaccaaagccaaaccacaacgttcttgaaaagaatctcacattaggaaaacgttacagtgcatttaaacgttacagtgtgtttatccacttctcccaggatcttactgggagaataaaatgcgtccccttgtggaattcctgtaacgggaatgaaggcttttgaatttcacagcaggggatacctttgcgagtttctaaaatcccactaggaatctttcttctacgtccaggttcgcctggatgcctggaaacgacccctcttctgccctttctcctttatgaactgagctttcctgaattctctctcaagtgaagtaaaagctcgtccccctttcaactatcattcggagggatagatcggcggcagcgcagtcggaggggcggggagccccactccgtccaaatcccgcgggtcagggctaatcaccccacgtcccgtctgagccaccctccttgtgtcccgcgcgggttgcagctgctggaacccaagaacacagggcactgacaagtgacaacaaccgtcagcgttgactgtcactgcggctccaggccgcggagggaaggctgagcttgcgtccaggccgcgtccccgggagcgtagacacctaagccaacgggaacggaagacccttctacctactaggccgcggtagcttctcctcccgcgatttaaatccaccggaattcgaatccttccccatagctcttcgcatcccgcccacctgagtcccgccctgctcagaactcgcgcaggcgccgagaggggcgcgcagtgcctttggggattggtagttttttccagggcgtctccgctcgggaaaggaagtgaagaaagccaccaggactacaaggcccggcgtcctccaagatgggagggaggtgaaaagggtgttggggaataagccggggtttttaaacagtagttttgaggcggcgagactggggaatccccggttgcgtcattagtaggcgtggaggggcgggactcgtgaagctgcgctggggccgggctctgagaggaccggcgcagccgcggggagcctttgaggccctccctcggtgttttttcccagggcgtgggcttgccccgcgcgtgtctgtggagggcggaaacagcggaggggccagtctcctggcgaaggggcctaatccttgcccgccatgtccgggggcttcgagctgcagccgcgggacggcggtccccgggtggccctggcgcccggggagacggtgatcggc

SEQ ID NO: 23604 - DNA, 2300 bp, Homo sapien
cacggccctaaaattcatccaccttttaaccagacccacagtactctactggtgacaatttcttaagcaagtcaaaactcgttagtcaccagacatatgattactagattaagcacatactcttaagtttcaaacctacgaatttaaaagaaaaataaagcctccagacagttccttccagtgtttgtataggccaacaaacgatgaaaaaaatagaaatgatgttaaatatttaaataatcacttgtccagtaaaaaaatgaacagcaattgaatatctacttcctcaataaccttaccacatgcacatgtgcatgtacacaacacacaacacacaacacacacacacacacacacacacacacacacccctttaggaccagcttccataatacaatcttaaactaccactcctttccctgctcccagaagggacctaaggcaagtaccaatggttccatttagactctggaagttaaccaggacaacagtacacactccttactccttggtgttagctcactgacacaggtgtctccccggtcccaagagaaaactcctaaagggtagggacccatgttccattcatctttgtatgccccacagtgctagaatctgcaaaatgttctacacagtgagcaccaaacaagaaatgttgaatgttaaagaacaaaatagaaaactagatgtacttaagagatctatagaattccagaatgcaatatgcaaatgttcttattcctaaacctctcccaaagaaggtagagaatatttagctttgtggcattatgtgtccaaaagcttatgtatggactttaaataatgtatgtatggctcaattttctcatctgaacaatgaggataataaaaatagctaactgatacggtcttgagacagttaaagatgttggtataggtaatgtctccttagaccaatgacacgaacgctatacacattacttatgaagggttagctactcattttactggaaataataaataatataaataaataaggtccacacagctctgcaaaggagaccaaaggttaaaagaaattagcctagaagacgtaatatcacagtttggcaaacttttctgtaaaggaccagacactactgtaaatattttaggctttacaagacaagccgcaataccctcaacccttggagcaactattccccctgaaaaattagtagattttttgtttacattttacatttcagaatttaagaatcattcttagttcatggggccatacaaacataggctggatttggcccccaggcactagtttgccaatccctggataagataataatggtaatacagtcagtgttttaaaagcaacataaagaaatgtttgtgaattggcttaaaggtaactgaaaaacgtgcggccccaaacttctaaaatccggaccggcggaccagtgcggtggggaaaccggccaggactagggccggtcttcaggagccggcgcggaactccacggctctcggggtccgctaagcccccgcccacacttactcccagcagcggcccgcggccgatcaccgtctccccgggcgccagggccacccggggaccgccgtcccgcggctgcagctcgaagcccccggacatggcgggcaaggattaggccccttcgccaggagactggcccctccgctgtttccgccctccacagacacgcgcggggcaagcccacgccctgggaaaaaacaccgagggagggcctcaaaggctccccgcggctgcgccggtcctctcagagcccggccccagcgcagcttcacgagtcccgcccctccacgcctactaatgacgcaaccggggattccccagtctcgccgcctcaaaactactgtttaaaaaccccggcttattccccaacacccttttcacctccctcccatcttggaggacgccgggccttgtagtcctggtggctttcttcacttcctttcccgagcggagacgccctggaaaaaactaccaatccccaaaggcactgcgcgcccctctcggcgcctgcgcgagttctgagcagggcgggactcaggtgggcgggatgcgaagagctatggggaaggattcgaattccggtggatttaaatcgcgggaggagaagctaccgcggcctagtaggtagaagggtcttccgttcccgttggcttaggtgtctacgctcccggggacgcggcctggacgcaagctcagccttccctccgcggcctggagccgcagtgacagtcaacgctgacggttgttgtcacttgtcagtgccctgtgttct

SEQ ID NO: 23605 - DNA, 2300 bp, Homo sapien
agtggccaggcagaagcgctcctcacttcccagagtgtaagggggccgggcagaggcagtcctcgattcgcagacaggatggcagccgggcagaggcgctcctcacttcccagacagggcggcggcctggcagaggcacttctcactgcccagacagggcagggcccgggcagaggcgctcctcacttcccagactgtgaggcagccgggcagaggtgctcgtcacttcccagagagggcgggggccgggcagaggcgctcctcactgcccagatggtgcggtggccaggcagaggcgctcctcacttcccagacggtggagtagccgggcagaggcgcttctcacttcccagacagggtggcggcctttcagaggcactcctcactgcccagacggggcagggcccgggcagaggcgcccttcacttctcagactgtgaggcggctgggcagaggcgctcgtcacttcccagagagggcgggggctaggcagaggcgctcctcactgcccagacagtgcggtggccaagcagaggcgctcctcacttcccagacggtggagcagccgggcagaggtgctcctcacttcccagatggtgcaggcagagatgctcctcaggtctcaatctcttgacctcctgatccgcccacctgggcctcccaaagtgctggattacaggcgtgggccaccatgcctgccctgctgtctcttctttctcctcctaagcagctgtcttagtctcctgaattttgatgttctacttaacaccctcatgttcttacgcatgttgccctgctggaggcgtccttctctttgggaagcctgacccaccaacagtgcctcaggagatagacatggaagcttagccggtgggggcctctcatctctctcccacctcagttgcaggggaggggttggttgcagctgcagtggtggccccgacagttttcttttgcgggacctgtggccggcagctctgggtggagaagacctacttgatccaagagctgcaggatccttgggctgcatgtcctcccccaccgtcagcaagcctggagagctgggcaggtggtctttacccagcaccttcaaggccgccttctctggccacagggagcagcccggaactggggcagggagcactgttggaagtgggtcaggcttcccaaagggaaggatgcctccagcagggctgtgtgaactggcgactccatggcccttggagtagaaactcactgcatgcacctgggccttgtcagtctggttgttttctgtcaagctcttgaggtggacatttccctccaagggcctgggattgtaccaggaggaagtgaggtttccctgagtctccaggggcctagaggtggaggctgcttccccattgctacaggggccccttttattgtcctcctgctcctgggtctgtacctggtctttcacctccgttgcttctttgggctcttctgccctcacctccattttcgggagcctggctgggatcacctgctcatctaatgaaggaagttgaaggttaaacttgcctctgagacgagggatcctcacggggctgaggtatccaaacatcctggagttgcgagcagacagcacgggtttcttccttgagggggggctccagacaacaggaggcaggaccctctgtggggtgcccgtgttccaagggataagacacagcctcataagggtgccgtcccacctgcctggaaaagaaggcccaagatgtcgctgacggttgaagaggagtgggaaacagccaaagagtcctggggcaggcacaggtgcaggagccgcggggtgagcccggccagctgggaaggcctcacggacaagacgagcaggttgccgatggcatggccaggacctgcggcggaaccaggaacaaaatacgcttagtgagttgtccattttgagcgagttgtgcacagacgaaactaagggtcagaagcggagaggatactcctaagtcacccacttctctgtggctgggtgcacactgggcatctgggagtttatgacatcaccatggggctggtgacagagccagggtgtggaggagtgcttaggagcccagcgagggtgcctgcaagaggagtcagagggcaaagggtgagacccttccaccggtccagctggactctagcctcagggacgtcctgctcctgggggcaggtgtgtggccctggatgggccccccgtggggctgttgggggtgtggggctgatccgccagagcccttctgcctggcgcctggcccaggtgctggctggcacccagtggccct

SEQ ID NO: 23606 - DNA, 2300 bp, Homo sapien
aagtggggcctggtcgctatacactcagttcctttgctttacttatggaggcaagcttaataaatgaaaacaaaatgttttctggctcacatatattttccataaaacttattaaaacaaaatttgttttgtataaactttgagcccttatgtactctattctctgaactctgaacatgtcaattgacgttgccttttttcaagagaaattattgtgttcagaagaaaatctgtagtatacgtgttttcctctgtttatcccaacccataaggtttgataatcacaagaaaaactttgagaaacatcttaattgatagattatagagaggagcagatccaagatattcaagctatttgtgaggttttgatgacatcaagggagtattacaaccaggtccgaggaatgcccaagttctatttggccagttgcttttccttcccttccttgtgaggaagatttacctcttctagcacaggaaaaataaggcttaaattttcatgatcctttatgcagggctctctggtaaagctgagccagagaatatgacttagactgaaaatcccagcagagcctttccaaaccccaccctccatccctgcccagtttgagtctgaacactgaacctttagaacagctagtcctaaagggatagctgtagtgcagagcaggtgagagagaaaacaagaggctaggttcacctatctattctaatggcaggaggttgccagctacaaaaaactaacaacagtttggccaggcctacatttggatcaatctacttggaaagaattacattctcttagggaaaagtaggagaatcagtggagagaagggacaaaaatcacttatgcccaactagaccttgtttctgagattctgattcatttggtgtgtggagcctgtgcatcagtggtatcttaaactctcccaattttagtgtcccttcaaaattaagagctactgttgtatcatcattgaacacctcagaggaaactgaggcccaaggtcacattgttaggaaacttggcttcaaatgtaggtattttcattttgggtataatgaatttttctaccatacgtattagactatgtaaagagttttgtgactgtagtaacttctcttcataagacagttgtcagaaatagtctatatttttcatcagttcttgtatgtctttctacaactccttcccagttatgtgactttctaatttagatgtgaaaatgagggtacttgaattgattaactttagtgaaaaggatggttgccatggtttgagtgtttttatctcctctaaagatttatgttgaaacttaatcctcagagcaacagtattgggaggtgggcctaatgggaggctgtttaggttatgagggctctgtgctcatgaatggataatgctgctataaaaagggattgtgaagctggatgcagtgacatgcacctgtagtcccagctacttgggaggctgaagcaggaggactgcttaagcccaggagtttaaggccagcctgggtgacgtaaggagacctcatctctaaaaaaaaggtcgggggcttggcttgtagaagtgggtttacactctttcactcttctgccatataagggcacagcattcatcctttcatgcccttccaccttccctcatgtaagaatgcagtaaggagcctcacaccagatgctggtgccttgatcttggacttcccagaccccacaactgtgagataataaatttctgttctttataaattttcaagtttgtgatattctgttatcacagctacaaaacagactatgtatttcctttataatctatattatattataatctaatgagaactcttgtaaatgacagaaggaagcctaactgaaacaacataagcgaaaatagtatggtaaagtgttttaactgtctattgctgtgaaacaagctactccaactcttagtggcttaacacaacatgatcatgtcagtgattatgattatattctgccttataattgtgtgggttggctggggtcagctgggcaattcttttatgacatgtttttggtgtcagctgggcttcattcagctgagaactcagctgaagatgaagcatctgtgatagctttactcgtgtgaatggtgcctcagcaaaggttgatggaatggctgggggctggctgggcccacctccctccctgtaccatgaagtagcctagactgagcatcttcacctgacatctgggccccaagagagtgatgtcaaagctgttagatcttttaaggcctagaactggaattgtaatttttg

SEQ ID NO: 23607 - DNA, 2300 bp, Homo sapien
ccccgagcagaggaggaagggagcggggacctgcccttcgcctgccggcttctggaagaagcgtctcctgatccggccccggaataagaaacccggaccttgcctgccgggctccgcgatgccgcaggtacagagcgcgccctcccggggaggatgctccagggaccccgcgctgcactggctgcggccgtggggtgcggcggcttctgagtgaagaggggactttgccagggattcactcctgtgagtttcttcaggagagccaggcttcccctcctctgtccttaggggaagctgcccaggctccagggagaaagttgggagcaggcgggggacttgccagcaggggtttgtgagagaggcttctagcgatcgagaggtcaccaggtgggggtaggattggggttcccctctgaacggtgagaataaaggagaaaagacctctggacaatcatccttaatctcgtgacgccctcctctccacccccgaagcttctgtattctttgcttttaaacactactttgacccttcaggtagcatgcttgtaggggtacccctccaggagtggcatgcctctgcgacccacgggacctgcaaggagtggggcttgtcccgcctgggttccaagcctgcccccctccttcttttcagctgagttctgcctctcctccctgagtgggcagagggcaagggctgagccagacagaattgagagctcggaggaaggaaaaaatcagggtaaggagttaggacagagaggcagcaatggggctgagcctcactggggcgcagagggactttaaacttggccccaagaagacaggctccagatgttttgcctcggaggaatatggagagcaggctttcctgggggtggggaggtggggtcctgggcatcttcctcatcttcctttcccaggaaaactctggcttgcattcttccctctgttctcctgacatttgttttagggtgctctccagacctcagccctccttctacgtcccactccctggtctgatgtcttcagggtttgggagggactgcagggagagagcaggggacagggggactctggctgcctccctgtccccaccagggcagctgacacccccctagacccctcaccccagccccattatgtggtgtggtggagtccctgtatcaggatttcgctccccttccttgcagctgacagaggaggcctgagagcgcagtagtaactccttgcagttctagggtgtaacactctcctccagggagctccaggctgtgcagacattattgatctcctgcctggcagaagttgaacctctgagtgtttaagctatttacccctggacactcaaccagccaaggaaaaattttgctctagcgtccccattctcatcacttggttagtcacaggctgtgactttaccctacagcctctgtctggggacaggccttcataaatgctgttcccagcttctagggtcatagcaggttctaatgtgggaacaggaagtccagcaaatagtgaggaaggtggctgctctatggctctgtgattttagagccatgttctgccagaagagcaaggagagcagacaggcttgtctgaaagccctccctcttaaatagcatttaaagaaatttctttctcttcagcctccccacactcccaacttttgtccttgagaaaaggtgcaacacttctgagtcttcagtggaacagaaataaactgagccagtgcttgattgtctctatagcaatccacccttccctaattgagtatgtggttttcattcattttctctcattggttcctttatttccactccatcaccctatgttcactctgggcagggagctaataggtctgcttaggttacagggtggttttgaatttggccagctttactgcaacatatagccaactgtttgtatgtctttcaaaggtttagaatggagctcagataccataccccaaagatgctggcagagacattctgactcattaagggagagctggctgatagcagagaggggtgacatcagccttgcagacattgccctggggaattctgagcagtgttgctcacagcaccacctggccagatggagaccaccatggggttcatggatgacaatgccaccaacacttccaccagcttcctttctgtgctcaaccctcatggagcccatgccacttccttcccattcaacttcagctacagcgactatgatatgcctttggatgaagatgaggatgtgaccaattccaggacgttctttgctgccaagattgtcattgggat

SEQ ID NO: 23608 - DNA, 2300 bp, Homo sapien
gtgacctgtgttggccaatggaatgtgagcagacagggtgtgcgcagaggcgttaaatgcgcttgcaaggttcttctctcttgtgctcctttcattcctgaagacaggagtatacaccaggtcaccactgttccttcagcctcgttctctggatatacagtttggatacatttagtttgagatggctactatagatctaagcagagatccatgtgatttggagttcagggggtctgggctggaaatacacattggaatcatctgcaaatatgtgacatttaaagccttgagacagatgagctcaccaaggtgtgagtgtggatggaaaaagagtccagtcgagtcttggtttccttcaatatttagaggtcagagagatgagaaggaatcagcaagaaaacagacacggaaaagccagaaaggcaggcagacagccaggccaaccatgggccgtgggagccccatggacagagggctcagagttggagagagctatcaaatgtgtccgacactgctgatgggcccgtgagatgaagatgaagccctgacctgtgagtttagtgacagggaagtcgtaggtatccttgatgagaatatattttgtggagtcataggggcaaaaacatcaaccaagggattcgggagagaataagaggagagatatttgcaagttagacaattcttactaaagcttggttcagaaatgaaggagagaaatgggactctagcccaagggggtggtggcatccagagagattttttatgggataaaaaatagtaagtttgaacgctgacaggaaggatcaaagagagagaagaaattgatgatgcaatagggatgggagagtgttaacagccagttcacccattgtaccaagaataaggtcagggatacagcttgcatgcaggtaggtgagcagatagagtgagggaagcttgtggacattctctttcagttacattgattttctcaatgaaacgggaacccaggtcgtcagtaagagtaagcaagtggcaggtgaagaagaaagtatgacagagtcatctaggagagttggagaatgaatggagcaaggcgtgcagcttagatgctggctagcagtgactgttctgagcactttgtactggcttttctactaaagcctcacaacagcctatgaagtaagccctattatttgccccatctacagataagaattgaagcacaaagtggtcaagaaacttgtccatagtcccacagcaggaaagccaggatttgactaccagtgatctgtttccagggcccaaatgcttaagcactaggttaggctgacccagttaaacatgaaagcttgtcacagaactgaactaaatagaatagaataaaggttgaattaatgtgtgtggtgcaaccactctgtgtcaagctctgcactagattcctctgcaaaaaccctttgagttgtggttattatcaaccccattttactgatgaggacattaaggtctggaaagattcagttgcttgttcaaaagttgaagagctagcaaatggaagcccacaccatgtatacagcccacacaccctgattctaaagcccacaccctgtgtacaatgccaaagaacccttaggatatgtgagtgggtcgacctagcttaagttgcttcattaagccaaatacatcaaaaccctccctacatcaggctgagatcacttgcaaactttatcctgagcacctggagagcttgcgacatggtccttacagcaggaagaatttaaaagaagataactttgggggaatgcttgttgtttttctgaccatttttggatgcttgatccgttaggtgaggaagaggagagcttagagttgaagtagatgatgggagtttcgacattttcttctaattaaaactgtaatcttttataacagaagcaaccattctggtttttcaagcatttccaaaaaccattttctcaagaaagagtgctcataatgtatcatcttcactgaacagccacccacttcctcaaatgcaaggaagcagacagttaaaaaagaaacacacacacacacacacaaaaccaagaggcagcagttgtttatcacgacctcaactcagtaaggcctgagattctttcgaaaaggagctttgcttcccatgacgcagagggaagtgtcaactgggatatttctggtaaaactgaaagcaagaaaagcagggtgctagcccctgtgggactgagggtggaggctgggggagtttgggtgccatcctccagtgacagatggatggacctttcatctaagagaaaggagga

SEQ ID NO: 23609 - DNA, 2300 bp, Homo sapien
aaatctttctgtagttctttggggatcatttccacagccttagagcaagtgatcagcccacactggctgctttttaattacagatagaaggccttgaagatagcaagtaactgaggagcaagatctcagataaagttcttaactgggatgctaagacacactgatataaagcaaatcctttgtaagcaagctaccaaattgtcatcaaaatatcaaattatcttttctacatctgagcataagcactcttgtgatgatgtctgtccaatgggaagctgaatcaaatatgtcttgcaacgtgggatacaacctagtatgacctcaccaggtccctggtgggaggtaagaagtgactgccagatggaaccaggtataagggcatattatgggaactcagaccccttgtgagggtcaagggagcccagttacagtggagtcctcttcagacagcaatattggaccgaaggatgaaatgtggaaatagggtgataactccagatacaattggagatagctacagaaagactctgtaatgccatataaaactctggtgtttgaaagtatgccatgattataaataaagattgagaatcacaggcgtagaaggagatagaaataagagaatcagaaagaatgaaattctgtcctttgcagcaacatggatggagctggaggctatttatcctaactaactcagaaacagaaaatcaaatatcccatgttcttatttataagtgggagctaaacaataggtatacgtggacataaatatgggaataataggcactgaggactccaaaagtggggaaggcaggaggaaggtgaggattgaaaaattacctgttggttacaatgttcaatatttgggtgatggatacactagaaacccaatccccaccattaggcgatggactcatgtaacaaaccagcacgtataccccctgaatatatttttcaaaatcaatgaggagatgttggcaatttaatgcattaaagataggaaagaagaaagagaggaagcttgatgatggaatgacattttgaagtgaagagggaagttgaagaagctctcagtgatgactcccatccttttagtaggaagtaaagtcacctgttgataaaaacagcaagagtaacatatacttacctttgaccagggactgtgctaagtggtttgcgtatgtttgtttaatctctacaacaattccataaacaaggaagtattattatcctaatttagcaagtgaggaagccgaggctcagagaagcataatttatccaccgtcaaaaagtcaggaaaggtagaactagtctccaatcaggtgaaatgaaatgggtcgggagcagagttgatagcttagtttagctgtgtcatgagtggtccagggatggacaaaagctgaaaaagggggttggaagatggagccttcctccagcaacacttggcagaaggagaggggtgcagacactgggtattagcaagtgtggagggcagtgcaggccaaggagacaagggcatcattgaactggctgggaaataagatggggctcagaaggaagtgttgaatggggaccagggtgatcgatggagcgctgtggagggaaggaaaggagagcatggtcctgggtgggggttaccatggagacaagatgtggaggtacaggctggacttactcgaatgacaggcagaactcctgtgtgaaaacaaaagccaaatataccatgctgagtgcatgcaggttcaaggggctctggcttcaaatcctgcttctgagttctattggcagtgacgatctaactgtaaaggtcataggaaggcagcagcagtgagcgccttgtacagcataaagggctgggatactctccgtgggcaggggacagaatggcactgggcaggagaattcagaaggtgccaactccctgcaggctggccctgtggccgggggctggggtttgagtggggtccgctggagggggcctgcgttccacagcgaggttggagctaacagcttctgtcttgcggcccctcctctagccggccgctgtggaagagtgcccaggcagcttccggcggcctctgcagctgcgtgggactcaccccgagccttcagagtgaggcattattttctcctctctcttgtcagatactgactcccacgcaggaaaaaggaagcaccttttgtcagatgctgtggccacttcctcttcagaaggctccagccaacctttcggtttgcagaatgacggggcccgccgcggtgccggactgcctgtgcacggggccaccgactgcagcctg

SEQ ID NO: 23610 - DNA, 2300 bp, Homo sapien
aaccacccgaaggacggcttctggcccttggagtcactcactcacttgtgggactgttcagggtataatctgtctccagtctacaattgtcgttttactatgggaatagaaagtttgaatcaaaattgaacattgaatcaaaatcaaaactattaaacaaatagacaattaacaactactaaacaaaatatggttctttctatggtaatttaaaaaatggctgtaacattgtacattttaggaggaaaaagaatcaaaagatgactagaaacctaagtgagcctggagaaaaagttaagtggagacattgtagctaaacgatgagcatgaatataggaaaatttaacctagaaactgagaaaggattccagtgaaccaaatatcttgacacagcccttggaacacagcaccaggacgcgtgagtaatggtgtgcacgtcagaaagataccagaactaccacctcagtgggaaaaacatcccctgggcttgtccgcagggcctctctggctgcaccccggctgctactgtcactagttagaatggaaaatgtgatgaacctgatttgtctttcctaatctggacacacaatcgattctaccatttttattttcaggaccaaggcatttggcgttttttgtgtgcctagtaatgttgtttgccgagtgtattagtcagggttctctagagggacagaactaataggggatggagatatatttctgagtttattaagtattaactcacacgatcacaaggtcccacaataggctgtctgcaagctaaggatcgaggagagccagtccaagttccccgactgaagaacttggagtcccatattcaaggacaggaagcatccagcatgggagaaagataggctgaaagtctaggccagtctcgtcttttcacgtttttctgcctgctttatattctaaccgtgctggcggctgattagatggtgcctagctagattaagggtgggtctacctttcccagcccactgattcaaatgttaatctcctttggcaacaccctcacagacacacccgggatcaatactttgcatcctgcaatccaatcaagttgacagtaagtattaaccatcacaccaagcttttgctggagcctcttgatgacaattttgattgagtcagaaggatgaatttcgcagagatgttggttatattaacaactcattgcacagatggaggacctgaggtccacatccagctacaaatttctgcctgcctcctgcctccaggctgatctggggacgtgttggcctctcagcattattgcccatgccctagtctggtagaagagtggtttaaaagtgtgactgttttattcttcataagaatcaggctgccttggttgaaattgtggccccatcactttgcaactttgtggcctctggcaagctatggcacttcactgacccatatatgtgatggagataatgatacggttattacaggagcacacttgatgataggtgtaaagcactcagtacaatgcctgtttgtaggaagcatctaataaattctagttgccagtataactaagcacttgccctatttttcaaatgctattttagccagatcaaataggtaggaaaaagcctgtcaatcatgaagtttatactttcctgtttctaaaaaggtacacttctaaaaatttatataattcatttatagctattaacttaaacttggaaagtttggatatttggtctgtcttcacaagtgtttatctgagccctacctctcaaattaacatgtatcaccattgatgtgcattatgttgattcttatacctattatatgcatgtgtgaaactaagccccataaaaacagaatttaggcattcctgctgaaaggaagtgaattgaagggaagagaagcagagcctttgcaaagagaaaattgtcctatctctcaaccagtgtcagaatgtggaaatgtttacaaaatgctcattaaaagaaatagggattgcaagatagaaacaaattctggtgcacaagtttacactagggagataagaaaggctaggcccctataggggattttgttatccaattactgcaacctgacttttagggggagaggaagagtggtagggggagggagagagagaggaagagtttccaaacttgtctccagtgacaggagacatttacgttccacaagataaaactgccacttagagcccagggaagctaaaccttcctggcttggcctaggagctcgagcggagtcatgggctctctggtcctgacactgtgcgctcttttctgcct

SEQ ID NO: 23611 - DNA, 2300 bp, Homo sapien
ttagatgagacttgaaacagcgttcaatctgaataacccacggaagttttagacctactacgtcagggtatccaaaggtgggcaccgtcagcaccaggcccttccaggtcagcaatttcactccctcggcggggagctgggagtgaagacaggaatttcattcataacaacgtttacaagcaccacttctcattttagttttcactcctgagttgtgggtgggcctgacagtttccaagtctatctttcagttagggagcattctggaagcagaagcctccttgctaatgctcctgtctcagcaaggcaaggagaggctgtatcattttcagaattaagagtgtggactctggagttaaattgggctcagatcccaaacactgcctttcgaagctgtgtgatctcaaagagttacttaacttccctgcaccttggttttcctacctgtaaaatggaacaggttagaaggtaacttctagagttgatatgagaatcagatgaatcaatatatccgaagtgtttggaaagtgttgaaacatattgagtgctctacaaacactagcaacaatcattattagactatagaaccagaactcctgaggacgggagggggacatggtagaggatagcatgtgatactttcattagccctaatgtctatgggcattgctggtttgcttttttgagtctctgaagccagatatgagagaaaatttgcaggtgccttagaaaactgtaatcctttctgcagctactatctgagaaagatttaataaagctgcgtgttttacatccacccccactgaacagccagggtagggagattccagtgaactaggtaacccttaacttgcccagatgtctactttttgagaaccccatttttgtttaaagctgctaaagttagaaagttgtttcagctatagaacaaggccattatttatgttatctctttgtttactgtggtgattctcaatattttacaattttgcaatttactggggttttttgttttgttttgttttgagatggaatcttgctctatcacccaggctggagtgcagtggcatgatcttggctcactgcaacctctgcctcccgggttcaagcaattctcctgcctcagcctcctgagtagctgggactacaggcgagcaccatcacgcctggctaatttttttgtacttttagtagagacggggtttcaccatagtagagacggggtttcaccatgttgtccaggctggtctcaaacttctgacctcaggtgatctgcccgccttggcctcccaaattgccggggttacaggcatgagccactgcgcccagccgcagtttattgtttttgttgttgttgttgtttgttttgtttttaaatttcccttcctgagttcatgattataccctgacactaactagccatttctaattgtcatgttaaaaaaattacacaaattaaactttattctctttctctctcttttttttttttttcaatctaagaatttcttaatactctgcaagataactagaggtctctaacttacagttttgtgcagttttgggcgaagcttaatgtaaaaatttggttaaacttggtaattggggagaatgctttctgagtcttgttcctcattaatttctggaaattgacaccaaatctaaagggaagaacgaagaaagtcctaggctgtttgttctccaagcaggcctccccagccactgtcttggcaccccgtctcatatccgttccctctgtggaagaattcagccagcagaacagtggtgaaaagacattgagttggggcccaactcaggccttaaggaagcactcttcctttaggaggagatgttagaagtttgtccttgtagagctataaaatgtatgcatagaacaagcatcatgcaatatttttaaagggtggaaattaaaatgtcaagtgcagcatagtacaaatagcagggaatatttacagagtgaccaagtggtgaattttcattactgactaatgaacttcattgatatcaggtatgtggttggatctcaattctgataaaggagtttgctagggtgtgtcagagatatagacatggtcttttccaaagtgatcatttgaaaaagagatatccacatcttcaagcccatataaaggatagaagctgcacagggcagctttacttactccagcaccttcctctcccaggcaaaatgaaaatacttgtgagtatttgtttctgcttcttgatactcttgtggtgactgcttgcagacaatgctcatatctaatatgccatggatt

SEQ ID NO: 23612 - DNA, 2300 bp, Homo sapien
atcctcagaggtggcacaattttttcactaaggcaggggtccccagagttgttatgagatgttaggacaaataaataaaagaaaaagggaaaacgatcaggttctgtagtcaactaagatgagaagaacctggatgaaacagagatttttcccctataaatttcttagcccatttgatgtgtgaatgtgaattgtcagtctctaaaggggggattattggacccggaactctacctatgtatctatgtatgtgtgtgtatctatgtgtgtatacgtgtgtatgtatgtatgtatgtatgtatgtatgtatctatctatctatctatctatctatctatctatctatctgtctgtctgtctgtcatggaacatcttccagaccagcatttcacaggtccactgcagaacttcaggcccttgtccttggtatgacatgcaaaatgtgtgctgggcactgcacctgtgtaccaagatgactactggtggctgagtttaaacgtagagaccatgctacccactcattgacttctcagtgacatgaagtttcctaaagcagatgaaggcctcttcacacatgtctgccccttactccaggcttattaccttctgtggataaagagtgagtttgaaagaaatcagtggacacattaaaaaatatccagtaatactgcagctgttctaatccactcctaccaacagttttgaagagatgttgatagcgaatcaagctttataaccatgtgatcccatcttatggtttcaatccatgcacaggaggaaaattgtgggcacgaagtttccaaagggaaaatttatagattggtagttaatgaaatacagttttcctccttggcaaatttaatttactagcttcactgtataggaaaaagcaggaaaaaaattaaaaccaactcacctccaaacctgttttgagcttttacttgtctgcccaattgatagtttctactctctgcttttgatgaaaatattttttattattttaatgtaacttctgaaaactaaattatctagaagcaaataaaaagatattgcttttatagttcccagaaggaaaaaacaaacactaggaaagttctatctatcagatgggggagatgtgatggaggcagtgatatttgagctgagccttgaacaatgaacaggagtctaccaagcgagaggctagcgggtggccctccaagataaaacaacagcatgtacaaaggcatggagacatacacatcttgacttttccaggaatggtgggaacgctggtggagctagaatgtaggtacatagcataaagtggcagacgggaagcctttggaaatcttattacataggaccctggatgccattccaatgactttgaattttctgtaggctgccagcgaaatttccaagcgtgatagagtcatgtctatctatgcacttcagaaagacaacctcagggttaatgaagaaaatgcattggaatataagaaactggtgaccagagtgatcaattgcatgactgttgtgaaagtccaggtgaggggagctgtgggcaaggtcagagttgagaggcatttcagagataaaatgacagtaactaagtagatgtcagactgagaagaaagggctgtaccagatatatggtgctatcattaagtgagctcaacattgcagaaaaggggtaggtttggtgggagttgctcacaaaacatgtttagtctaagcaaaaccattgccatgggctcagataaaagttaagaagtggaaaccattcctacattcctataggagctgctatctggaaggcctagtatacacgtggcttttcagctgtgattttgtttgattttagggattattctttttctgaatctgagcaatgttagcgtgtaaaatactcacgcccacagctttgactgggtgagaagttatcataaatcatattgagtttgttgtgataccttcagcttcaacaagtgatgagtcaggtcaactccatgtgaaagttccttgctaagcatgcagatattctgaaaggtttcctggtacactggctcatggcacagataggagaaattgaggaaggtaagtctttgaccccacctgataacacctagtttgagtcaacctggttaagtacaaatatgagaaggcttctcattcaggtccatgcttgcctactcctctgtccactgctttcgtgaagacaagatgaagttcacagtgagtagatttttccttttgaatttaccaccaaatgattggagactgtcaatattctgagatttaggaggtctgcttcttat

SEQ ID NO: 23613 - DNA, 2300 bp, Homo sapien
ttctcttaccagctcccaccagtgtttctgctttcccttacccatctgatttctatagatttcctcactgtctttcaagtcatcgagctgcagtggggtcagcatgggttttcaatcctttgaggagaaagaagacatggaagaggaagacttggatggttagggtattttaatctccctccaattatttttttcctgagagcaataattcccaaagtatgggtttaatacattttatctatgaaacaacagtttcatggtcaagtaagtctgggaaacacagttcagcaatttttttcctacagaaattctcaaggctttaatatgatactaggcatatattagttatcttttattatatttaaaattgcccccaaacttagagacttaaaacactaataaaaattcgcttatttctgtggatcaggaatcagggaatggcttagctgggtagttcttgtttgggatctctcatgaggttgcagtcaagatgtcagacagggctgcagtcagctgaaggcttcacaggatgtcaggaacctatgtccaagatgggtcactcacaatgttggcaaagtggtgttggctgccagcaggggtctcagttccttaccacacggacccctccttggggctgcttgtgtgttctcacgacatggcagtgggctctcctacagtgagtgatccaagagagaagggaaaaaccacaacatctctcatggcctatcctcagaagccacacaccatcttcttaattactcacaggtcagtctcacccaaggtggaaggggtgtgaattccaggaggtgagaaacactgggttcattttggaggcaggtcagtgctacgcatgacaaatcttcaaggctgatttgacaacatgattattggttagtggagcattccaagacactaagattccatggtacacatgttgggggaaaccaccatggactgtcacattggggtataagggtctgggaggcacacaagtggaggggaatatgtgtgtctggaggaagaatcctgggaaaacagtacatgcatatgcactgagggctcccagagcggaagacaataggaagctagaactggggtaccactcggaactggggctcagaggctgattctccaatttagagaggctagcacggaacttccctgccaattccaaactgcttggagcgtctctactcttgtaagctgtttacttcctccatcctaaatcaaagatagagagaaaatgtcaaagttcacaggctgaaaagaagaactattatcatagaatccctaaaagatggagatggtggccatctagaaggctcagctgttccatgccgggagcagccctaagtaccacactctgtggggttgtttgtgatggtttcagaccggaccccaacagtctcttttatggtccagacagactaagaccatgtaaggtcactctgatgactcataccacaaaggtcccgtttttcccctacttcatctgcacaatggtttgtttgcaaaggtcctagcctggggagccggagtcaccgtggttggaggaaacaaattctcatccaatgtttagtgaccttatcaaaagatgcaggatagggaaggaaaagaaggaatagaaggactacagagaatggagaggcggtcacggaaaaagaaagggaaagtgcgtgggaagaaggaaggagtaagaaaacacgcacagctcacatgagaatggtaaggacaaggaaatttatacgcgaagcctggaagcgcccccgcccccgacgcactcccgcgggtcccacgcgtgctttcgccgcctttgtccacaaggtggcagcctttgaactttcttccccgtaagaacgcgaaaggggggcagagaggaaggagagaaggcaaagcactgcccccaccaagaacaatttgaaacccccccccccccccatcatatttaaaatctgggacaaagaaccgtcgggacggaactccttccattgcaaaagctcggcgcggcctcgggagctgcccggcggccccggaccgaggcagccctcccctttaaaagaagcggaggacaggattgggatccttgaaacccgaaacccagaaacagcatcggagcggaaaccagaggggaaaccttgaactcctccagacaattgcttccggggagttgcgagggagcgagggggaataaaggacccgcgaggaagggcccgcggatggcgcgtccctgagggtcgtggcgagttcgcggagcgtgggaaggagcggaccctgctctccccgggctgcgggccatggcc

SEQ ID NO: 23614 - DNA, 2300 bp, Homo sapien
aaccaaagttaaacagcagttggtagcaaagttaaattgtcatctctcttttaatagttcctttttttctttttctttgtgttctcaaaaattattcctcaaggcaagtggaaaaattctctcaatgaagattttaccttgtataaatagacttagaaaaataagtttgctgatgaattgaaaactaatgtttatacttacgaaattcttttctttcaagtttcacatttgagctatatgcataattagtataaaaggaaacaagttaaccatagaaatgtactgaaactatagccttattagtgacaaaggttcattcaggcccaaggtagaaagaaacaacatcccagagatgcaggctctagaagaggagttaatggtagcatcacactttcctcaagctcttaacaactatttactttaaattcagctctttccacaaacacaaaatatatattcattcatttattcattcagtgttaactgagagcttggcatatacttgaccatttgctagaaactagaggcacagaggtgagtgagatacagctgctgccctcgtgagtcaccatgaaataatggtcagccctttgaagcctacactggcagaggacttagagaaattatgtaggtaaactctcctcccactagtacaaaaagtaactctaatgaggaaatacacaaggtaatatgacagacactccctgagcatttggaaaataatacatctctatatttgaaagtagaaactcactatgtgatgggaatgcaagatggcttgattgggtgccaaataacagtcaaataaagtaaaaaccctaataaggaaagaattgaaactaaaataaatgatggggtgtcagaggcttaagatagggattagtgggaaggaattttaggtatggcacatacaaacttgggaaaatattcagagtgccagtagaaggagaccttctgaaaaagaaagataaagctcaagatataaagaaattgaacttttcccttcttgacaattctatataaagtccaactggaggagaagaatcacagagttgttgcaaataaagttgaggctacagtgagtctaaaagtttattttatcctaaaagcagcagggaaatttctaacatgaaggaaaaaaagacataagtttttgtcctttctagaattcagtgttaaacagaaatggatttgagtactaagaaagggaaaaaataacacaatcaaaatcaatatgcatatattgagcactcgctctatgtttgctatcagttattaagcacccactgtaagtgccaaggattttcaattttttttccattctgaaacacaggagaatctggaaatcagattatcagagactttaataaatcaaatattgaagttgagccaaaatctgggtattattcattatgttgccatcccaatgcttaattgtagagatcatggatttacctattcaaatatggaccacaatttccataccattaaaccactttattctgtaggaatgaaagggctttattcacaaaatatgctgacgtttatgagtatctacgtggttctagccttgtgtgaggagctctgtaaatgttctcatttaatccccaaaacacaatacagagtaaagccaggggtcaaactcaactatatcaagttccaaaggccccattcttttgtgatatcacgcccccattacaaagaaacgtatgtcagtaaaaatccatcaaaggaatggaaaaggtaatcatttccccagaatatttaacttagtctgcagttttcccttcctcccctcatctttaagcccttcatcaagactctacttcagtgtgtcttttcaagtccaccatgtgttatgttagaatgtgatgtccactgaagtctgagcttcctggggacagggattgccttctccagtatggcaccaggcacatggtaggtgctcattaaatacctcatcattgaagttagtcaggtagctccaagaggagttcatttgtcactgcttctctttctaatgtcctttctttccttttcccaggctaataggtctcgagatcttggtgcaattgtttactgtgttggtgtgaaagatttcaatgagacacaggtatggtaatggatttcctcaggtttggagcatactgagcttgtgaatcatgaagaacatgttcagtcagtgcagagggaagatcaatggaataaatgcccctgaaataggttatttttctagaaatgctaaacaggaaggaattactggttgtgtaaggaatatgaagtcatttgctgatgctctt

SEQ ID NO: 23615 - DNA, 2300 bp, Homo sapien
attcttcctgcagcccctcctcctatattgaggaatctgctgagacccactataaaagcaacagcagaattttagaacgaaatcagctcccaagaaaggccactcacttttccagtctgctcatcttactaaataaaccacattttgaagttcccagctctctgagcttttctcctgcagacatgagaagaaagtggtttagtggggaaacaaatgaatttcctacttttagaaccttgtttatcctacactcctttggatcggattctcattgagtgtgaaactaacagagtagcatctatttaagtgagtggggtgccctccctcagacaaaaactttggcatgttttaagaataagctttattgtttaagatacacaaactgcttcaaaatgtgttttgttgcatgtaagcgtggtataatgtatttggtatagtgtattagtgtacataaaatcatatatgaatcccagaaatacgtgtgtataatattccatatttgtatttgtaaagttttttttttttttttttttttagagatggggtcttgctatgttgcccaggctggtctcaaactcctggccccaagcaattctctcaccttcacctcccaaaatgctggacttacaggcatgagccactgcacgtggccatattccatttttatttaaagtcagattctatagaactgacatggatctggggtaatgtccatggttaacaatatgtgtgcctattaaagtgtggagaatttagttagaaaaggcaacttttttttttttttttttttttgaggcagagtctcgctctgttgcccaggctggagtgcagtggcgctatctcggctcactgcaagctctgcctcccaggttcacaccattctcctgccccagcctcccgagtagctgggactacaggcgcctgccaccacacctggctaattttttgtatttttagtagagacggggcaactttttaaacattttattaattagagattaaatcatttcaaaattcatggggacaacattgacagtcctgaagatgtgtttgagccagttgtgtgtcccaagctgcctggctatccccaggcttatccaatgtgctttctgccatcagctgtaataatgtttgtggcgcttctgtgggaggctgggccccacctgccaactacagttctctatgtttttcccaagaaaaggggttgaggcctttacaaagcggccgacctaatacaggggattatgatatgcctacaacatttttttttaaggtaagcaattttttaaaaatgaggtgttgaaattggcctcttgggaaggcagcaagtccccaaagatggtggtacttaatcagacgaggggagtattacaagatgcagcatatggacttgtattcagaagaccctgaggttacacttatagggggaaagggagattaatacataatatgctacaatgccagtttattaagacgtgcaggaagtgtgtcatttattcatttatttatccaatatttatttaatgcctactatgtgccaggctagtcattgtgaatataataagtaaaaacaaacccagtccttctccttgtagagtttataatctaagaagacagtgaccaaacaataaaaaaaaaacactgtaaattataaactaggataagttatctaaaggatggcagtttacattaaaatgtgcatggatatagagatatttcattggtcaaatcaccagcacttaggtggcagaactcatattggatttggagagtgacagagagagcaaggctaacttaaacgttcaggtttttgtcttagacaactgaacagatgtaaatggtcggtagatacttaaccatccttgacaccagcatacttcaaaccccatacatctttaaaccagaatttgccctttacaacaaataagacaccaaggaacatgctctgaaagactttctgaaatatgtgtgaaagcaaaagacacctataccatcaagggataaaagagattggtccattataaacacacaaaaaagttctccaacaggaaatggccaagtaaataaagattggttgtttattaaagcaagaagcagagcaagtagaaaaaagaaatgccgtgcctatgataagggagggattccttataactctgtgcagatattcacagttctgtaaagattcttgagaaatctctgcataaactgagaacttcatgacaaaggacattagatttttagaatttgaaaaaataaactcttctatacaacccggactggtccacagtggatttcacttt

SEQ ID NO: 23616 - DNA, 2300 bp, Homo sapien
gtttctataggcttaactgagcaaataagagaagataagattcttctacaagtgcttgacacgtactaaattgcttattgagccaaccaaggaatctgtcagatgcctgacagacatctagagaaaactactaagcccatctttctaaacgtagcaattgtgcatttgcatcaacgtgtatgtataaatccttcatagtcataggacttatgctcctgaaaaaaccataggcccgtcaccttagcttttggatatgagtcccagtttttctgctttactaatgacatgactctgagcaagtcattcaaaatgtcacagtctccatttccttattgtgaaggcctcttatacttctaaaaagcattcttttctaacttatactccttgtggcacatgtagtgtctctgtattcttttacttaaatttcagtttcttgcttcacatccaggcctgttccacttttctgcaaaatgagcaaacctgcctaaaattaaaataaaataagctttaaaaaaaatcacaacttcaactcctaaatgactcatctgtcagaaggcagtgagtcccccttttcgcatggtggttcagaagctaatggctgagttctaagggcatggcatttggtgcctaacagacctcgattccagttctgattctgacaagttaccagctgtgtgatcttggacacattacttaacttcactaagatcagttgtctcatctgtacctccccaggctgtggtgaggtttaaatgacatcagacatgtacaatatttcacagagggcctggctcacattgagggagcaattagcattagttattattgtcttggcaaacatggcctctaaattagtttcctgggactgaaggtggcatatactcatgacatttattaagcttcgagagtcccatatactaattctctaatttcattattcctccaacaacaagtctacatttagatggcaatgtactgtgtaagatccatattcacaaacattgcattttttcctctgaccttcagtctatttctcttgtgatatgccacatagcattatcccgagccccaatttttagatacaaaaggatgataaaagtgaaataaagtggaacactgaccattagataccaacaaacttaagcaaatattcccaaacatttagccaactaattattgggttttttccatggtaggagtatggtaaaggagagttgtttttacttaataacgattttattcatgtgcattaatcaaacatacattatgccaatgagaaattaatatgcaggccaggcaagatatatgatctcttctatgcagagacaaatgagtactacactgaggggctgatatcaattcaagtaggtagtgcttggcaactgaccactgctaagaaagactttgattcattcctaagtacaattattcctacctagcctatgtactgttactgtgtgcccagtagagataggaatgccatagtggtatcaaacaactcctgacctaaaggaatgtttctccagctggggaagaaaagacaagagaacaccaccagaccatacataatgacagtcctacattgttcaggactagctgtgaatgccctaaggcagtgactttctaaaatgtaggcaccgtgggctcttaagaaatcctttcaggggagtacaatgtgcaaaacagacacagaggaggtgagttgattaaagaggaagtggaggacccctcccctgtggctccctccggctactgagatcacagattttcaaactgcctggatttgaaaactggctaagatttgaatggacagagaggagggaggaaggtgttctgcgttaggaggaccagtaagcccaaaggtaaaagggtgggaattcaaataagaagtgataggcccttcttgggacacctagtgaggatgcactggtaagtagtgaaaggaacccacctggttgcttttggtgttcaacctaaattaatttttgaatattttaagcctggtgaaatagtgaacaaatgctctaaatcagggcagatgcgaagcttaaggttattggccaagtaacgagtctcgtcattattctttatttcagagtcatttcaagttgtcgtgagaggaaacggcttccgacatgcccgcaacgtggacagggtcctctgcagcttcaagatcaatgactcggtcacactcagtaagtccttgcagagtccatgggtttcttcgacaagtggcttcaaggaagggaattcccacccttgtcttccagcaaggccacacacatgaaaccagcagaaaa

SEQ ID NO: 23617 - DNA, 2300 bp, Homo sapien
agcctcactggccctcttttagctctcaaaagatctggggtccttcttgccccgggatctttgcagtgcctccccctctcccactccatcccatcacccaacctcaggtttcagcttaaatagcctttccttggggaagcatttcctgacctcccagatgagggccagccccctcctccttttgtgtgctcatcacaattataattacataacaatttgtgtaattactagcatgttggctccttggacaaggtactttatctgtttcgttcattgcaagccttagcacattgcttggcacatggtacacactcaaagaatttattttttaattatgttaaataactgtctctcctgcctcctataaaatccatgaaagcagagactgtgtttctcttctcaaagcctgcatctctagtatatagtaggtcttcaataaatatttgttgaatgaatgaataaacaaatgacctggaataacctccctaacttttcaccacttgaagattttcctgtacatcttcttcctcctcttgccaatggggacgttgtgcttagcactcagatgtgtcctctatctcccatcccaggcagcttcctaaccttcactcaggcaagagtttaatgtcagctatattctgcagtcatgacttgcagatatcataagcgacatcagtgtcacaacaaaagcagaatattatcctttaataatatatgtattcctttgtatcttctagttataggaacttgtagtcacagcctgattaatgacatagatcttattcatcttcatttcacctgtaggccctaccacagcctttttgtacagcacatgtacccaatcaaagctgaggcttgaagggatgactattatatacttagtataataacttctcaaccctgtctctggccccagaaactgggatacaatgaagttcttagtgagcttgaattgaagccactttaagctttttcctggtcatccattagaagaagcacaagaacttccctactccaagagtccccgactctgattcaccttctacagctacatctgctatgacctccaaaatcatcacttcagttttactcaaaaacccaccaaagttctttctataacttacagaactttgtgcaaatccctcaggctaactcaaagaacttgaccaaactttctatactgatcttttcaaattcttcttatatcctaccttggaacatgcctttagtatgccctgtctttgctcatgccattcctccaaccaagaatgtctcttccccatctctgcacaaaagcatagctcatgttttgtgctttccgaagacctgactatgacagccatgtacaggaagcttcctgtcttatgaagcccaatgatactttggtgaagtcatttgtcagcaaactttttccacaaatatggcttatctctccaactacccttagacgtggaactccttaggaccagtctaatattttcttgtttcccctcagtgattcctgctctatctaggagttcactcactattttctcaccagttgactcaactgcacataccacaggaagctatgattcaggcaggagcacttgagttcactgctaatgggttttacagctcaagagttttgtttttgtttttgtttttttattattattatacgttaagttctagggtacatgtgcacaacgtgcaggtttgttacatatgtatacatgtgccatattggtgtgctgcacccattaactcgtcatttacattaggtatatctcctaatgctatccctcccccctcctcccaccccacaacagtccccggtgtgtgatgttccccttcctgtgtccaggtgttctcattgttcagttcccacctgtgagtgagaacatgcggtgtttggttttctgtccttgcgatagtttgctgtacagcttaagtttttaagctcaaaaagatttttgtttttttggtatctccctggacttggttgatgttctctagaagtcattgaatttgaaattataaactcacctccctcttcttaatccagtgatttcctttttgcagatgagaagcccttttctgtggaagatacttatttactgtgtccagcgcctatcttaaaagaagttggcatgtaagttttcaccagcaactgaacctcccagccagggaagagagagaggaggtgtacggggacaggggaaaagaaagcatctagagaaagtggagcctttctctaggttcctccagcttatgacggagccagtgtttacagtgacccagacgccaggataagtgtt

SEQ ID NO: 23618 - DNA, 2300 bp, Homo sapien
ttttatagcacaaactttaaattcaagctgctttggacaactgacaatatgattttaaatttgaagatgggatgtgtacatgttgggtatcctactactttgtgttttcatctcctaaaagtggtttttatttccttgtatctgtagtcttttattttttaaatgactgctgaatgacatattttatcttgttctttaaaatcacaacacagagctgctattaaattaatattgatatattcagtattctcttcaactttgtcacgaggaagaatttcctgtagttaattttaactttccttcattacattgttgcataaaactagtcccttagtgccagtttggaagttacttgcaattgtttggaagatttgcaggtcgctgacctcatcatttcactctaagtatatgtggtaggctaagctcagaaaaaggtatgtatgctttacactgataggcaccaaatttagtattgtatcctaagtatttttcctcttctgtattttctgtgctctacccctgaaatatatttaggaataaagaagatataaataaagtgatattggggtatgttcagcttgtaagtgtcagaaatggaagttgacaatttggattaaaatatttaaagtagaatgttattatttgatacccccaaaattgtgagtaataatttcttaatggagcttttctggccagatcttcagggctataggagagtgtgtttgtttttggtgaagtccttctttttcaaaggtttttacttttaaattgtgaagataagctatttagcacaattatttaagtaagctgttttttcctttcttttctttcttttcttgttttaacttctgggtgaggttaagattttctaatagttattgttgttgccagagaagcatagaattctgcttgtgtcttagggttagagaaagatttgttatattttgaggtaatttggaaggactttcatacatggtgactagaaacctgatctttttaagaataaaatagggtcactatttacattatatataatatatggctattatagctatattaatctactttaattgtttctaagattattttgtgtaagtcagctagcgtgtgtatagtgtcatttcttatgttttgtatattaacgttttacaaacacaatttgtgtgggtttgtagcatttcttatagtttaaagtatgattcagcattctaagttaaaactaatatgtgaagtcagtcattagtctgcataatctctgtctccctctgtgtgtgtctttctataaagcacatgtgtacacacacacacacaaatatactgaaagctagggtaagttctaaactgaatatcaaaaaccaaaatcaagaacaaagaagtgatattttccaaacaaacatggattctctgccgggtgcagtggctcagcctgtaataccagcctccactttgggagtctgaggtgggagtattgcttgagctcaagagttggagaacagcctgggcaacatggtgagacctggtctttacaaaaatttttttggccggacgcagtggctcacacctgtaatcccagcactttgggaggccgaggcaggttgatcatgaggtcaagagatcgagaccatcctggccaacatggtgaaaccccgtctttactaaaaatacaaaaattagctgggagtggtggcgtgcgcctgtagtcccaactacttgggaggctgaggcaggagaatcgcttgaacccaggaggcggaggttgcagtgaggcgagatcacgccactacactccagcctggcgacagagcaagactctctcaaaaaaaaaaaaaaaaaattttttttttaaatgggctgggcatggtggcttgtgcctgtagtctcagcaacttgggaggcttaagtagtaggatcgcttgagcctgggaggttgaggctgcagtgagctgtgattgtgccactgtgcttcagcttgagtgacagagtgagaccctcctgactcaaaacaaaaaacatggtttctcctctctctcctgtcttcttactctctatcccatttgatgtagtgatttttaaatgcttttgtaagttaattcttaacacaaaagagacattgtaatgaggcacaccactaaagtgagcatgcccaattaaaaccagtgtaatataggataagaaaatctgatttttcaaaaaagatactctacataaagaatccttcatataaaaagttctttcttgtagtacatttaaagttttaattcactcatgtataactgagagttcctttgagccctttttag

SEQ ID NO: 23619 - DNA, 2300 bp, Homo sapien
tcaaattatttttttatttactttttttttaacttttttttttttttctgagttggggactttccagtctttactgaaaacttttaaaaatttgtatttagacaaattctaaaagacctgtaacactagtttcttcttctcaactgattcataaatatcttccaaaatagtttgttgagtggagatggataagacaaattgatagtcattgtggtggagtagcaggcagaagaagaaagcaaagggttaaatagattactatagttggagcatgagaactctggtagtactgctgacattttctttgtggcattgacaggtttgctgccagtgcacaaagatgttgcttaagcattggaaccataccttggcttttaggtaatacaacggagttctaaccagagccttagatgagggttctgaggctagatgtatatccacagtcttttgtttcttgaattaagaaatgtattattaccaaaaagctcactgttttttttttttttaaactttgctctgggtgatccagggacctgtttaagggattgaaatatcaaaagggcttttaggtgagaaatactctgcttagttaaatgtgacatttttcagcttctctgaggcaagtgaaaaaaggcacttttccccgtaagaagaactgaaagccttatgctcacttaatcatataaccagccatagaaggttaattccgctaagaaaataggactttttttcactcattccaaaataaatttgatcttttactttgtgctgtggtctaaaagtgttgggtatgtaaaatctagttctagcttcaagaaacttacagcccagtgggaaaatacagaaaatcataaaatatcaaagaatatttctttacagtgagtagctcaaagagtaagaggttaatgcatgtctccaagtctgtctaggggggataaaaaaggctttcctgaagaggtagcatctaaacagagacgtggtggggattctatgcagagtaaccaaagtgtgcaaaagatttgagaatcttggcccagttgaggaactacctgttgagcctgttgggagtgtatagggctggaaggacggctaagaccagacacatgaacagcagtcagcaggctaagaccagacacatgaacagcagtcagcactccaggaattctgtgtgccatgtacgtttttgatactactctactctagagccattatagagttctgattactccacatttgactaaagataccatttaaggctgtttaaagcaaatgcccaggtaataaattctcagaaacatcatccctctctaatcaagtctctcttgtcagacatggcgcattaattcatagaatgaatcgttcgtaagtcaaacgcgcggctgttaaagctagggaattcctagccgtctcaggtgggtcatgggaggaggtgggccagcagtttcttacgtccaggctcatagtcggatagttgagccttacattcctcctctacccctccacaataaactgagggttatggaggcaacggatgcggagggcttttaggggccaagcatattacacaaggaattgaattgcttattaccagagaggctgacctttggggctttacagtcaagaattttgttatctctctcctcccacctcaacctaattctttgcaatttttttcagccttatgttccccaggattcccttttcatacttcctgcttttttcctcctctttcctcgcttcgtgcagtgctggcgcctggggcctggggctgcacggggcacgcacccgggctattgctttgctaacaattccatccttctctttccgtcattccctgccaggtgctgagtttctccctccctctcggctcggtccctcccgcggctcgccccggggcgggcgtctccaggaactccaggcggacgcggccacgagccactgccacgtcgccgccgccagcagtccagcgcctgcgtgggctcggggggcggggcagcgctgggaggcgggacttgcgcgtgagcggcgcgtgagcggttcaatggagcctacgggcggcggcgcgctgcgcgccgaggggcggggcccggcggcggttgctggcggagcccgggaggcggagaaggctgtcgttgccttggccgtcgcatccccgagggagtcgtgtcggcgccaccccggcccccgagcccgcagattgcccaccgaagctcgtgtgtgcacccccgatcccgccagccactcgcccctggcctcgcgggccgtgtctccggcatcatgtgtggtaagggggccgggag

SEQ ID NO: 23620 - DNA, 2300 bp, Homo sapien
gcaccctgtcaaaacggaccaatcagctctctgtaaaacaaaccaatcagtactctgtaaaatggaccaatcagctctctgtaaaatgggccaatcagcaggatgtgggtggggtcagataagggaataaaagcagggtgcctgaggcagcagtggcaacctgcttgggtccccttccatgttatgaaagctttgttcttttgctctttgtagtaaatcttgatgtggctcactctttgggcccgtgctgtctttatgaactgtaacacccatcgcaaaggtctgcagcttcactcctgaagtcagtgagaccacgaacccaccagaagaaacaaactccggacacatctgaccatctgaaggaacagactctggacacaccatctttaagaactgtaacactcaccacaagggtccatggcttcattcttgaagttagcgagaccaagaacccaccaattccggacacagtagcacagaggctgtgggtggtttgactagagcaggccctaagaatggtgggacatagaagcctcgtttcaggggtttgaggagtgggaagtgaaaaactagagactaagagtgcagaccatttttttaagccacttggttctgaagggaagaaaagagtgtggaagaggatttggggcaaggcaggatttttcttatgataaggaatccatcagagagggaaaaattgaagtctgagaagaacgattgttccaaggtggaagagccacattttatttttgattgagggtcaaaaacagagccttggactgccttgcggtctagaatgggtgtgtgtgggggggtgggtggggggttggatgggggaagatcactgggtggggggttggatgggggaagatcactagtagttaaaagcaagtacgcagcattgggaatgaaccaaactcgtaggaggcacagcccactcagtgtgcgggcccgggcgagctgcaggcctgaaacccacccaccctcttagatgtgtctgtgggccatagaaattactagggttgtcttgggtgtggcctcaacctgttcaacaacaggtgtgctgtttccattctggaaaccagtcctctgtcttccagaacagtgattctcaaattttagctggcatcagaatcctgggaagggtttgttaaaacactactaggcagggtgaggtaacctaagagcttttggaggcccaggtgagagggatcacttgaggccagcagagttcaagagcagcccaggcaacacagggagacctcttctctacaaaaatactactactactactgctaataaaagccaggcaccgtggctcacacctgtaatcccagtgctttgggaggctgaggctggaggatgaatcacttgagcccaggagttggttttggtgagctatgatcgcactcctgctctccagcctgggcaacagagatagaccctgtctctggaaaaagaaaaaaaaaaaaagcaagtaacaaagatttctagtccccacctacagagattgtgcctcagtaagtataaagtggggcccaggatttctaacatgttctaacgtgcatttctaacgtgttctcctgcttttttttggcccctagtccgcactttgagaaccgttgtcctagagaaaacggaatactccaggaaggttctggaagaataggtaatgggctttggcactctgccctggaaactagtcaagtctcatgttaatcggagaagggcagcactgtaccagatacatcctctgtgcgggttggtccaagatgaccaagtggcagctgacaagcacagctatgaggaagggttagacacagttccacatcagacccatgggaaaagggcaggagaaatgcgagaaccttttagaaggaatgctccagggagtctttgggggcagtcactgagctgggcctggaggctgagtagggtcctagaggagggaatgggtcaggtttaggggctggaaacagcattcgcaaggcagcaccagcaccagctaaaaacctagccaacagggaaaacaaagtacggaaacacgcatgcgttcacagtgctgcgtgaattaaccaagcgttggcgcaaacgggaaaggttccccggcctctcttggtcagggtgacgcagtagcctgcaaacctcggcgcgtaggccaccgcacttatccgcagcaggaccgcccgcagccggtagggtgggctcttcccagtgcccgcccagctaccggccagcctgcggctgcgcagatctttcgtggttctgtcagggagacccttaggcactccggactaaga

SEQ ID NO: 23621 - DNA, 2300 bp, Homo sapien
actctgttcaaactagtgttcattggattattgacctgtatgatgccagagttggtcactggcttgactaagttttccattttttttccctaagagatattttgctctcctgcagaacaagcttaataacatcaactttcaaggtagttttggaagatgagaaattgtgcttttgttttggcaactgaaaactttgtccaactgatactatgtgaggaaggtggttcaaggagttttagggccctcttgtccttctttaaggctctgcaaaccttattttggaaaacttatttttctcccttttatttgaatttcctcccagaaattatcatcttggtatcactgagacaaatctaatatcaatttacttgcctgagaaattaggattatgtctgtccacataaatcgcaaggaagaaggtattctgtttatttcctgtccactgactgatgctttcgtatcaccatgtagctgcacatactaaaattataatacaaggaaaaatttattcttttcaaaatcttattcttcaaatactattctgaaagccatttggcaccagtacagaatttaacttaacgccccaatctggaattcactgaacgcattcaaactgttagaaaggaaaataaaaatggaggacaaacacatttttgttctgtttctgaaaacaatatttaaggtcagaactgtttaaaaagaagcactgctaaaaagttataggattcagagaaacatagtatttttgtacagtatcttataaaatgttcagacctctctctacattctctttacaatgtaatgtctctaagtgactggtttcccaataaactgattttaatgcctcttctgctgtggtctgtgtgcttaattcatgcagaaactttagcaggggataatttttggcagaaatttctgctagctaatggtttgcataggaggggagagggtcagtatgggaaggggatcattgagttccatctctacagaggttctgggtcatctatggctccaaatcattgtatctaatattcttatcctggtgggttgggaaactccagtagtatctctttactgagcccatgatgaaatgatacctttacccccaaccaccctttctctggattcttcttgcttagttacatatgcctttttcctgccctcttgctaacatgtgcccaatgacatacttctaacctgctaatatttcttggaaggtaagctctcttgcattctgataattgtctatttgattttaaaagccagagcaccctgaggcacctctacctagatagaaatagactagtatattggagtttgctaatgcttctgtaatggcccatgcattttactccttctgcttaaagaactttatggcagattcatttaagcagaggagatctttatgaacttagaagactgaaaacaaaattctggggcaactccagctgaaggtgatttatttggtctgattttgatgctgtatgctcccctcagaaggtaccttcagtatttatattttgggcactcgtatgctctttgagtagtgcttgtgatgtaagtcatcaagtaaacttgcatttatcaagcagccacattctgcttcttttcagagagtttgtccctctgcatgtggcgcggatgaccacatgccagattctgaattgagtcatccccagacagtgtttctacataatccaaaactgtcatggtatatgtggagatgaatgactgggtttgttttcattccataatgagccagtgccaggtagagcaggtgtccgtgcctggccctgtgtgtaggagcattgcatagttacgctgaatgtctgtgtgcctaacatcttcatctcctttcctgtacgtcgtgcctatcatgttccaaaacgtgagacagtggttgattgtgttccagtttgtgtgcagtttccttgcctgacttttatttttatgtttttcctgttgcattttcaacatctattatttggtcccacaatgtttttgccgcgggttgaccattaaatgttccaaatagagttgaattgacctacacattaattctgcattttatgcttttctagatctccagagggagtccaatccctgtcctgtaataactgtagagcactttaaagaatcactgggtgttaaaggccttccgctgtatccagacccctccagagtacctggcacaaagactcagaacaacttagaatctgactacttggccagagatggcccttcaagcaacagctcattccacagcagcgaagaggaagggactgaccttgaaggagaca

SEQ ID NO: 23622 - DNA, 2300 bp, Homo sapien
tttgaccgtggtgtttatttagagagaagtctttaacagttggccaaaagttagtttttaccatgaagccaaaagcaaaatgatctttagtcagtggaaacctgaaggtatatatcaaaagcacatcacattttttatcatgattagaataatccataataaatatttttcccaaagagattaacagctgtgttttggtatcattcacatctttttgacattaatggagcatcctttttcaactttgatggaggaaaatcatgtgaacatgccataaaacactaaattaccatgggaccatctatttattttttaaagcatgttcttattgcagtatcttaataactagtttctccccaaagcaaaaattattgatttttactttatcaaagggagatggcttgatattatcaggaagttggtatatagccagcaattctcaaccaaaaaaagtattgatttgaaaatagtgccctctttgcaagatgtcctacctatactgtggtgtgcacagagtgcctgagcttttggtgggaggtggtggacagctaacttacatgtttcaaaatcaacgtgtaagggtttgcaaatgtaaaatattgcttctctagggtttggtttttttggtttttttttgttttggttttggttttggtttggtttttcttctttgcttgctctgcacatctaaaccttaaccctctatgttttgtactgaattcctatctctccacttccaggtgggcactctagaaacagcagtgggagctctgagtccagtcttcccaacctagccaggtctttactgctggtggatcagctcatagacctgtagccgtgacccagtagcagatgcagttctgtaaccttcataccgtaaaatacattttcattacggagttatgaaaaaaatgatttttttaaaaaaatctgcaaataaggggccctccagcccttttctcctaccccttgccttctcctgtagaaatgataaggaaagaaaatcactttggccctccagatattccttggccagttcctccttgttagtttgctgtgttttctcattacccttcttcaatagcattatcttaaatcaagcactagatgccatgagcttcacctctgctggaatcaactccaccaaaagcttaactgtaactgaaactagtgaattgacacttttgtctcgttcttgctaggaatggcctcccagatcaattctcccaacccccgtctcctttggccagatgctgatgaatgtatttccctgtttttgctttttatcctgatgcattatcatgaggacatggctacttcagttggtcttaactctaggcagtagcctggagatgggtgtgtggtttaagaaagggtaaaacttactgactggtagtatatatttgagaagagaaattgagcccagctctagccaaccaactttgaccttgtttgatcatagacttagccaagggattttacaccccatgcaacctgcccagcattcgtccagctttctggcttccattgaaccgtgatttctcagatctggagacgtgactgcaagtatttgagatccttggatacaatgtgtacgttatataaatcccaagtattgccattccttttcatgttaactgttccaagtgggatctcagaattagaccaaaacaagacggtggtaatatgataccttttattagaagacttttcactggggcgggggtggggggaggatggggaggggaaggaattgtagcagaaacagatgtatttttcttgtgatttttattttgaatcaaatattgtaaattgtgtataaatgaagatgctgaatagttctgtttccacttggcatttcaagtctgatatcaggtgtctgtacagggttttgatttctttcccttgtataactacacaacaatcctacagtgtaacatatggaatcattttgaatagacttgtgtgctataagctttcagcaggtcctctgtctctagaataagcatgttgtttattttcagataatcagaaataagtgtgctgacaagctggacacaatctgggtgtgcccagcttacctttctttctgatgtttaaattgaaggctgcagccaatggaatatgttcagctggttttccttggcttcctagattaaaaaaaaataataaagcatagttctttattaactttaggatattgttcataaaataaataaaggcccctgcactaacatgacaacatgcctcatggtcaccctctctatatgtacttactcattaaagtgtattttatttcc

SEQ ID NO: 23623 - DNA, 2300 bp, Homo sapien
cacagctcagctcaatattcagattagagaaagcaagaaccatttttttccctgggacacccttctctactcaaatacccgctgaaaaaaaaattctgagacaagcactagggagtggggaaagcgggcagagatgaacaataacccatattcaggggttagaaaaataatattaataaatcatggtaggtttttttgtttgtttttggcagcaacttgccactcttcagcatcatccatcaggaaatctaggtcggaaaagtgtaccaactgaccttccaaattttctgcatttggcagatgcaaatcacacagtccatccccgccctcagcacttggacggtatcagggaaacgtaagtatcaatggaagaatcttgaagtgaaaaataaataactggtcaggttagggttagtgttcttgtgtgcaagggagctagtgaagtttaggctttgatgcgcacccacagcgtcagcaaaggaggaggaattaagggacagcatgggccgaaaagcccccgagttttgaggtcaagccaacgggctgggtctccggtatcctaggatctgccctgcacacaacctttggcagtttctcggtttgaatctcgcctgtacatttccagacgagacactgtcttactgagcgttctcacagcgcctagctcagagctgaccgcagagccggctctcaataacatcgagacgcaaaagcagcttttgaggttaggggcggaagggcatcggttttacttatttcaaggctggcgctcggtgcagccggatccaactgccagcacaatgttcccgatcacttctcgcttccatttcagcccaggagacgtcgggaaacccacaggacccgctaggggctaagcggttaagccgcgtccttcaggtgtcagtctcgatccgttcggaaaccacaacctccagaatcccttgtgccaggaggccaggccgcaaataagatggctccagaagggtggaacatacagcgggggggggggggggggaacttagttgttggcagtttcttcacgggatgtgtttaaattgccgagtccccacatacgcgccaccccacaaatctccttcgaggccgtggaggccacacggctgccgcctcgccctctcctccaggagtatgctgggatttgtagtccagcagccggactgtgccgagctacctttcccagcttgccctgcggctcgggtgatatcaacagtcttttccagaactctgtctgcactgagaccctcttcccccagtcctcttctcgcggtcgactccttcccatccgtggcgacagaacggcggttgcaggagaggccccggtccctcgccgcgccgccccgaggggcacttccggcggcggttcacttcctggttgggtggatggagccgggcgggagcgcgcgcgggggaggggcggcgggtcagtctccgcccggcgctcccgggatcagctggcgggcgggcgggagccgagcgcggccccggctctcgctgcagcgccgcctcttctctgcgtcgcaggccggcccggcggccgtgacaatgtcgcggggctggtagcagggcgccggccgccgagccgtctcaagtgggtgctgccaggatgccgcctcgaggggcggcggggagacccgggaggagcgggaggcagtgcccgggagggtcggcgctgccggagcagctcggatccctcctttctccgagctcccggctcgggggtcccgggttctggggccggggtcgcgttttcagccccacggtttttctcgccgggaaaatacatgaagcgtttccccaggatgatggcttttgctccccctaggactcagcggttgaatttttaagcgtgttactgattcatcctctctttcttcctctgtcatcacaggtttaaacttacacgaatcgctttctggaggaggaggggacccgctgcgcgattgacacgcatattcctataggcatcctccctcagcccccacccccacggccggattcgggtggctcctctccgaggtgaaatctgagaagaaatccttggatctcttttcttaaaaaaaaaaaaaaaaaaaaaaaatctagaaaccatcggtattttgctttgctgctccctattcgcaagatgaagaagtttttcgactcccggcgagagcagggcggctctggcctgggctccggctccagcggaggagggggcagcacctcgggcctgggcagtggctacatcggaagagtcttcggcatcgggcgacagcaggtcacagtggacgaggtgttggcgg

SEQ ID NO: 23624 - DNA, 2300 bp, Homo sapien
ttttatagctgagataataagcccagtgacacaagtggtctaggatcccagctatgaagtggcaagaggtttcctgtctcctggtcctatgctgcttgtgcgtgggtttctaactattcacgagtcttttaatcagttaatgtttgctctctctaagtagacagtttagtatagccaggtaagaactgggctttgaaactaaaatgtttgggtttgaatcctggctttgctatttactgtgtgactttgggcaagtcactaatctctttgctttacttacccacctataaaatgagtataataatggtactttacttcatagggtggttgtgagcattatatacttaatatatgtaaagcatgaaaaactgtggatttgtcattataattgctattagtctgtgagggaatggagggcaaggaatctagtcatgttttttgttttttaaacctcttccctcagcttctgatcagagcattcacgtgggtgttaaataaatgcatgttagctaccttaagcatattgggagtttttgtatcactgaagtaagacttgagatttgtgtaagcctggactagtctggtaccagagaagtctagaaaggtaaaaactgagatagcatcagattgattttaggacctagcacagcttgtttaaaaaagtcagtcaagacaaataagtgctgagagaaatgggggtcaatgagtctaattccaaatgagctttctcatctattttaagatctgcttcaaacttcctcagacaaaaatctggccttttaaggaaagtgcagagaacatgccttcgtgggcttagtttgagggaataggggctgcatttcaccctggaggtggctacatgaattcgtgaactgaggtgacaacactgactctctccggaagaaaagatgctatctcttcacggagtttaattacaatggcactacttgaaacaagctgcagcagcagcaacaacaaacgctactgttaacccagtcacagctcagctcaatattcagattagagaaagcaagaaccatttttttccctgggacacccttctctactcaaatacccgctgaaaaaaaaattctgagacaagcactagggagtggggaaagcgggcagagatgaacaataacccatattcaggggttagaaaaataatattaataaatcatggtaggtttttttgtttgtttttggcagcaacttgccactcttcagcatcatccatcaggaaatctaggtcggaaaagtgtaccaactgaccttccaaattttctgcatttggcagatgcaaatcacacagtccatccccgccctcagcacttggacggtatcagggaaacgtaagtatcaatggaagaatcttgaagtgaaaaataaataactggtcaggttagggttagtgttcttgtgtgcaagggagctagtgaagtttaggctttgatgcgcacccacagcgtcagcaaaggaggaggaattaagggacagcatgggccgaaaagcccccgagttttgaggtcaagccaacgggctgggtctccggtatcctaggatctgccctgcacacaacctttggcagtttctcggtttgaatctcgcctgtacatttccagacgagacactgtcttactgagcgttctcacagcgcctagctcagagctgaccgcagagccggctctcaataacatcgagacgcaaaagcagcttttgaggttaggggcggaagggcatcggttttacttatttcaaggctggcgctcggtgcagccggatccaactgccagcacaatgttcccgatcacttctcgcttccatttcagcccaggagacgtcgggaaacccacaggacccgctaggggctaagcggttaagccgcgtccttcaggtgtcagtctcgatccgttcggaaaccacaacctccagaatcccttgtgccaggaggccaggccgcaaataagatggctccagaagggtggaacatacagcgggggggggggggggggaacttagttgttggcagtttcttcacgggatgtgtttaaattgccgagtccccacatacgcgccaccccacaaatctccttcgaggccgtggaggccacacggctgccgcctcgccctctcctccaggagtatgctgggatttgtagtccagcagccggactgtgccgagctacctttcccagcttgccctgcggctcgggtgatatcaacagtcttttccagaactctgtctgcactgagaccctcttcccccagtcctcttctcgcggtcgactccttcccatccg

SEQ ID NO: 23625 - DNA, 2300 bp, Homo sapien
gcatgcatgcacatgcgcacacatgcacacacatgcatacacaaatgcacacacatacatgcatacacacacatacacacacattcacacacatgcatacacatacgtgcatacacacacatgctgcacacatgcacacacatatacatgcacacacatacatgcatacacatgtgtgcatacgcacatgcatacacacacatgcatacacagcatggcctctgcttgtccttccagagtctcttataaagcttttcctgatattccaagtctcaagctagctaccctccttttttttttttttgtgactgagtctcacactgtcacccaggctggagtgcagtggcacaatctcggctcactgcaacctccacctcctaggttcaagtgattctcctgcctcattctcccaagtagctggaattacaggcacctgccaccacgcccagctaattttttgtatttttagtagagacaaggtttcactatgttggccaagctggtcttgaactcctgaccttgccacacccccatttttacagttttctaaccattgactattttccagtcttttttttttttttttttttttttttgaggcagggtctcgctctgcacccaggctggagtatgatagtgcaaccatagcacattgcagcctcctgggctcaagaaagcctcctgctttcagcctcctgagtagctgggactacaggtatgtgccacaacatccaagtaatttttaaaaattattattatttttttttgagacggagtcttgctctgttgcccaggctagagtgcagtggtgcaatctcggctcattgcaaactctgcctcccgggtttgagtgattcttgtgcctcagcctcctgagtagctgggattacaggcgcccaccaacacacctggctaatttttatatttttagtagagacaggtttcaccatgttggctgggctggtctcgaactcctgacctcaagtgatccacctgcctcagcctcccaaagtgctgggattacaggcatgagaaaccatgccctgcctaaaattattttttgaattattaattatacaaaaatcattagttaaaaatcattaaattttgtatttttagtagagatggggtctcactatgttgcccaggctggtctcaaactcctgcttaagtgatcgtcccaccttggcctcccaaagtgctaggattacagacatcagtcactgtgcctggcgaagtctttaccaattggcaataagctctctggttgtcattacagttccaacgtgccaggcaaccagtaaatgatcaataaatattggcattttgggtgaatacataggtcattagtgctactgttctgctttgactctcattcagattaggaacgagctccccctccaaataagcaagcagactagagactatttcctgagaatgtaattccgattcaattcagaatttgtttcatatgctcaggacttggccctcggagggctggggagagggaaacaagcaatactaattgtaatctctgccttcaattttcccctttttgaacatagtactagtgttggccacctctctgcactgcttcaaatccccccggtccctcctctcgctccatcagtgccttggtgaccactttcacgcaggctttgccaactgcacatgttcaaaggctcataggtgaaagagcacagtgcatccatggaacttcaagaaattcaggggagctgaagcaaagttcattcacggtggggaggagcagaggcagtgaggggaagaagtgaggatggagggctctgcatgggatgcagcatgaaggaccttccaagagtgcaaagttatgtatcctgatggcaaggggcagccatggaagattttgagtagggaagtgacttgatcagatttatgtttttaaaagattcctcttgctgcaatatgggaaattgaccagagggggcacagctggaggcagaagtccagttggtaattagacattctcaatctgcctatatgtgaacatcattaaagaaatacccagaggaggggtccaaatgtcactttttttttcttccaggtcccctcagtgattcctgtgtgcacccagggttgagaactactgcataagaggtcctagaagatatctggtatggccagagtacagagggaccggaggtaagccaggagagacatgcagagcaaagagttgaggtctccatcttctgtgggcagcatctggcctgttctgcttcctctgattctcaccaaagtgttggcccaaatgatttttaaat

SEQ ID NO: 23626 - DNA, 2300 bp, Homo sapien
gagtaagtgagggaaataggataggccagagggagaaactgagcaaagatatggtttctgatgaagtttatcctcagtctgatcccatgggaactctggcatatgaagggtaccacagatttattcctggccttttataagctaaaaaagttagcctctggccatggcttcctcagtctggtctgagcgcagatgtcagcagatgggggcaatgaaggggcagtgacctggggctggatgcacccacctagtaaaggttatttacgcggggtgccaacgcatctacttcattcctaaactttatttttttcatgtagcttaattttttctttctttttctttttcttttttagggacaggttttcgccatgtagcccaggataatctcccaaactcctagcctcaagcaaccacctgggcctcccaaagtgttgggattacagtctgagccacctcacctggcctaattgttgcttgtaagggatgcagtgtctctctaatcttgcttaagaaatgaattatctgtatttcattttttttcctactgtttgacctttaattttttgttttgttttgtttttgtttttgtttttgttttgagacaaggtctcaccctgtcgcccaggctggagtgcagtggtgcagtcatagctcacagcaacattgaactcctgggtttagagtgatcctcctgcttcagcctggctagtagctgggactacaggcgtggctatgcacccggctaattatttatttattttttgttttcttttctttttttctttctttttcttttctttcttcctctttttttttttttttttttttagacaatgtctcactctgtcgcccaggctggcgtgcagtggcgcaatctcagcttactgagcctctgcctcccgggcttgggtgtttatcccacctcatccgactgaatagctgggactacaggcgcatgccaccacacccggctatatatatgttttttttttttttttttttgagatgggatttcaccacattggccaggcttatctcgaactcctgggctaaagtgatccacttgccctggcctcccaaagtgctgggattacaggcatgagccactgtgcccagccttaattttttaagttatcatatgcagataaaagaggcagaaccagttttagtatccaaatcagtctgatcctaaaacccgtgctctaaaccatattaaaccaccttttaaaattacatcttaatgaaataatttaatgttacctctccagctttaagggtgccattaaccacttagattttgatgtgtcggatggaaaacactccccaaacgggctattctctgttttttaaaaaaactgaatttgcctatagactcaacggattcattctgcaagcattcactacgtggcgaaatcggtgctgggcatgggtgcaaagacgacctagccctagttggtgtcttcaagaggctgcgtccagcaggggaagcagatatgaaaacacagaactattacaagggatgagcgccgcgccaagccgaacctgggagctacggacagtgtctaaactttagtcactcacaggagtacaaagatccggggctgctcctaactcctactccaaagctttcctggcctgctgggcgcacagggaagagggaagtgctggaaacttttgggaatgtgtgttttcatgtgaaagaggggaatgaaatgtatccttcagatttcactttctacttttccggccacgggctcggcacgacctgccgttgggagacgaacggtttcccgaggtggggggaagcgcggatttgccgcgggactccggcttggcgcggagctgggcgcggcaggcgcagggaggaactggcgaggtggcccgggctcggccctccgagggtgtggagcgcccgggaaacgggaccccaagaatccaactgctcccaccctgcgcggccaggagcggggctggcgatactggggacactgtccaatccgggcagggggcgaggccgggggaccgggcgggcctggggagcaggcacgtgtggagggcggacccgccgggggtcgaggcctgcctctccgagagctcctggcgcggccgtcccggcccggggccccaggtgcgcttcccctagagagggattttccggtctcgtgggcagaggaacaaccaggaacttgggctcagtctccaccccacagtggggcggatccgtcccggataagacccgctgtctggccctgagtagggtgtgacctccgcagccgcagaggaggagcgcagcccggcct

SEQ ID NO: 23627 - DNA, 2300 bp, Homo sapien
cctgtttctaactggtttttggtgccctatgtagatcagacatcagccccccaacccccagtgcctgccacagctcatctataaacccctctgcatttcaccgtgaattggtaacccatttttctggaatccctctctgtagcagagagctagtctctttcttttccctattaaacttccactcttaacctcactctttgtgtgtctacgtccttgatatctgtggccgtgagacaacaaaccatgggtgtcaccccagacgaggccacttcactgctgcaagacacttttctgtggatttaccatgactcccctagacctccgcacatgccattccattcacctgaaacaccttgtcccttaattctgtttacagaaactcaatcatctcccaaggtccattttaacatctacatcctccaagaagctttgcccgatgcccccaagtgaaatgtgatctcttctctttgaaccccagtgggatcttatttgtgcccctcctgtcactgttatattatgaattaatcatagttatttttgtgcatgccttagctgtgctagtattcatagactatttgaacacaagaactagggattataatccttgtcttctccaacagtctgccttgcattggcccacacataacaggcactgaaaaggggttggttgtgccaaatgtctcctcaccctttatgctgataattctgaatgtaacatgggctacattttgaattatggtgtccttgtaaccaaagaattaggataaactgaaaaaaaaggtgggtcctatgcctttctctttttatgaaaaagggaaaagaagaagatacatagattcaggacaatgttctcttcagagatgggcagcagcatagaacagtggcttgaactccagctctggaatcagacttgaggcagctgatcatgcaaagatgaaaggaaagtgttctaggaattatctagaatcctgaatataccacttaatagttctgagaccgtgggcaagtcagccagcctcactcactatactttaccttctcaacagtaagacaagcttctgtcaggattaaaacagataacccatggaaagcatctatctctatgtctgacacatagtagagcttaataaacattttctattattgctacggttgttgttactgttagcaacattgaggctgagtaaaatgaattctttttggatagaaagatggtctcatggtcaagtgtttttacccaaatctcaaggagattctaaatagcagctaagaaccaggggatacttctctggccaaaagtctactgagacaaggtcttgggggcagaggctaggccaggtagtttgtggtgcacatagaatcactgtacctacccagcatgaaggtgttggcccccaaggagctaactggagggtagcatgctggaagacactaccagtgttataggaggcaaaaagaaattatttaggtagacatttagggtaaagtgagtccccagcagaaaactttccttttaacaaaaagcagctcaaaaatagctccctttctaaccacacacagttaaaaaaaatcacttctcttctaacaacaagtaacctgaaagttcaggctgtaaaatacagataagacagctcaagcacagaagaaggggtggaagtctcctgggtaattgccaaacttcacacttatacaatgggccccagtaaaacagtgggtcttaataagcacattcctttccctttaggtgcactaagatagagaaactaaaagcagactcatggggcggatgcctgcagctgcaagaagatgtatgggaacagacacagaaactctccctcccagataagcaagacaaagaaacacagactaagagtcagcctatgtggtcagggaatgggataaaagctgataaaaaaaattctgctctatatagatagcacacttggtcgcagctaaaccatcaggccctaagaggataagacatcccctcctcatgaggcccctcctccctagaccatttataaaaaccctgacatttttactactgcttagcaacctgctcgggacccctctctgtgactgtgagctgttctgttcttttgcctattaaactcctgctccaaactcactcgatgtgtgtgtgcatgtccttgacctcaatatctggtcgtgtgaccaagaacctcagtattcaccccagacaacaaggctgcttcattttgagggctcgtctgggatttgaaggtgacttcatcagaatggtgagtaaaggagcggactctactttcacttccgaggct

SEQ ID NO: 23628 - DNA, 2300 bp, Homo sapien
tttattcagtgggcagttcttccccttcttcagatgtaaattcagatagagtcatgacttttctgttcactcttaggttttaaagtcctactgtgtagtcccttaaggtcataaaacagtgtcattttagtaagtaatatatccagtcaaaattgcaagcttgatttacagttgatgcttcttccctcactcacctctggcctattgcaagtaggaagctggtttctggggaaagggagaccatgggcttctcttctttttccacctaggtttccttcaatgttctccccctgccccaacctaccatgtctgggttgtagcaaagaagagagttaaggggagcaggaaagttgttacctgactgtcattgctgtggtggtagaggatcagccctatgtgaccctgacagactaaagttgattcttgtgggcattcttgtgggttcctttgtcaacctcatcacgctactcacctgaggttcctctggcaaggcaaatgtgtactcctttttcagcctctaggaatttggtgactctttgaggttctcagtgctgaagttcattgccttcctcccaggcctgttgggcaggacctaagctgtctcatggtggtccacatctgctccatgggaaacacctgcacgttctttgtgctggcaaattctgtgtatgcaagctgatccctctgcagccattattctccgcctcccacctccaccccaagctgcctcggctagcctctctcggttcagatttctcatgcatgaatcagacattagtccacggggaccctcaaactacgtatactgccaatgggagtctaaattggtaccttgatgcaatcaacccagagagcaatttggtaatagctaacaaagttgcagatttcgcagcaaattcacttttgggaatctgcttggtgaatccattgcacatgatgttcattgctgctctgtaaggccgttaaagtagaaataacctctctcactaaggaatgtaaaaacaaatatgggtcagtcatacaatgagcagtgaaaattatctagcgattgaccaaatggataaatcttgagagtataattttgagagaggagaaaggtgcacaatgagaggtacaactatgattccattccatgatatgtctaaacatgcaaaagaaaatattatttatgggtatgcatataaggacatgcatggacatgatatacaacattctcagcacagtgattgccactggggagggagacagaatgagatggaggaggtacgcaggggcttctgcctatatgtattgttctatttaaaaaagaatgaatcattgattacacctcaataaagctgggaggaaaaaagaatgaaagcaagtctgataaaatttcaagctagtggtcggtccacaggaatctgtattactctatttgaaatattttcattattttacttaaaaagtaacagaagggagtcagggaatgaacgctggctgtccggagtccatcacaagagctgctactactccaagcagacactagtaaattttgctagggcctcctgaaggcacttttgagtccagacagtcatggtgccagaccctattcggacatcccactggcacttgagaggaaaggaaaggagtgccgggaacgttcccataacttaacgggttccattcacgtctacagcaggggagggctcatgttaaggaagcccaggaatccagcatatcgcctcatcctagggccccctctcacaggaggccacgcccaagcaagcagagcgtggccccagcaagcgccgagctcccgcaaggagaccaaatagcttcggggttttgccactagcttagcacaggcccataagcaccggggactcaaggcacctttgtagaaacaatgagtgactggagtcccaggtcttgccactacagaggcgcgtatgaaccacggtttaacactacgtctacgccgaagttcgggttagtcagaggccacgcccaccgcaggcccgaaaacaccagcctgcactggcgcgccggattgtgcgcaggctccacctgccacgcacgcacgccttgccccgccccttccggaggctcgccgtacgcatgcgccctccgtcccgcgctttgttgcgaaagcgagggggcgaggtgctgcggtgctagagcgcggcgcgaccggacgctgcgggcggggaagaggatggagactgtggcgtccgctgcaacggttggggctgcgcgtgagaaggtggcggtgtaggcacctgcgctcggggaaggctggcggcggcggccgagccatg

SEQ ID NO: 23629 - DNA, 2300 bp, Homo sapien
tacctcttctttgagtaagaagactacgaagttggttataggtggggcatgctttgtagagcagaggttcccaagctttcatggatcacagcacatttcatattttagtaattttcacccctggtccaaaagaaatacctcatagttagggccaaacaacctaatgatagcagattgcatggtatctgaaagatgttactgtgtttccttcgaatttaaaatactccacatgcctctctgagttggctgtggtgctctaagttcagatggtatcctgaactggtgaatttcacacacggtttgggaaccatgacttagggtgaatggattgggagtgaacaggccacagattctttaaatttcagaatgaggattgctttgtctgggcaccagcagctacactacagccttagatcttccattagctttgtgctatttctagaaaaaccttggaatctttttgcctcagtatctgtactctccttatctatactctgtgttcatagagtggagaaggcactagtttccccattttctgcccctcttcttacttctgcctttgtttccctgagacctcatccttcttttctcccaagggttctgatgggcagataagcttagcctccatcctagtcctccataatgtattttttggctgtggctgtcactgttctttttcatttgaatttgttttctaactttcagatctgtataaatctctcatcaagtgatgagcctaccctcaccttttcctggtgtggacttattccttttttgtactcttaatctttaatgtaatttggggagggatgggaagccaacatgtgtacattctgccgtcaggaactggaaactacattgtctcttgatttcgcatcataacgagtgaagtggatactattaatgtcctctttttacagctgtgataactgagcagctgggactcaaacccaagtctgttaccactaagacatgtgctgtttttattgtcggctaggaagaggtgttaagtacacaggtgttaaattcgccaattcaggatgtcatctgaaacaattacttcatttttaaaaagagattgaaggttttatgtgctaggaaagctttcagaattggtcaggaatttaagatattgatcagcctctgcctaaggccttttcttagttactggatcattttgagcaatgattttcaaactttatttttttagtcaagtcttcctttaaattaaatctgtgcagaaatccagtatgtttacagatagaataggtgatgctgctctggttgaagttagatgggatgctcacagttcactccttagctctccttggtggcccctaagacttctcctttgagcagttttaaaaacctttcatctaaaataaataaataaataattttaaaaaacaaataggaaaagaaaagaaaacctttgatctaaggttgcaaaccgtttgtccagtggctggaaaacattttaagtagtttaagaataggttggtaccaaaataagattaaatgtaaattattttaaaattacttgggtaggtgaaatgtttactcttgttctccatttcctacttgcagattattgcgctatttgagctccttcatagtgctggtttctaaataaggaaataagcaaaaaatcaacatgctaacttcttaatctattgaatgggtaattaaattagtccaaaattgctaaaacatgtgtagtgaaaagtctgcctcccatgctgcccccctttctccactatctctcccgtgcatagaggaccccagagataaccactattattagtttcttatgtactcttctagacacaagaaaatttgaatatatactatctccctatccttttacacaataggtaagttgactctatttaatagaaattgaataaaaggagtatttagaaatatatgcaaaatcagtaaaacattcagttttatataaatatgtgactttttcatttcttttaacaggaaaaaattaaagagtacatctaaatatatttatcaaacattatttttgaatggtgaaaacagtgacattaagatttgtgctctaggagaagaatggagcttacacaaaatatatttatgtcaagtaagtattttttctatttgagtaacagggtagtcactgaaactcttaagtcatgttcttcctcattgcacttcacagtaatcttttgcatgaacaccatagtggttaaatcctctcatttgatcagtctgtaagaaaaatggcaaacattgttagtgaaaactaagtttggtctagaaagagattt

SEQ ID NO: 23630 - DNA, 2300 bp, Homo sapien
atttttagtagagacggtgtttcactgtagtctcgatctcctgacctcgtgatccgcccgcctcggcctcccaaagtgctgggattacaggcgtgagccaccgcgccgggtgaggggtttcttaaaaagcattttcatcagatgagaccccagccctgaggggagaaggagaaagagaaagagaaagaaagagtattttcagccaccacctgaggccaccatgttcttcctctcttacacatctagtacatacccccttaggcttcccataaatcctgtctttcctgtggataatttcttcaatcattagtggtgtgcttcttctttctttttttttttttttgtttgagacggagtcccactctgtcgcccaggctggagtgcagtggcgcagtctcagctcactgcaacctcaacctcccaggttcaagcaattctcctgcctcagcctcccaagtagctgggattacaagcatgcgtcaccacgcctggctatcattagtggtgtgtttctccaatgatgtccctaaatcttcttccctggggtctgcacctcccttgaacctccccattctacacctagtgcatgctttgccagggtaattccaaaggcatctgggggttggggctgttggtagaaatcctagatgtcatggctggatctttcctggaagtttgggttgggacaggtattaaacaggccactctgaatgtataaatctaattaaaaatttatgtgattggtgggcattttttccaacctaataaagtccctttccatcccccagctctttgtattttaaaagccaggtcactagacttgataattctagagagagctgactgaaaagagttggtttgattagaaacagaggttcaacacttttacactgttggtgggaatgtaaattagctcaaccattgtggaagacaatgtggtgtttcctcaaagacctaaaaccagaaataccatttgacccagcaatcccattactgggtatatacccaaaggaatataaataattttattacgaagatacttgcacgcatatgttcactgcagtactattcacaatagcgaagacatagaatcaacccaaatgcccatcaatgatagactggattaaaaaaatgtggtacgtatacaccatggaatactacacagccataaaaaggaacgagataatgtcctttgcagggacatggatggaactagaagccattatcttcagcaaactaacacagaaacagaaaaccaaacattgcatgttctcacttataagtaggagctgaacaatgagaacacatgggcacagggagaggaacaacacacactggggcctgtagggggaggagctggggagagggagagcattgggaagaatagcttaatagatgcaaggcttaatgggttgataggtgtagcgaaccaccatggcacacatttacctatgtaacaaaactgcacatcctgcaaatgtaccctggaacaaaataaaataaaataagaaatagaggtttgagtctttcctggtaagcatatttatgctctaccacagacggttcagccttggggcaagacagtctttctcctaatttttgtagttttgaacattctaaagtttttgttgttgttgttgttgttttccctgaggacagaggcaactttggggaagtactttgtcgggtaggatggaatctggggcctttagttttccttccaagagcccataggaggttttgggtgccttctcaatgctggcatgagaaaatataaagcagatggacagtgaactttggtatattcactccttatgaatgttatgtggaaaagtggaagaacataagctgtttgtctatgctatgtttacaattggtttgctctattttgtgcatgtggacaaaaatgggggaaaaatgaaagctgtgttaggataatgggtatacggctgaattttccaggaatttctataataacaccaaatcgcatgttttaatgcccaccgtgaacaaagaagaccggaaccctcgcaactcgttttgacgttttctggtcggcggtaaaagctcggttcccggccctcccggaagttgttgcacagttgtttccgggaagcgggactccaaatgggtcgcagtcgcagccgctctccacggaggggtgagtcctgtagcaattcggaggatatggggctctgttggaggcctgtcccttttgttttattttgttttgtttttggtagccgcgtagcagagaggcgggcccttttcccaggcggagagcgaggggtggataaagg

SEQ ID NO: 23631 - DNA, 2300 bp, Homo sapien
ttcagtacttgagttgtcagtgttttgtgactcagtctggaaatctgtttaaaccaccttgtctttatacaactaccaacaggaggattggtaatttgggctctgggtgagacatacataggttcagtttccatgtctgcagctgaatgcatgacagggaaaatcatttagcctccctgggcctcagtttcttcacgtgcaaaatgtaattaacacaacctacctcatggggttatattgaggattagagataatgtaggtaggatacctacacatagtaagctattatatattggcaacaataataaacttttaaaaaaagaaatatgttcatgctttactcatttgtattttggggactcaacctaccaagaactttatttctacttttaaaattggagatgtctgtcagtacattggcagtgtagcttggtttgccagatagctttcatttcaaaaattttaataggtttagggaccgatctttaacctttttagttctgtatacgtaacattctattaagcatttatattggtaccaccccatgcggaaacacacaatttgcagacgtcttaaagagtattcttggccgggtgcggtggctcacgcctgtaatcccagcactttgggaggctgaggtgggtggatcacctgaggtcaagagttcgagaccagcctggccaacatggtgaaaccccgtctctactaaaaatacaaaaattagccgggcgtggtggtgggcacctgtaatcccagctactcagaaggttgaggcaggagaatcgcttgaacccgggagaaggaggttgcagtgagccgagatcgcgccattgcactccagcctgggcgacaagagcaaaactccctttcaaaacaaacaaacaaaaacaataatcttgtgagtgttttcatctagaattaaaagggaggggaaaaccccaaaagagatttaagcaaagaatcttagggtttaatgccattctgtaggttcaggaagtctctgagctttaaaaagccgctcgcgtgaaagtaattaattattccatcacttcccgggggtggaggggggtgcggaaaaggcgcatgagctcaatgctgtatactgcagcccgattccagctctttcttgagggcagaaaaaacgccgagcggcgagcatttaacaacggccggcttttcttctcaagccccgcagcagccacgtggcgcctgccctagctcccggctcaccggccactagcctgcaccgctcttcgggaggattcgaggctgggccctcgccagcccgagttccgcgaagcccagaacctccagggccgcggccaccagaccgagggctccggccccgaacccaagcggggcagagcgcccaggcgacacgaggtgccagccttccattcgatggacgcctggcaggtccccggaagttttccccggggacaggtcttggcaacaggtccgaggcaaggccgggtggagcagagctccgcagcggctggtgaatcagcgccgcccagcgccggaccggccctcccagccaatgccagacccggtgaggagcagccaggctgctgaccatcagccacttagggctcgcctggcctggagaaaggtgacatcatcgtagctgggaggtttccgaaggcttcaccaatgggagaccggcgaggtgcttgccttctgcagctcttggccaatactaacaaagcaaaagggggcccgggttgttggtatagaaccaatgggaaacaaggaaggagcacgaggcggagttgcgaatcctgtcaccagttggaaagagggggtggagcccgggccttgtcaagtgtgaccaaccagcgagaggagcggactttgcggggtggagccctgaagccctctcccaatcgcacaagtgtaggggcggggcattctttggggggcccaatgaggaacgcggccgaagctggcctgtcaagagaaggggctgggggcggggagatggtgagtcggggataaacactccgcggcggtggcggctgctgctctgctccgggttctgtcactgtgtcggcggtgcccagctcactggccccctccctctcttgtcgagcgtggttgccagagaggctccctcagccctgctccgcggggtccacagcgggctccacagcgggctccatagcgggctccacagcggtccggcggcggcagcgagcccgtgggcagtgggggttggtcccgtggctccggcccccggtgcagaatggcggcggcggttcggatgaacatccagatgctgctggaggcggccgactat

SEQ ID NO: 23632 - DNA, 2300 bp, Homo sapien
attatttttgttcaaactccaattatcttataggatttaagatgctatttaattgggtaagtctggcccacaccaagataggtgataaaatggtgaaacctcagagttaaacaggctaccctgttgagggtgatctatttggaaaggaaaagaaggttatgataggctgtgaaaacttggaaggaagttaagtcagatgggatgtttgagggtgagggaaaagaaagaatatgtttggtaagagcaaaggagagcccattctataactttaggtgagagctgatatctatcagggtttgaatatagctcctacaaatcattctgcaataattcatctacacgtttgagcactccaactaaattttaattacctcaaaggtagggacttgatcttactcaatattgtatcccaagacttgctgggggcactggctcacaactgtaatcccagcactttaggaggccgaggtgggaggatcagttgagcccaggaattcaagaccagcctgggcaacatagtgagacccatctgtaccaaaaaaaaaaaaaaaacctgtagtcccacctactcaggaggctgaggtgggaggattgattgagtctgcgaagttgatgctacagtaaactgtgatggcaccactacactccagcctggttgacaatgcagacaaaaaaagaaagaaaatatagcctgggacctaagaaagcagcagaacataacataatagttctctctctttttttgagatggagtcttgctctgtcacccaggctggagtacagtggcacaatcttggctcactgcaacctctgcctcccaggttcaagcgattcttgtgcctcaacctcctgagtagctgggattacagatgtgtgccaccgcacctggctaatttttgtattgttagtagagatgggtttcgccatgttgcctaggctggtctcaaactcctggcctcaagtgatccaccctcctcggcctccgaaagtgctgggattacaggcgtgagccactgcgcccggcccagcctgttacactttcaataaagagaactaatcacagataacagtgcttccttcaaacacacacacatacccacacacccttcatttggtaccacttctggtcttgattacatccaagtcaggaagaactttaaggatagtatatttaatgcaggaggcactatctacagatagcaccatctacctaataatcctactctgttgaatctattccccaatttgcagatctactagcctgagagagatccatagatagaatcaagaaagcatggtctggaggcagaaataagaagagctacagtcagaattgtctgagttagcccaggtgctttctatcagtgccaaagctctggtaggagctggtgcctcaaacagcttggcaccttcttcattaataacttcctttacttggatatttactttccgtaattcatggctggcaagaagttaaggaaaactaacagcagaaatacgtggtatctgaatatattttatatttaaatctttaatctgtttggaatttattttgatgttaacctcctcactctcttgccattttctgaataatccattctttccctaaggatttatggtgttatctcctttatgtgctaaattcctatctattcttaggtctgtttctggggatttctatcctattcatttgatttgtctgcctattcctgtattagtactacactgtttttaattattgaagctttataatacaatttaatatctggtacagcacattcctcctcattattcttcttattcaaaaattttggcagtgtcacacacatctattcttctagatgaagtgtagtcccagtgttaaaaagaacactgttgggagtttttttcttggaattgtgttaaatttgtaaacaaacttgaggaacattgacattttttgtttggaggattcatatccaggaatctgctatttttttcatttactcaattttcttgtgtctttcaacaaagttttatagttttcttcccatagatccttcccaacctgttttaaatttgctcctcaatatgttatactttcttcttgctattgcacatgagatatgtgaagatctctgtgcttggacttcccaagtcaatacatatttgcctctatttttattctcctttggccattgcagtcgagatcaaggagggaggcccagactcttcaggacacttgctcctgcagcaagcagaagtgaggcagctgcctccctcccaaccttggaatcctttctacccctgactctcaatga

SEQ ID NO: 23633 - DNA, 2300 bp, Homo sapien
tttctatgagttcaactattttatactccatatataagtgaggtcatgtggtacttgtctttctgtacctggcttatttcacttgacatagtatcctccaggttcactcatgttgtcacaaacgacaggatttccttccttttaaaggatgaatggtactccattgtgtatatgtaccacattttctttatccattcatctgctgatggacacttacattgattttatatcttggctattgtgaataatgctgtaatgaatatgggagtgtgaatatctcttcaacatactgatttcatttcccttagatatatgcccagtagtggtattgctggatcatatggtagttctacttttaaatttttgaggaaccaccatagtgttttccttaatggctgtactaattcacatttgcgtcagtaatgtgcaaaggtttccttttctcaacatccttgccaatgcttgtcatctttcctcttttttgcaatagccattctaacaagagtgaggtgatatgtcattgttttgaattgcatttctctggtgattagtgcagttcagcaccttttcagattcctgttggccatttgtatgtcgtattttgggaaatgtctgttcaagtcctttgatcattttaaaactctggttatttgttttcttcctactgagttgtttgagtttcttatctacactttagatcataacaaccccttctcagatacatggtttgcaaatgtattctctcactctgtaagttctctcttcactgtattgtttcctttactgtgtggaagggtttcagtttgatgtaatcctattttgcttttgttgcctgagcttttggagtcatatccaaaatttttgcccagaccaatgtcatgaagctttttccctatgctttcttctagtagtgttacagtttcaggtcttatgtttgtctttaatccacttttatttgatttttgtatatggtgtgaaatgaacatctaatttcattcttctgtatttgaatatccagtttttccagcaccatttattgagtaggctgtcctttccccagtgtgtgttcttgggacctttgttgaaaatcagttgactgtaaatacatagatttatttctgggttctttattttgttcctttagtctatgtgtctgttttttggtggtaccatgctgttttggttactacagctttgtagtatattttggagacagacagtatgatacctctagccttgttctttttgctgcagattgctttggctatttggggtcttttgtggttccataggaatttcagagttgttttttcaatttttgtgaagaattttattagtattttgatagagattgctttgaatctgtaggtcattttgggtagtatgagcattttaatattaattcttccaaaccgtggacacagcatatctttccatgttttgtgtgtgtcctcttcagtttctttcgtcagtgtttcaacagtgttttccatgtacagatctttcatttccttgattaaatttattcctaagtattttttattcatttattttattttattttattttattttatttatttatttatttttgaggtggagtctcactctgtagcccaagctggagtggcgtgatctcgactcactgcaacctccgcctcctgggatcaagtgattctcgtgcctcagcctcctgagtagccgggactacaggtacgcactatgacacctggctaattttttgtattttagtagagatggggtttcaccatgttgcccagtgtggtctcaaattcctgagctcaggcgatcctcccaccttggcctcccaaagtgctgggattgcaggtgcgagccactgcgcccagcctattccgaagtatttttaaatagctattgtaaatgagattgttttcttcatttttttgatagttcgttgttattgtatataaacactactgaattttgcatgttgattttgtttcttttttttaaaaaaatactaacagacaagcaaatgcatgttgattttgtatcctgcaactttactgaatatgtttatcagttctaacagttttttggtgagtctttactattgtctatctaaagatcatgtcatcaacagacagacaatttaactttttcctttgcgatttggacaaattttatttctttctcttgactaattgttctggctaggatttccaatactgttttcaatagaagtgtctgaaataagcattcttgtcttattactaatcttacgaaaaaaactttcaattttcactattcaatatgatg

SEQ ID NO: 23634 - DNA, 2300 bp, Homo sapien
atgcgcctgtagtcccagctactcgggaggctgaggcaggagaatcgcttgaacctgggaggcagaggttgcagtgagctgagattgtgccactgcatttcagcctagccacagagcgagactctgtctaaaaaaaaaaaacaaaacaaaaaaatcgttttactggctgggcgcagtggctcatgcctataatcccagcactttgggaggccgaggcgggtgaatcacttgaggtcaggagttcaagaccagcctggctaaaatgatgaaaccccatctttactaaaactacaataattagctgggcgtggtggtgcatgcctgtaatcccagctacttgggaggctgaagcaagagaattgctggaacctgggaggcggaggttgcagtgagccgagatcacaccactgcactccagcccgggcaacagagcaagatcctgtttcaaaaaaaaaaagatacataatggatggttggttgcaggaaaaagaaaaatgacacagatatacataaacaagctgatgtggaacaatctccaagatctgtcattaagagaaaactaaagaaaagtgcaaaattgtatttatggttagtgtgctagtgttagcatttatatgtaaaaagaggagaaactctgtatacttgttatatacccatactgtttctgaaaattttctttttctttctttctttctttttttttaatagagatgggttttccctgtgttgcccaggctggtctagaacacgtggactcaagcaatccacctaccttggcctcccaaagtgctgggattacaggcatgagccaccatgcctggcctttttgttttttaatatccttctctgttgctgaatttttttttttcacatatgaacattacctttttaaaaagagtagttgtgagctgggcgcggtggctcacgcctataatcctagcactttgggaggctgaggcgggcagatcacctgaggtcaggagtttgagaccagcttgcctaacatggcaaaacccagtctctactaaaaatacaaaaaaattagctgggtgaggtggcgcacgcctgtaatcccagctactcgcgaggctgagacgggagaaacacttgaacccaggaggtgaaggttgcagtggcagggagccgagattgtgccactgcactccagcctgtgtgacagagcaagactctgtctaaacaaaacaaaacaaaacaaaagcagttgtaaaaaaacacacataaaatttaccatcttaaccatttttaagggtatgagaaattgtaaaaaacaaacgtaaaatatgccattttaaccactttttttttttttttttttttgagacggagtctcgctctgtcgcccaggctggagtgaagtggcgcgatctcggctcactgcaagctccgcctcccgggttcacaccattctcctgcctcagcctcccgagtagctgggactacaggcgcccgctaccacgcccggctaattttttgtatttttagtagagacggggtttcaccgttttagccgggatggtctcgatctcctgacctcgtgatccgcccgcctcggcctctcaaagtgctgggattacaggcgtgagccaccgcgcccggccttaaccacttttaagtctttacattttggtagtcttaggtatattcacattttgtgcagcagatctccagaactttttcatcttgcaaaactgaaactctgtacccattaaacaacaactcttcttgccctacccctcctttctctctggtaccaccattctactttctgtttctatgaatttggatactttactacctcatataaatagagttatacggtatttttgtgtgtgtgatgggcttattttacttagcataatgtgttagggttcattcatgctctagcatgtgacaggatttgtttctggtttaaggttgaataataatccattttatgtatgcatcatagtttagccattcattcatcaatacgttgcctttttaaaaattttaatttttaatttttttgtagagacggagtcttgctatgttgcccaggctggtcttgaactcctcacctcaagcgatcctcccgtcttggcctcccaagtgtcaggattacgggcatgtgctatcacacccaacctgatacattgcctttataaatttttttttctttattctaaaaaccagaaaaaacaaaactggatacatgtgcagaacatgcaggtttgttacatagctgtacgtgtgccatggtggtttgctgcacctattgacctatcctgtaagttccctcc

SEQ ID NO: 23635 - DNA, 2300 bp, Homo sapien
tcagcccgcccgcccgttacaggtgtagctcttatcaggaaaagctgggagctgcctgatacaaaaaggggctgactgcacaacaaaagattacctgaagggctcatttaaatgacaagctcacctaaacgttttaaatagtatttaaattccaaaaccctgatttacagaaaaacctggaaaatgtgctcaccagtaaggaaatctggaggtccatccccgacattgtgtgaccttgaattaagcacttcatctttatgtttgtcttcctctgtttaaaagagagagagagagagagagataagaacacctacctcagaggaccatggtaaaaattaaagatagaatacggtgaactgccttgcatcggatgtgctggcactggccaatgcacaataaacgcctgtcccttctagactaaaaatgaacacttaattgtggtaaactattaataagattcaccggccaactgtcctatgaaaaagtcagaggcactgtagtctcttcgtagctctcgttctctccagcacaacagcccatgctaggaagtctagaaaagcagtaacttatctcattccttaaattaaacagaggtttctaaatgctttggtactgtggggacccaaattatcccttgatactgcccccctattatccactattaagctttaaaaaggcgagagattaaatattgtgcccacattttacagtcattcgcgttcccgtttcaaattaaagggaggaaaacgcgttaaaattaggcctccgaccttcagaccagcctgtgggcttttttaagtcataaaactcgcggaggtggaaggccccggggaggaagaggggtgcattctagagctttcgggccgaccccaatttctcgttggcgacgaatgctaaccacgtgtcgccattttgtgttcaggaaacatggcggccgccccaagggtaaggaacaggggaggcggagtagcgccacgttagccgctttccctgagagattgtgaagcacgttgcgcacggggccctttctggtctggcttagcccaaggaggaaggggaaaaggcagaaatcacaactcataggccagcgtcttgagcgacacttcctcagcgggaagaaccggcaaaaaaggccttccaagatggcgggccctgacggggccgccccccttgagcctggcgcagtggctgcgcccatgggcccgaaaagcagccgcgggagcccaggccgcgcggggaaagccgcagaaacgtcctgaagccctggccggcagcccctgaacaaacgaggcctccacaggcgtacactattgtttctaatgtcggaaaagggtgccgcggtggaaacgacacaagggcaggaggtggggtttctgtggctttaaccgaaagaaacttgcgaaacgcaaacaaagcattatgtaaatggacgccattctttttaggaccacgtttctagcacgccccacaaacagcagagccgcgattcggcaggcggccgtgagtgggtttcggtctttctgcccaccggccgccgccggggagcaggagctggggtgggggatccatgcagggcgcccggacgccggggacgaaagggccccacgtgcccgcccgcgcgcacccgctccgcaggcctcgcctcgccgcccctcccccccggaagagggctgctgcccctcccatccccccacaccctcgcgcacgcgctctggtcacctcacgcgcatgttttaaacccgcggcgtcccggcttgtgcctgcagtttccgccggggctgcccatgtcgttccgcgcacgagcccctcatgtagggcaggaaaataatgtctatcccgcatacacagcactagtattttcagtcacccgccagtgccgttagagttaataaaatacgtcatcattttaaaactttgccggactcacagcttccgcccatcgtgcgcttcattttcactactgcagtgtcagaaggttttttttttaaggaccatgtaagggttggcgcaatcttgtgacctaaaaaagacgggtcctcattttttttcaaggggtcctgcgcagcaagcacttccggggtcagagggtacgcggggttgaaagcgggcttcccgccccgcccagaccgccgaggctgccgccggagtcgccaccgccgcgccctcgcccacccgcccgcccgccgctcccggccccgctcgccccctccgccgccgccgcccgcccctgcgactacgctgcggcctcccgcccgctcccgctcgctcccgcggccctcgctcgcctcgcgccggcagtt

SEQ ID NO: 23636 - DNA, 2300 bp, Homo sapien
gtggtttgagtagatgcatccaaacttgcccaatagcctttcacctctggagagctggagtcaattccggcgaatccggtcccgccgtgcatcatggcaaagtgagactgttgtcttgccacctggttcagcttggccagatcgagcggagaaatggtgtgttgtccttgaatcgagtaggcatctagaggtggtccctccaggtcatgggtggcatgggggtagcccgcagcgtcgctgcaccgatcttggccgcccgcgcagatgactggggagctggccggcatgggctggtacggaatggtcatgactctcccttgcggagactgggagagcgtctccagcatgaccaggcaaatctgcttgacacactcggtgacagactgcggcacgccagcgatggtgatggcccgctcggtggagttgggcagcatatcccccgccacctggacctgcgcccccgtactctcgcggatctctttgatcttacacccgcctttcccaatcagggagccgcactgggtggccggcaccaccagcctcagggtgaccgggggcctgctggccgcggtactgttggtcatggagctgttgatatcttcctccagcttgtcgatgatcatagcgaaagccttaaagatggcattggtggggccggtcagagtgatgattctctccggacaattcccctccgagatgttgatccgcgcgccactctcctcgcggatcctcttaaccgactcccctttcttcccaatgatgcttcctacttcctttccgtgcataagaagccgaatggtgagagtcacatttagtccactttcagtcacaccggcatccatggcgagcggcgggcggcgttcgggggagttgggctcgttacgtggtcaagtctttggcggctggcggggggaggggaggtgtaggcccaaaactgccggcgcgaggcgagcgagggccgcgggagcgagcgggagcgggcgggaggccgcagcgtagtcgcaggggcgggcggcggcggcggagggggcgagcggggccgggagcggcgggcgggcgggtgggcgagggcgcggcggtggcgactccggcggcagcctcggcggtctgggcggggcgggaagcccgctttcaaccccgcgtaccctctgaccccggaagtgcttgctgcgcaggaccccttgaaaaaaaatgaggacccgtcttttttaggtcacaagattgcgccaacccttacatggtccttaaaaaaaaaaccttctgacactgcagtagtgaaaatgaagcgcacgatgggcggaagctgtgagtccggcaaagttttaaaatgatgacgtattttattaactctaacggcactggcgggtgactgaaaatactagtgctgtgtatgcgggatagacattattttcctgccctacatgaggggctcgtgcgcggaacgacatgggcagccccggcggaaactgcaggcacaagccgggacgccgcgggtttaaaacatgcgcgtgaggtgaccagagcgcgtgcgcgagggtgtggggggatgggaggggcagcagccctcttccgggggggaggggcggcgaggcgaggcctgcggagcgggtgcgcgcgggcgggcacgtggggccctttcgtccccggcgtccgggcgccctgcatggatcccccaccccagctcctgctccccggcggcggccggtgggcagaaagaccgaaacccactcacggccgcctgccgaatcgcggctctgctgtttgtggggcgtgctagaaacgtggtcctaaaaagaatggcgtccatttacataatgctttgtttgcgtttcgcaagtttctttcggttaaagccacagaaaccccacctcctgcccttgtgtcgtttccaccgcggcacccttttccgacattagaaacaatagtgtacgcctgtggaggcctcgtttgttcaggggctgccggccagggcttcaggacgtttctgcggctttccccgcgcggcctgggctcccgcggctgcttttcgggcccatgggcgcagccactgcgccaggctcaaggggggcggccccgtcagggcccgccatcttggaaggccttttttgccggttcttcccgctgaggaagtgtcgctcaagacgctggcctatgagttgtgatttctgccttttccccttcctccttgggctaagccagaccagaaagggccccgtgcgcaacgtgcttcacaatctctcagggaaagcggctaacgtggcgctactccgcctcccctgttccttacccttggggcggcc

SEQ ID NO: 23637 - DNA, 2300 bp, Homo sapien
ctaaactgaaatttattaacattccactcttacatttcttatcgacaaacagaaataaaattcatgagccaaaaaacccaaaacaaaactaaaaacagggaaaagcttataaaactaaatatggatcccagcattaacagctgaacagagaatgtgatttttaaattcttagcggatgataaagttgtgtagaaactgaacacttacaaattatttaaaacctggaatcactgaccagaaattacacagttggatcatgggagaacagcagaaaggggttattgagggaacctacactgttctagctgcaccccatgcccttctcagaggaaagcctggcattgattagatactgggccagactaatactggcagcagagccagtgatagtaacctgcctaccagaggagccttccactgggttggcaattttgatctgggccccggacatctggcggatctcattaatgttggcgccttggcgcccgattatgcagccaattaagttatttggaatggtgagttcatgggtggtttgagtagatgcatccaaacttgcccaatagcctttcacctctggagagctggagtcaattccggcgaatccggtcccgccgtgcatcatggcaaagtgagactgttgtcttgccacctggttcagcttggccagatcgagcggagaaatggtgtgttgtccttgaatcgagtaggcatctagaggtggtccctccaggtcatgggtggcatgggggtagcccgcagcgtcgctgcaccgatcttggccgcccgcgcagatgactggggagctggccggcatgggctggtacggaatggtcatgactctcccttgcggagactgggagagcgtctccagcatgaccaggcaaatctgcttgacacactcggtgacagactgcggcacgccagcgatggtgatggcccgctcggtggagttgggcagcatatcccccgccacctggacctgcgcccccgtactctcgcggatctctttgatcttacacccgcctttcccaatcagggagccgcactgggtggccggcaccaccagcctcagggtgaccgggggcctgctggccgcggtactgttggtcatggagctgttgatatcttcctccagcttgtcgatgatcatagcgaaagccttaaagatggcattggtggggccggtcagagtgatgattctctccggacaattcccctccgagatgttgatccgcgcgccactctcctcgcggatcctcttaaccgactcccctttcttcccaatgatgcttcctacttcctttccgtgcataagaagccgaatggtgagagtcacatttagtccactttcagtcacaccggcatccatggcgagcggcgggcggcgttcgggggagttgggctcgttacgtggtcaagtctttggcggctggcggggggaggggaggtgtaggcccaaaactgccggcgcgaggcgagcgagggccgcgggagcgagcgggagcgggcgggaggccgcagcgtagtcgcaggggcgggcggcggcggcggagggggcgagcggggccgggagcggcgggcgggcgggtgggcgagggcgcggcggtggcgactccggcggcagcctcggcggtctgggcggggcgggaagcccgctttcaaccccgcgtaccctctgaccccggaagtgcttgctgcgcaggaccccttgaaaaaaaatgaggacccgtcttttttaggtcacaagattgcgccaacccttacatggtccttaaaaaaaaaaccttctgacactgcagtagtgaaaatgaagcgcacgatgggcggaagctgtgagtccggcaaagttttaaaatgatgacgtattttattaactctaacggcactggcgggtgactgaaaatactagtgctgtgtatgcgggatagacattattttcctgccctacatgaggggctcgtgcgcggaacgacatgggcagccccggcggaaactgcaggcacaagccgggacgccgcgggtttaaaacatgcgcgtgaggtgaccagagcgcgtgcgcgagggtgtggggggatgggaggggcagcagccctcttccgggggggaggggcggcgaggcgaggcctgcggagcgggtgcgcgcgggcgggcacgtggggccctttcgtccccggcgtccgggcgccctgcatggatcccccaccccagctcctgctccccggcggcggccggtgggcagaaagaccgaaacccactcacggccgcctgccgaatcgcggctctgctgtttgtggggc

SEQ ID NO: 23638 - DNA, 2300 bp, Homo sapien
actggttagatggagaggacgctctgccatttagaggtcctactgagtgggcacaccttttcccctcgagaaaaccttgtttctaccagagaaatgggcagaggcctctctctggaacttgaacctctctgtccctggaaacatcccaaagcaggcccagcctgccatgttcctttgttggggcacagagggaatggaatcttaccgataaggtgagaagagcttgagagaataccaaggacgggcccacccttctccctcctccctccaaacacctcaggctaaaaggggagggaaaaaaaaggcaccaacaaagagtttaagacagcaattcccagctttttcaaatatgaagcattttttaaccaatccgttttttaattcttaaattcttgacattacagaactaaactgaaatttattaacattccactcttacatttcttatcgacaaacagaaataaaattcatgagccaaaaaacccaaaacaaaactaaaaacagggaaaagcttataaaactaaatatggatcccagcattaacagctgaacagagaatgtgatttttaaattcttagcggatgataaagttgtgtagaaactgaacacttacaaattatttaaaacctggaatcactgaccagaaattacacagttggatcatgggagaacagcagaaaggggttattgagggaacctacactgttctagctgcaccccatgcccttctcagaggaaagcctggcattgattagatactgggccagactaatactggcagcagagccagtgatagtaacctgcctaccagaggagccttccactgggttggcaattttgatctgggccccggacatctggcggatctcattaatgttggcgccttggcgcccgattatgcagccaattaagttatttggaatggtgagttcatgggtggtttgagtagatgcatccaaacttgcccaatagcctttcacctctggagagctggagtcaattccggcgaatccggtcccgccgtgcatcatggcaaagtgagactgttgtcttgccacctggttcagcttggccagatcgagcggagaaatggtgtgttgtccttgaatcgagtaggcatctagaggtggtccctccaggtcatgggtggcatgggggtagcccgcagcgtcgctgcaccgatcttggccgcccgcgcagatgactggggagctggccggcatgggctggtacggaatggtcatgactctcccttgcggagactgggagagcgtctccagcatgaccaggcaaatctgcttgacacactcggtgacagactgcggcacgccagcgatggtgatggcccgctcggtggagttgggcagcatatcccccgccacctggacctgcgcccccgtactctcgcggatctctttgatcttacacccgcctttcccaatcagggagccgcactgggtggccggcaccaccagcctcagggtgaccgggggcctgctggccgcggtactgttggtcatggagctgttgatatcttcctccagcttgtcgatgatcatagcgaaagccttaaagatggcattggtggggccggtcagagtgatgattctctccggacaattcccctccgagatgttgatccgcgcgccactctcctcgcggatcctcttaaccgactcccctttcttcccaatgatgcttcctacttcctttccgtgcataagaagccgaatggtgagagtcacatttagtccactttcagtcacaccggcatccatggcgagcggcgggcggcgttcgggggagttgggctcgttacgtggtcaagtctttggcggctggcggggggaggggaggtgtaggcccaaaactgccggcgcgaggcgagcgagggccgcgggagcgagcgggagcgggcgggaggccgcagcgtagtcgcaggggcgggcggcggcggcggagggggcgagcggggccgggagcggcgggcgggcgggtgggcgagggcgcggcggtggcgactccggcggcagcctcggcggtctgggcggggcgggaagcccgctttcaaccccgcgtaccctctgaccccggaagtgcttgctgcgcaggaccccttgaaaaaaaatgaggacccgtcttttttaggtcacaagattgcgccaacccttacatggtccttaaaaaaaaaaccttctgacactgcagtagtgaaaatgaagcgcacgatgggcggaagctgtgagtccggcaaagttttaaaatgatgacgtattttattaactctaacggcactggcg

SEQ ID NO: 23639 - DNA, 2300 bp, Homo sapien
cctgactcctaagtccagtttccaaccctgcactgtccaatacagtgaccgcaggtagctatagagcacttcacatgtagccagcctgatttcagagaccaagtgtaaaaaaaagaatgtcagatatctcattattaaaaaatttttttttcaacagggtcttgctttgtcacccaggctggagtgcactagtgtgaacacagctcactgcagcctcaacttcctgggctcaaacgatcctcccacctcagccttctgagtagctggaatcacaggtgtgtgccaccatgcccagcctctcattattaatttaaaaattggccaggtgtgatggcttacgcctgtaatctcagcactttgggaggctgaggcaggcagatcacctgaggtcaagagttttgagaccatcctgaccaacaaggtgaaactctgtctctactaaaaatacaaaaattagccgggcatgatggcatgcctgtaatcccagccacccggaaggctgaggcaggagaatcgcttgaacccaggaggctgcagtgagccaagatcgcaccactgcacaccagcctgggcaacagagcaagactccatctcaaaaaaaaaaaaaaaagtgcctactgaaaaattgttaacatgattctgtttacatttctgttgacagcatcttctatccactttcctacataatcatccttcacttgggtgaagacagtctgtgtgatcacctgagtcttctcttctctagttatatcaaaaggcttgcgccttttaaatctgttgataaactgaaacctccttgcttcctggttttcttacatgaattgagatcatcccaggacctcactgtcttgaacaagctcagttctctccactcttcctcacagatgatttctcataggaccaaattttgtcatccttgttgtccacatctcaatattctccaggttatggctatctctatccctcttgccctccaaaatgagaccacaggcggggcacagtggctcatgcttgtaatcccaacactttgggaagccaaggcaggcagattccttgagcccagaagttggacaccagcctgggcaatgaagtgaaaccccttctctaccaaaaaaaaaaaagaaagaaagaaaagaaaataaatttttaaaaaaggggagacaatcctccagagaaccgttgcagatgtcccagaaaggtgatgctcccaagtgcacagggacagaaagtagaatggtggttgccaggagctgggtagaggggaatgagggagttgtttcacgggtacagagtttcagtttaggatgatggaagagttctagagatggatgatggtggtgagtgcacaaccacgtgactatttagtgccactaaactgtacacttaaaaattgattaaaataagctttatgttgtgtacatattaccacaaatacaataaaagaaatgaagttctcatacgtgctgcagcagggatgaaccttgaaaagattatgctaagtggccgggcatggtggctcacacgcctgtaattacagcactttgggaggctgtggcaggaggatcgtttgagctaaggagctggagaccagcgtgggcaacatggcgaaacctggtctctaccaaaaatacaaaaattagctaggcagtggtggcagcgcacctgtagtcccagctatttgggaggctgaggtgggaggatcacttgaaacccggaggtggaggttgcagtgagctgagcgccactgtgccccagcctgggcgacagaacgagaccgtgtctcaaagaaaaaaaaataaaaaataaaaaaccttgtactaagcaaaataagccgacacagaaggacgaatattatatgattccacttatacgaaatacctagaataggtaaattcattagacaattagccaaagtgtatcagaggaggttggggggatgctgaggggaggggaaaagaaaaaagaaaatcaaggggtgggaagcaaatggctgcggggtagaaggggagtgggctgccgcttgggtgtgtgggcgtcagggggagacgggacaggcgatttaggccctgcgcgcaggcgcccctgcgctcccgccgtacgcagctgtctttgtctggggcggcggcagcgtggcaggagcgaggggcgccccgacccgtcccctctgccctccactacccctgccggctccagcccgtccgtgtctcaccgtctttatttaacaaagaacggagagactataaatgaccctgagcagagtggctgcgagcagggcccctggggcgtcccacgggcgtcat

SEQ ID NO: 23640 - DNA, 2300 bp, Homo sapien
cacgcctgtaatcccagcactttgggagtctgaggtgggcagatcacgaggtcaggagatcgaaacacagtgaaaccccgtctctactaaaaatacaaaaaattagccgggcatggtggcatgtgcccgtagtcccagctactaaggaggctgaggcaggagaatcgcttgaatctgggaagtggaggttgcagtgagccgagattgcgccactgcactccagcctgggtgagcagagtgagactccatctcaaagaagaaaaaaaaaaagagatggggtcctgctctgtcgccaaggctggggtataatggcacaatttgcagccttgctctcctggactcaggtgatcctcccacctctgcctccaacgtagctgggactacaggtgcacaccaccatgcccagctaatttttaaatttttttatagaaatgaggtctcactatgttgtccaggctggtcttgaactcctgggctcaagtgatcctccacctcagcttcctaaatctctgggattacaggagtgagccaccatgccagacctctaaagtgttcttgacaaccccctttgtaatgacattagcacctttttaccttccttacagttggaagtacaaaacacttaacccatttccataatcatttctgtcaaatatttctcaagtaattgtgaaagactttgattcctattctgtttgatttctaacgaaagaatcatcctgtctttgtataactttaatattttttcttgttttactcgcagactatcaagatctccacttagggaagtgggaatcttatttgcggaacattgggcagaagctttgccattggctggtggagaaggaggaggcagaatgtctgcattgttacaccatacagctcaaacttcagaagattttgggttaagcagttatcattagtctgcaaatgatcgtgttttcacctgatcattagaaactaatgaaacaccttttaagtcttatgaattcaggttacactgttttccagatgccttggcagctggtacaggtaggattgggctaggttttgtggggaatgatggaagggaaaaaaactcatctttcatgttctctaattcttgctgaagttagacatctgggcatgtaaagattaggttaactaacttccgttgttatatagaacagagttaaatctggagaaatgctttgattattaggatttaaaaaaataggtatgaaaggcagtttccactttcattttgtttgtaggtttaaatttatgttgttttgtggtacagtttaaaaatagtggatagcagccaggcgccgtggctcacacctgtaatcccagcactttgggaagctgaggcaggcggatcacaaggtcaggagttcgaggccagcctggccaacatggtcaaaccccatctctactaaaaatacaaaaattagctgggcgtggtggcgggtgcctatagtcccagctattcgggaggctgaggcaggagaatcacttgaacccaggaggcggaggttgcagtgagccgagatcgcgccgctgcactccagcctgggcgacagagcgagactccgtctaaaaaaaaaaaatagtagatagcttttttatattttgccttctgtactaaatatcataagtgattttaactttttgtgtgtgaaggtatactcatactgttggatgtattgtcttttgtagggcctctgaaaaatggaaccaaattctctgaggactaaagtcccagctttcttatctgatttggggaaggccacattgaggggaatcagaaagtgtccccgatgtggcacatacaatggaacccggggactgagctgtaagaacaagacatgtggaaccatattccgctacggtgcacgcaagcagcctagtgttgaagctgtcaaaatcattacaggctctgatcttcaggtctactcagtgcggcaaagagaccggggccctgattaccgatgctttgtggagctcggggtttcagagacaacaatccagacagtggatgggacgatcatcactcagctgagctctggacggtgttatgtcccctcatgcctgaaagctgccactcaaggcgttgtggaaaaccagtgccagcacatcaagctggcggtgaactgccaggcagaggccacccctctgaccctgaagagctcggtcctgaatgcaatgcaggcctccccggaaaccaaacagaccatctggcagttggccacggaacccacaggtcctctggtgcagagaattactaaaaacatcttggtggtgaaatgcaaggcaag

SEQ ID NO: 23641 - DNA, 2300 bp, Homo sapien
ctagggattctttagttggcaattggttgaaggagttcagctttggtagagcgccatggctcactgccgtaatcccagcactttgggaggcccaggcaggtggatcatttcaggtcaggagttcgagaccagcctgaccaaaatggtgaaaccccatctctctgaaacatacaaaaattagccgggtgtggtggcatgcacctgtaatctcagctacgcgggaggctcaggtgggagaatcacttgaatcccagaggcggaggttgtagtgagctgagatcatgccactgcactccagcttgggcaacagagggagactccttctcaaaaaaaaaaaaaaaaaaaaaaaaatagagttaagctttgtctaaggactcgaagtcagtacaaaggaatgcttacattataagggtggggcatctgctttttatcatgtggtgctatacctgattcaggctggaaagtaagccacacgatacagggttaatttaaaaactcatttaaaaagatgttatggtttgtagggtgtggcttaattcttgccttgcatggcctttggtcttgtttattatttggtattctattgctacagagagtctgttctgccattcttataatttctcttttaacattaatggtggtcagttgtgcctaaactccaaaagagggagtataaggaggcatgtccgacctccctttccacccaggagaattcagaattcagtttaacatccccttggccaaggggtgagggttcattcagttggctgtggggcatgggattttatttttagtttacataataaatggaaagaaaactaaaaagtcttctggaaaaattgtgtccctctccctctctttccagtttaagaactaatactacaaacattagtcctggaatgttccatttctctttttttattttatttatttattttttagacggagtcgctctgtcgccaggctggagtgcagtggcgcgatctcagctcactgcaacctcagcctcccaggttcaagcgattctcctgccttagtgccccgagtagctgggactacccgcacgcgctaccacgcccagctaactttttttttttgtattagtagagagacagggtttcaccatgttggccaggatggtctcgatctcttgaccttgtgatccgcccgcctcggcctcccaaagtgctgggattacagccgtgagccacgacgcccggccggaacgttccacttctcttataaatagttgactaaggtttcccaatagtaaattaacctgctaccactagtaagtagccagactagggtcaggagagcagaaaacctcattccagggttttccaacacagtggcctcaccatgaacacattgcactcgggagctatcttcaatcatgaacgatgagcatttagatttattccgtgattccaaggaccagaactaagatatacaggaagctcttttttatctcattttaagagaaaacgttcaagtgtagttcaaagtgtacttaagggagaaaaagttaacttgtcataaacatacatgtgatagaggtgaatactcaggtgggcaagaacctccaaacaaactccaaattcgcagctgacatctgctaataatgtagaaaatctcgggcgattttttttttaattttcattttttgtaaggacagggtctcgctatgtcgctcaggctggtctcgaactcctagcctcaagagatcctccgcctcagcctcccaaagtgctgggattacaagcgtgagccaccacgtccagcaactcaagtcatttttgcatcaattaccagcaaaagtctattcagaaataggactctctcaggccagaagggagtcaagacgagccttggaggtgagcgcccagtaagataggccagaagcactccaactccaaggcagagcctgagctttacagccgctaggtcggcgtatgttctaccaccgcattcccccagtgtctcagcggtctctgaaggagagaactaaaactcccataagacaacgcgagctcaggtgggcggccacttgccgcgcgtgggcggctctgaccaataacgattgtcgttacagcgaacagtttggccccgtttgtaaaaggccgcggcaggcgaagagagaagaggtgagggcggtcgtcagctaagggccccggggctcgcggggggtgcgcagggcaggtaagggggtagtgctgagcaaggaccggggcggcggtggggcaggggtgtagagctcgggttcccagcggaaagcatgtccaaggagcggctgccgg

SEQ ID NO: 23642 - DNA, 2300 bp, Homo sapien
cacatctggctaatttttgtattttaaagtagagacggggtttctccatgttggccacgctggtcttgaactcctgagctctagtgatctgcctgcctcggtctcccaaagactgggattacaggcgtgagccgccccgctcagccgacatcacgtttttcgatgtgtaaattctcctatgtttaaaaaatatttctacaacttaaataaacttacatcatagatattttccagttcaacactacagatctgattaatagcttttcaataactgcaaaatagtccataaaatgaatgttccatctgggggcagcggctcacgtctgttatctcagcactttgggaggctaaggcaggcagatcacctgaggtcaggagttcaagaccagcctggccaacatggcaaaaccctgtctctactaaaatacaaaaattagttaggctaatttaggtggtggcgcacgtctgtaatcccagctactagggaggctgaggcaggagaatcgcttgaacctgggaggcagaggttgcagtgagccaagattgtgtcactgcactccagcctgggagatagagcgagactgtctcaaaaaaaaaaaagaaagaaagaaaaagaaaaagttccacatgtatttggtgtaaattgaataaattaccataagtggcattgatggatattcaggttactccatttttttctactgtaaacaatgctgcagttgtatcttggcacataaatctttataaattaattgttttatttctgtaggatagattcctagacataggattactttagtgacatatatatataataagcaatgtgaaatgcatacagagtatactgaatcacatttcagagctctaatttctctgcctcctaaagttggactgaagtttatgtatcttttgacttgtttacttttaagattcttgtgaccaatttgcattaaatagctggggttttttgtttgtttctttgtttgttttttgagacggatcctcgttctgttgcccaggctggagtgcaatggcaagatctcggctcactgcaatctccacctcccagattcaaggattctcctgcctcagcctcctgagtagttgggattacgggcccccaccaccacatccagctaatttttgtatttttagtagagacagggtttcgccatgttggtcaggctggtctcgaactcctgatctcaggtgatccgcccgcctcagccatccaaagtgctggaataacaggcgtgagccactgcccccggcctaaacagctatttcttaaatgcttttcaatgtgcaatcaatacacggaagaaatgcaaatataaataaaaatctggcatctggaaatatcctccccgcgctgaaaaatctggctagcaccaacgacgcaaattcttaataaaatccttacttttttaagtaaaactttttttcttttttcttatttcttaagtaaacattttaaattgaaattttttttctgtacagagaaagttgaaacatccattcctatgtttgggatgagaaaagataaattatttatgttattggaaaacagaagattacagactgtcaataaacttttacttttaaatgaataaataatacatgacaattcttttcacatgagagaacgtctgcttctatttcctcctaaaatactgtggcggctgggcatgtcaacagcgccgctggtgtagtggtatcatgcaagattcccattcttgcgacccgggttcgattcccgggcggcgcataggcgttttgcttctcgctcgctaaaaaccagatagcttgaagagtctttatatatctttccaaaagaggaaagatttaggctttttactgtccctgaaggtttccactccctcataattcgcggtcgaaacactcgaatccgcagccagaagacaaaaaagttcacgcaaatcgtgaagtagttaatacttgcgcctgcgcagtctgaggcgtccctcgcgtcgggtggaagagcggctgcgcaacaagtgaacctatggattaaggtgtagccgggcggcccggaggttgagagtgcaagattattctgcgcctgcgcggcccgggtaactttgctggctgctcctaggctcccggctcgccgccatcttgtattggggtttcattgttcccgctgggccgggcggtttagtgtaattgccgccggaggaggaggcggagtaacctctggtcagccgagaaaccccactatcctgtagccataaccgcttaaacgatttgggaggtagtgaagggcagggagctggacc

SEQ ID NO: 23643 - DNA, 2300 bp, Homo sapien
aagagaagtgttaagagaaggaaaatgattttgagtctctaggggtggcaaattatgggaaggcaaatacgcgatagaaaaaggctcattaatgaagtttgtcatgtagattcctggctgataaaggtttgtcaaaagacaaaattacaactaatttagtttaaagagcataattggcttttagttgcgattgtagaattgtgcaacacctcattttataaaatcgaatgagtgttcctatgagttgagtggaggaggttggctttcagaaagggctgaagaaagcagaaacagaaaagtgcattggttgtttcgaggttactttccttgaaaagtttaaagcagagggtatttccttatcatgtcacttcaaactggtctgtcgggaatttggctattatttttctttctcctgatttcttagaaagtcagatcgacaacttagttttgaccttgtgatgtggaacatgagtgacttgagtgactccattttggtttagtctgttgggcctagtctagtgcaggagctcagtccaaaccaatggcttcctatgaattttatttaacaggcgtaaaattgtctttagtgattaacctttgtccttccaggcagtgtgggaagagggatacctttgccttttaaaatttatgtcctgctttacttcagacattacactaaataggagtgttgagtataaaaatgaattcacaattaaagttgttaaattatttgtatataactttaaaaggagtttttttgaagctttgtaattacattgaaagtatatttgtttccttgaaaacaattttttgaaaagtgaataataatataatacagctttcaaattactttatgctgttactttatttctattgtattcacatgtgaaagtatgtgatcagttgttgctgtatcagagatattagagattctttattagttgggcattctttatgaccttttctataaaagagtaaggacattaaaatgtaagatgcatgataaaaatataagtagcgaggctcattgtagttagcctaaattaagtaatgtttaaggtaggtgttcatggccaggcgcggtggctcacacctgtaatcccagcactttgtgaggccgaggcgggtggatcatgaggtcaggagatcgagaccatcctggctgacacactgaaacctcgtctctactaaaaatacacaaaattagccaggcacggtggcgggtgcctgtagtcccagctacaggctgaggcagaagaattgcttgaacccgggacgtagagtttgcagtgagctgagatcgcaccactgcactccagactgggcaacagagcgagactccgtctcaaaaaaaaaaaaaaaaagtaagtgttcagagtaatacttttctacattatactgagagaaattataaattataaagtatatcaaattatattattttactaattttacttttatgtaataaaatgcaatatatttaaaaattgttaaaaaaataaaatttatgtcctgcttttaggcaaatggggaaggcggagaactttccacccacgtatctacatcgtatctacatcttctcaattgtcttcggcttgaaataatccttaggctaaagaggcgtattttggggtggcacattctggtgtccttacaggtacactacttttattcatgtctgttactactattacacccccttcaccttgggccaccccatcctcagtctccctcatttttctttacagttagcaccatttacccattcacggagaaccttacagttctcgcaacagggtgatcactcagtaagtactgttgtccctttggtctgtttctggcagcgattagctgtgcgcattctttgagaggagcgacggagggaacagaagagggtactagtgaagaactaaggtgcttcacccaaatagatagggaaggaggaggagagctgaggcgagcctcagcttctgcctttttttttttttttttttttttgagacggagtctggctctgtctcccaggctggagtgcagtggcgcaatctcggctcactgcaagctccgcctcccgggttcacgccattctcctgcctcagcctcccgagtagctgggactacaggcgcccgccactatgccgagctaaatttttgtatttttagtagagacggggtttcaccgtgttagccaggatggtctcgatctcctgacctcatgatccacccacctcggcctcccaaagtgctgggattacaggcttgagccaccgcgcccggccagcttctgccttcgatgtctt

SEQ ID NO: 23644 - DNA, 2300 bp, Homo sapien
ggaatttggctattatttttctttctcctgatttcttagaaagtcagatcgacaacttagttttgaccttgtgatgtggaacatgagtgacttgagtgactccattttggtttagtctgttgggcctagtctagtgcaggagctcagtccaaaccaatggcttcctatgaattttatttaacaggcgtaaaattgtctttagtgattaacctttgtccttccaggcagtgtgggaagagggatacctttgccttttaaaatttatgtcctgctttacttcagacattacactaaataggagtgttgagtataaaaatgaattcacaattaaagttgttaaattatttgtatataactttaaaaggagtttttttgaagctttgtaattacattgaaagtatatttgtttccttgaaaacaattttttgaaaagtgaataataatataatacagctttcaaattactttatgctgttactttatttctattgtattcacatgtgaaagtatgtgatcagttgttgctgtatcagagatattagagattctttattagttgggcattctttatgaccttttctataaaagagtaaggacattaaaatgtaagatgcatgataaaaatataagtagcgaggctcattgtagttagcctaaattaagtaatgtttaaggtaggtgttcatggccaggcgcggtggctcacacctgtaatcccagcactttgtgaggccgaggcgggtggatcatgaggtcaggagatcgagaccatcctggctgacacactgaaacctcgtctctactaaaaatacacaaaattagccaggcacggtggcgggtgcctgtagtcccagctacaggctgaggcagaagaattgcttgaacccgggacgtagagtttgcagtgagctgagatcgcaccactgcactccagactgggcaacagagcgagactccgtctcaaaaaaaaaaaaaaaaagtaagtgttcagagtaatacttttctacattatactgagagaaattataaattataaagtatatcaaattatattattttactaattttacttttatgtaataaaatgcaatatatttaaaaattgttaaaaaaataaaatttatgtcctgcttttaggcaaatggggaaggcggagaactttccacccacgtatctacatcgtatctacatcttctcaattgtcttcggcttgaaataatccttaggctaaagaggcgtattttggggtggcacattctggtgtccttacaggtacactacttttattcatgtctgttactactattacacccccttcaccttgggccaccccatcctcagtctccctcatttttctttacagttagcaccatttacccattcacggagaaccttacagttctcgcaacagggtgatcactcagtaagtactgttgtccctttggtctgtttctggcagcgattagctgtgcgcattctttgagaggagcgacggagggaacagaagagggtactagtgaagaactaaggtgcttcacccaaatagatagggaaggaggaggagagctgaggcgagcctcagcttctgcctttttttttttttttttttttttgagacggagtctggctctgtctcccaggctggagtgcagtggcgcaatctcggctcactgcaagctccgcctcccgggttcacgccattctcctgcctcagcctcccgagtagctgggactacaggcgcccgccactatgccgagctaaatttttgtatttttagtagagacggggtttcaccgtgttagccaggatggtctcgatctcctgacctcatgatccacccacctcggcctcccaaagtgctgggattacaggcttgagccaccgcgcccggccagcttctgccttcgatgtcttctgaaggagggtgggcttcgaggcggcaggatgtgcttagggcactgagtggcccagagtggggagctcctgcagggttgagaggaccggcggggcgaggtcggggcggggctcgcaggacctgggcggggctcgcaggggctgggcggcctgggggcggggctgggcggagcgcgcagccgcgcagcggtgggaggactgcggggctcttgaggccagctgcagagcttgtggaggccatggggcgcgtcgtcgcggagctcgtctcctcgctgctggggttgtggctgttgctgtgcagctgcggatgccccgagggcgccgagctgcgtgctccgccagataaaatcggtaggcgagaagggggcggcgcgggaaggtgctg

SEQ ID NO: 23645 - DNA, 2300 bp, Homo sapien
atatgttaattaatctactgcttttgtctgggaacagtgtctgtccagattcagggagttagaccttcgctgcaggtgtcactcttcccccaccaaattgttggtaatagctttgagtaacaacctctgctattgatggtctttcaaaaacaaaacaactcacagagctggtaaaaggggaaaatataatcttctgtttttttccctcatagcgattattggagccggaattggtggcacttcagcagcctattacctgcggcagaaatttgggaaagatgtgaagatagacctgtttgaaagagaagaggtcgggggccgcctggctaccatgatggtgcaggggcaagaatacgaggcaggaggttctgtcatccatcctttaaatctgcacatgaaacgttttgtcaaagacctgggtatgtaattttggtcttggagctcaccagattactgtgtgacatccccggatatttttatcagatggagaactgaaatttctgccttgttaattgccttacagagacgttggtaaaactgttttcctcactttcttgttagttggtactgcctgagttaggagcagttctgctgtaatgggacactagttgtctgtatcttcagttatctggaattacagccatggggtgggggtgggaatggctgccattgtctttttttttcttttgaggagtttcgctcttgtcgctcaggctggagtgcaatggtgcgatcttggctcactgcaacctctgcctcccgggttcaagcgattctcctgccttagcctcctgagtagctgggattacaggtgcctgccaccacgcccagctaatttttgtattttcagtagtgacggggtttcaccatgttggccagctggtcttgaactcctgacctcaggtgatccgcctgccttggccttccaaagtgctgggattacaggggtgagccaccgtgcccggcctctgttgtctgttcttaaaattctgggtttgtgttaaagaatcagagaaggtttggagatagtcatctcattgtgatcattttgcagctgagtaaatgagacccagagacttgaattgtctggctcaaagtcactcacatatggccatggccagggtcagtggctcatgcctgtaatcccagcactttgggaggccgaggcagaggatcacttgagcccaggagttagaaaccagtctgggcaacatagtgagatcctgtctttactaaaaataaaaaagttagcctggtgtgatggcacaaacctgtagtcccagcttcttgggaggcagaggcaggaggatcccttgagcctgggagatagaagctgcagtgagccttgcatgccactgcactccagcctgggcaacaaagtgagaccctatcaaaacaaaccaccaccaacaaaacaaactccgtcacacagctgtggatgcagacacgtgcctagaacttgggatgtgcaactgctgccctgacagcagaggagctggataggtcatggggaaagtctgacaggcctctggaggccctttcggcagggagtattttgtaactttggcctccttccagttatctgaaatatccagttttgcaaaataggattctcacaggaatggaagtgcctcagctgccttccacatcctctgtagatgctgcctctgcttccgtttcctccacgagggcgaaggtatacccagaacaaattatgccacgaagatgcatgtctgacatctttgtttttaaattgaattcagttggtactctggcttttttcctttgactatccagtttttttagacttttagtctaaaaatagccaggtaaaaatatatctacttttgatatattaatatttacatgatcatctgacccatcgcctagcaaatctgcttttggacagtgtagtgaaagtatagtgtttcacactgttccaaagatagagctcctttatgtgtctcctgagaactgagggaagccccaaattcactcagattacgttctttcatttgatcagcatagacaccactgacttagctgtgctttatgtttttgcaggtctctctgctgttcaggcctctggtggcctactggggatatataatggagagactctggtatttgaggagagcaactggttcataattaacgtgattaaattagtttggcgctatggatttcaatccctccgtatgcacatgtgggtagaggacgtgttagacaagttcatgaggtaattttttttccttccatttaacctaagatcttttaatttaggttaaattaaacttgat

SEQ ID NO: 23646 - DNA, 2300 bp, Homo sapien
tgcattttatggatttaaaacaacattcacataaattagtgcattcagtaattcaaacacaatttttcatgttgcaaatagtacaaagatggaaaacaggcttaagtttgggataagtaatacggggtttatctcttattcccttaaggggcttatagttagggataagtaataaggcacatgcagagataagtatatgaaaataagaaattaagagccaaggaaagatccctatcactgatcatggaagggaaactttcacatcaagtttttctctcaaaatgtactatatttttttacagaacaagggacagtattataaccatttcagtattacctactaaaagcatagtagtagtataagtgtacaaaatgttaaacacatttttattggaaaaactgattcgatatctatgccaaaactgagaaactaaataccttctaaccatagcatttgggtcccagtctttaggagactggaaaaagtaggatggaaacactgaattcttcagaaaaataatagcctggatatctcatatccaaagaagagtgatctttggctaatggtcaacatgagaaaataacagtcaattaaataagctactaatgatgctataaaaaacatattccccaactgctcctgccagagctgcaacctcactcaagcaagtctccctgggagggggcggggtggcagcggtgagatgaaactatatacacaatataaacagagagcactctaattgtttcatgatacaactaatcgtattagaataaatacactgctgggtatggtggctcatgcctgtaatcctagcactttgggaggcaaagtggggcagcatcacttgaggtcagtagtttgagaccgcctggccaacatggtgaaaccccatctctactaaaaatacaaaaattatccaggtgtggtggtgcatgcctgtaatcccagctactcaggtggctgaggcatgagaattgcttgacccaggagacagaggttgcagtaagtcaagatcacaccactgcactacaccctggatgacagagcaagactccatctcaaaaaaataataataataaatgaaaaaacagaataaatactactaaaaaacagcacccaggtgaggcagcatgcacctgtagtcacagctactcaagaggctgaggtgggaggatcacttaagcccaggggcacaaggctgtagtacattatggttgcacctgtgaacagccagccaatatactccagcctgggtgacagagtaagacaggaggataccttgaggccaggagttcaagactagcctgggcaacatagcaagactctgtctgtacacaaaatgtaaaaattagccaggcgcagtggttcatgcctgtaatcccagcactttgggaggctgaggcgggcagatcgcttgaggtcaggagtttgagaccagcctggccaacatagcgaaaccccacctctactaaaaatacaaaaattaactgggcatggtggcgcatgcctgtaataccagctacttgggaggtggaggcaggagaatcgcttgaacctgggaggtagaggttgcagtgagccgagatcgtgccactgcactctagccttggtgacagagtgaaactccctctcaaaaaaaaaaaaaaaaaaattaaaaattagccaggctcctatataatagattgatcatgcaccatatccacaggaggttggaaaaaccatgccattttctggaatttaagggtgttgcattatttcatcaatcatttgttgacaaaaaagaaaaactaaaaaataaatttaaaatgtgaaccttcaggtattgagtaacacctttatcttggtatagaactgatactttttttttattttgaaatatctgataataatttggaatgaagtaaggttctgttaaagaaaatatatttgaagaccctttaaagcagtgaatctgaaacaattttcacacccttaagtggttgatacgtacctatttttaggtattttgaggtatttaccataaactaaatttagaaattttttagattcacttgaagtaaacattacaaacattggatacggtggggttttctttagattttacttgagagaaggtgagtacaaagcaatttgcagttgttgtaatgacaagattactgcgcaagtgtgaatccaaacagtatagcttttaaattttaaagcatttggtaaattatcgctgagtttttttctgttgccaatagcaaactgcttttccattaatggagaattcacgcctttcaagcattttaaatat

SEQ ID NO: 23647 - DNA, 2300 bp, Homo sapien
acaggcgcgcattaccatgcctggccaactttttaaaaattttttgtagagatggggtttcaccatgttgcccaggctggtctaggcctttgtaattttttaataacactacatgttaaattggttgcatttacttttgaactcttaatcttttgcttgttctgttctaccagtgtcttgacagttaatcatgatctttgcacagtagatgcagaactagttctgaagttttgctgcctgttaattaccatttggatgctttaaaaccctacaggtgattccaatgtgcagccaaggttgagaccactgtcttaagatttcagcaaccaatttctcacccagaatgctacagtaaatgaaacacttaactctttggacatatgctggacttggttaactttggtgtcattccaagtattctgttctagtgccaactgctcaggagttatttaagttgcctctgctgttaggctgtctgtgcttattatcaagattacttctaaagttcttactaagagaactgagaaagttctaaaagaaagatccttgcaaaatggatctgctttgatacagattgggcttcttaggacttctaaggcactaaaaccctttgtaggcattttcacacccacattggtgattcccaaccctgggtgcacattagaaactttaaatagctacaatgctaaggtcctatcctcagtctttgaatctgaatctctggttatgggggggtctcagtatttttaaaagctcctgaagtgaggatttaatactagaatgccagtttcttaattcagtagcccatatttgcttttcattttacttgagatttttgtttaacatcttcaagttacattactaagacttctaaatttcacccctaatcaaatcaagacagaagaatcaaaagacaacattctgaaagtcaaggctttaggcatgggcacacgtacttcaaaccggtatgaaattactaagagtcaggcataagacaccagctcccataaattttatctgactgaagattatatctagctgtaaaattcaaaaggactactccccaactaagatgtctttaagttctccctcaggtactcaccttaaaatgctctacaattttgatcaaaatccagcgcgccactcccagacctactgaatcagaatcttcaagagaggagcttgagaatccatatggtttaacaaactccaggtgattatttttatttacttttgagacggagttttgctcgtgttgctcaggctgaagtgcaatggtgagattggctcactgcaaccaccacctcctaactccaggtgattcttattatcagacaagtttaagaaaaactcctaatggatagtgaaagaatacttaagaaattttggagatggcataagtgcaatagctataccttcacacttaattagaaccgtgtgttttcctatgaccagcagggattacttttattaaacaatgataatggcaaaatatctggttcaaaatcatctctgctcagattttgttcttttttgccactgatagtcatttggaactaggaggggaaaaaggagtgtgtcacttcatagttcagttttaagtttctcatataagccatcctgatcaatcatgtctgtgtgcccgttccagcggtgataggcaaggagtgcagcgttgtgggctgcaatggcactcatctccatggcacttgctgcacactctatgccattgaggtaataaagtcgatcatggagaatgatagaggggcatttctccgggggcttatagtgaggatatgcaagccatggcttcttcacagcataatcataggacagaaagagctttaaaatttgtgctttagtaagagtttcttgggaaaagatcttccaaacatatgttccatctgttgatggctcaggatcttccttttctctcacagagggcacaatcccaatactgttaatgaacaaatctgaattatcagtggttaaaactgtattaaggccaaatttatctatgggtctagagctaaagatagatgtattcaattcccccttaactaaagttgtcactatatgttgataatattgatggaattcctcaattggaggatcaaagttgagaaaagtaatattcgacatttttcgattcaacggagtggccaccaagacgatgtcatagaagtctgaacgagtctcagttccaatttggtagaccacttcatacatctttgttggatttcctagaggaaataaggaggcatatatttgtttagtgtttctaacataccttctaaaaa

SEQ ID NO: 23648 - DNA, 2300 bp, Homo sapien
tgagaactatcccctatttaaacacaaggtattctattttggtttagtcttctataattttggggtaacaactgggaacaagtccgagaccactttttacacatcttgacatgaaaaaagaacaccttatattagaaaatgtttgtgtgctgcacttcacattttatatacaggggcaatagcacatcagtgagttctggaggtagtgtttgaaaaatttcagaattcccaggcatgctggctaacccctgtaatctcagcactttgggagccggaggcaggcagatctcttgaggccaggaatttgagaacagcctgggcaacaaagcaagacctcgtctctacaaaaaaaaattagctgggtgcagtggcgtgcgcctgtagtctcaacaactcaggaggctgaggtggaaggattgcttgaggccaggagttcgaggttgcagtgagccatgatcacaccatgctccccagcctaggcgacagagcaagaactcatctcaaaaaaaattttttttgcaagacccctcagtcagaaatagattcaaattcttggagacagacccagtcaccttactctacaatggttcagaggctgctaatttacatgttacgggaaccctacttggtctgacagtatgctgtagggttacctgccaaaaaaatatagaggcccagccgggagcgggggctcacgcctgtaatcccagcactttgggaggccgaggccagcggatcacgaggtcaggagatcaagaccatcctggctaacacagtgaaatacggtgtctactaaaaatacaaaaaatcagcccggcgtggtggcgggcacctgttgtcccagctactcgggaggctgaggcaggagaatggcgtgaacccgggaggcagagcttgcagtgagccgagatcgcgccactgcactccagcctgggcgacagagcaagactccgtctcaaaaaaatatacatatatagagagaggcccattcctccagggatcattatcatttggtatattggtatatatgaagaaaataagcgatacgatccacagacatgcgggattggccgggtttgcccaggagctagagacgggaccgttatctcaatatctcaattttattttttaaatagagaaggggtctcgctatgttgcacaggctggtctcgaactcctgggctcaagagatccaaagttctgggatttacggcgcccggctttttttatttatttatttatttttatttattttggctgttccatagacaagagcagggataaccggctgggcgcggtagctcacgcctgtaatcctagcactttgggaggccgaggcgggcggataacgaggtcaggagatcgagaccatcctggctaacacggcgaaaccccgtctctactaaaaaatacacaaaattagccgggcatggtggcgggcgcctgtagtcccagctattcgggtggctgaggcaggagaatggcgtgaggccgggaggcggagcttgcagtgagccgagatcgcgccactgcactccagcctgggcgacagagctagactccgtctcaaaaagaaaagaaaaagagcagggatacccaccggtggaatacccgttatctcaattttgtacaaggaaaacggaattcagaaaggtgcctagaggacgcacccctccgtcctggccaatcgctgaggacataaccggaagctcaacgatgaccgaggcgctgagatatcgcgaggtgaaatgtaaaaactgccaacaatccattggctaacgaggtcgatgacgccagacgcaagacgccgggcctacagcgggagcgtgaggaaagccgtgcgttgcgttccaaggcatctgtgagcccgcggagtatacaccatgagcaaagctcaccctcccgagttgaaaaagtaagtatgtgtgagagccaaaccgaagtggtcagttatttgcgtcctgcgagtcccttggttccctctccgttagccgaatgtcttgagccgcttcacttcatttcttcttccggtccgaggtcgccgggatcccggccaggctcccgcgcatgagacgtgaagcccgcgcagagctcgcgcgtcggtgtggttacagccggcagccacggcacctccttccggccgactagtctccaggtcccgcggtctggcccctggtcacccggcgctgtccctcgttccttgaagatctccagtgctaccttttgttgaacatctcgaatagtatcatgttctagatagacggctagagggggaaattctctgaaggaactaaggaggg

SEQ ID NO: 23649 - DNA, 2300 bp, Homo sapien
cactgtaaatgggaaaaactttgagaggagactaggacattgtgacttgaagttcattaatgtagaaaagaaactgtctatgaggctaaaaagagaaattcattatctatgtcaggtctctagcttcaactaaacactaatagcaagtggtagtaaaggtacaaagctatgaccctgctagaaaaaattcagtgtctaggattttgagtactaagagagtgcaaaatatgtgatgagtttaagtctttactatcattgatatttatatagagccattccagaatatcaggaattaactgaatttttgagaactatcccctatttaaacacaaggtattctattttggtttagtcttctataattttggggtaacaactgggaacaagtccgagaccactttttacacatcttgacatgaaaaaagaacaccttatattagaaaatgtttgtgtgctgcacttcacattttatatacaggggcaatagcacatcagtgagttctggaggtagtgtttgaaaaatttcagaattcccaggcatgctggctaacccctgtaatctcagcactttgggagccggaggcaggcagatctcttgaggccaggaatttgagaacagcctgggcaacaaagcaagacctcgtctctacaaaaaaaaattagctgggtgcagtggcgtgcgcctgtagtctcaacaactcaggaggctgaggtggaaggattgcttgaggccaggagttcgaggttgcagtgagccatgatcacaccatgctccccagcctaggcgacagagcaagaactcatctcaaaaaaaattttttttgcaagacccctcagtcagaaatagattcaaattcttggagacagacccagtcaccttactctacaatggttcagaggctgctaatttacatgttacgggaaccctacttggtctgacagtatgctgtagggttacctgccaaaaaaatatagaggcccagccgggagcgggggctcacgcctgtaatcccagcactttgggaggccgaggccagcggatcacgaggtcaggagatcaagaccatcctggctaacacagtgaaatacggtgtctactaaaaatacaaaaaatcagcccggcgtggtggcgggcacctgttgtcccagctactcgggaggctgaggcaggagaatggcgtgaacccgggaggcagagcttgcagtgagccgagatcgcgccactgcactccagcctgggcgacagagcaagactccgtctcaaaaaaatatacatatatagagagaggcccattcctccagggatcattatcatttggtatattggtatatatgaagaaaataagcgatacgatccacagacatgcgggattggccgggtttgcccaggagctagagacgggaccgttatctcaatatctcaattttattttttaaatagagaaggggtctcgctatgttgcacaggctggtctcgaactcctgggctcaagagatccaaagttctgggatttacggcgcccggctttttttatttatttatttatttttatttattttggctgttccatagacaagagcagggataaccggctgggcgcggtagctcacgcctgtaatcctagcactttgggaggccgaggcgggcggataacgaggtcaggagatcgagaccatcctggctaacacggcgaaaccccgtctctactaaaaaatacacaaaattagccgggcatggtggcgggcgcctgtagtcccagctattcgggtggctgaggcaggagaatggcgtgaggccgggaggcggagcttgcagtgagccgagatcgcgccactgcactccagcctgggcgacagagctagactccgtctcaaaaagaaaagaaaaagagcagggatacccaccggtggaatacccgttatctcaattttgtacaaggaaaacggaattcagaaaggtgcctagaggacgcacccctccgtcctggccaatcgctgaggacataaccggaagctcaacgatgaccgaggcgctgagatatcgcgaggtgaaatgtaaaaactgccaacaatccattggctaacgaggtcgatgacgccagacgcaagacgccgggcctacagcgggagcgtgaggaaagccgtgcgttgcgttccaaggcatctgtgagcccgcggagtatacaccatgagcaaagctcaccctcccgagttgaaaaagtaagtatgtgtgagagccaaaccgaagtggtcagttatttgcgtcctgcgagtcccttggttccctctccgttagccga

SEQ ID NO: 23650 - DNA, 2300 bp, Homo sapien
gagccaccgtgcccaatcaaaacatagctttcttcaaagaagcttgggttgagtcaaactccccactgccctaaactagagttctcctgccatctagcgcccaatggcagaaaatcgttaaattctaatgacggccccattcctttgttcctcccccacccccaccttgcacccccatgcctgacatggctttctcttcagccccatatgccaagcaaacacccactcatttcaattcaattcaaagcctcaattcaagccttatctcctctaagaaaactttcctgaggaacccggatggctcactccctccttgccagcctggaccacctcctccagcacacctcttccaacactgccccttccccttctccacggagtgtgtttcccttctccactgacactcccctctggacccgcacccctagctaatgtattcgataaatgaatgcacacgacagtactgttatgggtgggacagtgaggcattccaaaaaaaaaactgctccaggaattcagaaacagtttcatgttgctggcatgtaagtgcttcattgatgactgcttcattgatgatctgtagcccctgctttgtctctgaagttcattttttatgagaaataaatgcataaacatacatctaccctgtgatccaacaatcccatttctagatatttacccaaaagaaaagaaaatctgtgtctacaaaagacttggtccaggactgggtggtggtgcatacccgtaatccctttgataggcagaggcaggaggatagcttgaggcctggagtttgagaccagcctggacaacatagcaagatcccatctccaaaagaaaaaaaaaatggtcaaggatgttcatagtcaccactttattcataatagctactaagtggaaaagacccaaacacccatcagcaggggaatggatcaacaaatgtgggccgggaccgatgcctcatgcctgcaatctcagcactttgggaggccgaggtgtgtggatcccttgagctcaggagttggagaccagcttggctaacatggtgaaaccccgtgtctacaaaaaaaaaaaaaaaattagccagacgtggtggcacatgcctgtaatcccagctactcgggaggctgaggcatgagaatcacttgaaccagggaggtggaggctgcatgagccgagaccacatcactgcactccagcctgggtgacagagtaagaccctgtctcaaaaaacaacaacgacaaatgtggtatgtccattcaatagaatactactcagcagcaaaaaagaaccaacaacacagctcaatctcgaaagcattaggctaagtatttttcagcaatatgctaaaaaagccagacagaaaaggagtacttattggataataacatacatatgacattctagaaagagaaaatgtaatctacagtgacagaagcagaccagttagggcaggggtggggagatggggtagaaaggacggagattgggacaagacagagtttgggtttttattgttgtttagagacagagtctcactctgtcgtccaggctggagtgcaatggcgtgatttcggctcactgcaacctctccctcccgggttcaagcaattctcctgcctcagcctcccaaatagctgggactacaggcatgtgccaccacacccggctaatttttgtatttttagtagggacggggtttcgccaggttggccaggctggtctcaaattcctgagctcaggtcatccacctgcccacggcctcccaaagtgctgggattacaggcgtaagccactgcgcccggcggacagggtttgttaaaactcatcaagcagcacgcctaagatctgggcatttatctgtatgtaaattacattaaataattttaaagaatgtaaagggagggacatgggagggaggaggaaaggcaggcagcagccgcagggcaggtgtcccagtgaccggttcccaagcgggaggagggcggtgggctcgcggacaccagcatgcagtggctccgttcggccgccaggggggggcgtgggccctggaagggcaggcggcgaagggcggcgaagggcggtgagggggcgggcccgtacgccgattccatatgggcgccggcgcggagcgccgcggggcagcgcggggtcgccatggctgagctgcagcagctccgggtgcaggaggcggtggagtccatggtgaagagtctggaaagagagaacatccggaagatgcaggtagcggggctggggccgaaccaggacccccttctcagcgggtgggttccgggcc

SEQ ID NO: 23651 - DNA, 2300 bp, Homo sapien
ccatctctttttttcttttttttttttttttgagacagagtcttgttctgtcatccaggctggagtgcagtggcacaatcttggctcactgcaacctctgcctcccaggttcaagtgattctcgtgcctcagcctcccaagtagctgggactacagacgcacgccaccatgtctggctaattttttgtatgtttagtagaaatggggggttttaccatgttgcccaggctggtctcgaactcctgagctcaagcaatccacccacctcagcctcccaaagtgatggtattacaggtgtgagccaccatgcctggcctgcaagttacctcttgatttaaaatattttccaatcatgaaggaaattgacttgattctgctacttccctccacctctgactttgggggtaggggacagataagcagaaactgctgaacatgaccctcagccggctgggcagccatccctcagccacagtgagcttgatttgcgtgttccagtaggaagcaaggagtcaggtccttctctagtcctggggaacaggagaagggtgggggaacccctgattcctccccttctgtagccaaagcagactagtttagggaggagacagggaaaccaccagagcaggtcaagatcaacctgaaggaagtgggagtcagggacaacctactaaaggaagtgcatgtgtgccttgtacatgcatggggtggaccaaggaaaagatttaccctaaaagaacaaagtatgctccgacaaatctattgaaaggaatgatttacactggtgcttcctgcccaaatgttgagaccaatggcctggtgcttccttcttgaaactaggttgctctacttacatgaaacaaactgggcagaggtcaaccgtgagagcctgagcctccccaagtaaacagcaaaagattccccaggcccaacagcccccacccccaccttcaaggaaagtggatctacccggagcacgtaggccagaggaggcaggagaagagggtcagtccgtgagctccgggtacctggagaacatgaatctcccgggtgtactgtccccatgagggtcaccgaggaacctatggatcttccactcttcgcccagaatgtcttccctctatcccctccacctccccaaattccagcaccaggggccacctcagagccacaaatcctgaaaggaccacccaggtgactcgggcccacacacccctctttcggggtacacttggtggcaggctagcaggcttttggcctcagctggtggtgccatataaccagattcgtcacagagacccattttttatcagtcccaggccagaagtacgaagactgatcttaacgatgtggcctgcctgggaggtaaggcggcaggcgttgccagaattgatgggaactgtggcacaggtgggaaacctggtttaacaaattcttcattgattcaggggaccactttccttgagccaagtcttggcaagcggccggcgaaactcacaggtccctttcctggctgcgtccccagcctccagccttccccgccccagagatgccccaggagcggcccctcggtgtaggtaacgggtgcccgggcggctccgctccgccgcctagagcctggaagccgccactgcggcccaggacaatccggctacgcggccggcgccgaccccgcacgctggagtccgctgccgcacggcgctggcagtcgggggtggtgtctgaagtcaggcgcttcctgccttttcgtcggcccgggtgcccggctcgcgccgccaggctctgggatcccaggtcgccccgcccagcagcccgcgccctgctcggtgcgctcagcgtccccgccccttaccccaaacccccaccctctgtgccctcaggggggcacccccatcggggcgggaggggggggtcagctgtgccccggtcgccgagtggcgaggaggtgacggtagccgccttcctatttccgcccggcgggcagcgctgcggggcgagtgccagcagagaggcgctcggtcctccctccgccctcccgcgccgggggcaggccctgcctagtctgcgtctttttcccccgcaccgcggcgccgctccgccactcgggcaccgcaggtagggcaggaggctggagagcctgctgcccgcccgcccgtaaaatggtcccctcggctggacagctcgccctgttcgctctgggtacgtacgccggctgcggcgccccctgcgccgcgcgacaccctgcttcccccggtccccgccgagttcccctttccgggggtttctgcgcccgcctggga

SEQ ID NO: 23652 - DNA, 2300 bp, Homo sapien
ggtgatttcagtttaaggtggacaattatgcaaatatatacaaaaatcagtagtttttgtatcttaactactttgaaaatataataatgggagaaaataatcctatttgcaaatggatcacaatcataaaacactaaaaagcataatccgtgtttttaaaaccataaaactttattaatagacatcagagaaaacctgaagtcagtgaagagctataatttattcttggttagaaagcttcaatagggtaaagaggttacttccccaaaattaatcaataaagtcaatggatttctttcaaaaatgggggaaggtatgaggacttgacaaaatatccttccatgtgaaattcagaatggctagggcaatgttataaaaagaaaagtaattaggaatactaattccacctcatgacaaagtgtgataaaactttggcaactaaatggcgtggcactagcagaatggatgtgcaaaacaatgcaacagcttagagaatccagaaatagatccaaaatatatgagaatttaacacaggaaaagcaggcactttataaatcagtgagggaaagatagactacttgccatctgggaaggaaagctaaggcagatgctacttcatttatttcaacaagataaattcctggtttgtcaaaatggtaaacataaaaagtgaactcataggggtattaaaaaacatagacttatgtttttgatgcccttgtgttagggaagacttatcaagcacggcacaaaaggctgcaatcttgacaaatattaatagatatgatattaaacaattcaaaacttgcatttctataagccactcccccaccataaacaaggtaaaagacaaagtatggagggaaatattttcaccatctatgatagtgaaaaaattaatattcttaatttacaaagagcttacaaatcaatgtgaaaaacagaaacatcaatagaaaaatgggctgagaacataaacaatttacaaaggaaaatagttaagtagccattatatgtaattggaaatatccattttactagtatcaaacatatatggacacacatgtatatgcatagagatatgactggaaaggtttttagtgattgtctctggggtgagagtttgcataaaattccgttttttccttattttttttaattttgcttaatttttctacatggatctgtatttcctttataatcagaaaaataatgtcattttaatttaaaaataaaagaagacaaagagagctgaatattgctccaacagctgccaagattccagaatgtttgttctctccaagaagcagtcagctccagctttgaggggatgtggccttgcttaggagacaggaatgttcttgagtctgatttcagggttcctagaaggaaattgttaagaagtttcacagtcaaggaagggaggggtgactgttaaatcagctgggaagcttttaaagatcctgtagcccaggccacactgtgatctgattaaatgggcaactctgcatcagggcccaggcatcagtgtttgtgtgaagctccccccgtgattctagtgtacagccagggctgggagccactggaccagaggaaatctgtggctccatttggatgaggagctctgtctatctggtccacaaaggtctagggattttctcagccctgatcagaggacttgttggggtagagaaagagaggggatgggggaccaggaggagggaacagttctgaaatataccagaagagtggaaagcctagattgtttaatggagatttgggtttacatgaagagtcctttaagcagacggaaggaaaggtgtgtgtgcatgtatgtgcaggtacaggccttttttctcaccccataagtggttctatttttgtcctttatagggctacagaacaggttacacgtatcgccacccctttgttcaagagaaaaccaaacacaaaagtgaggtggagattccagccacggtcacagccttcgtgtttgaggaggacggtgccccggtgcccgccctgcgacagcatgcccagaagcagcagaaggagaagacccgctggctcaatacgcccaacacctacctgcgggtcaatgtggccgatgaggtccagaggagcatgggcagcccccgacccaagaccacggtaagggggagcccaggacagacccgggcagagaggggcaggctgcattagcagggtgaagcatttttaaaacgggaacagaacaaacctctcctgccccaggttagtagcatcctctttgggcttcctattaggcctctgggagcagc

SEQ ID NO: 23653 - DNA, 2300 bp, Homo sapien
cagccctggcattaggcctctttctcttcccttctctcattaaaacttgctgatctggtgcctgtcctgcctgctcagcccaactccccaatcagagatttgacagtttcattgccacaggacaatggtttctagctaatacaattgcctcaaatacctctcaggactattttcattttaattagggcgtaacaccataacccaaggaatggtgctctggtggggaatttcagcagcaatgggggttggggtgggaattattttgttcactgtatatttacattgggggtcaatgtttgctttcttacaagaatggtgcaggctacttctaggggcaaaggatgaattctattagcacacacaaaaaatagctgagattctgaaaattcaaatcttagcaggttgtggccacagggcagcctcagaccttctggggaaggagaggaagctggtgtttgaggctgcaagattggttcttagggagggcagtggagatacatcagcaaaccccaccctgaggccagccctggaagggaggccattggagaaaggcagcatcaagtggtggctaggaccctgttctagctaaaaatagaacctctgggagaaggagctcagccggcactggatgtgcagagcacagtctcattcttagaagcaacctgttcctaagtagatgggcgagcatcaggactgggctcagggaccatctggcactgaaacactgagccccaggccccctggctggattgaggaggaggctgagccttagtgggtgtgcaggtatcctggattcccacaggcacattgtacctaccaagatgagttctccttgtccctcattggtgggacgagtctcttcgaatgcctccactctggacagcattgggtcagggatgaagtgagctgccagtgagccagagccatgggcaggtggcggtagggtgggggtactcagggatgctgccagccctgggtgagacagcccccagcagctctgggtcagaacaacaggatgtccaagtgaaaatggaaaatgatcacttgtcattacttgtctttattcttaaacattttgacaattaatgctttgaagaccttgattcctaggagttttggagtagtaactcaccctagtttgtaaggtattaacaactttatattcctccttcagtagtactttaggaccttttatccaggtattagctggggcctttcttccccttgaactctgggtgaaatggccttgaattcacccatggacagcctgtgcaaatctaaaactctcccattttcctgggatgcgatattcttcaggctgcttctgcgtcttgggctgcatccaaacatcactcacattagcatctgtgagtttagcagctgttagtgaagtgttttgggggtctcaggaagggagatcctcccagcccagcaactcgccaccacgtctgggctcgtgcaggagttccacattctgcgccctccaccaggccagggcaaccgctttccctggaggccttgccagccagcactcagcaaagaaattctccaattcttctctttaaaaggaattttgatcccaattgtaaagataatgcagctttctttaccttttttcttttgagacagagtctcactccctcccccaggctggagtgcagtggcgcgatcttggctcactgcaacctccacctcccggattcaagcaattctcctgcctcagcctccagagtagctgggactacaggcacccaccaccacgcccagctaatttttgtatttttagtagagatggggtttcaccatattggcctggatggtcccgatctcttgacctcgtgatccccccaccttggcctcccaaagtgctgggattacagacatgagccactgtgcctggcctctttacctttttaaaggcataatttgcttttaaaataaaaattcatttcaagttcattttaaggaatttcccagaagctcttataaatcaggtgaagagtcatggtggtgcaggccctgacacttgtcgtgtttgtgttttgcagtttccacctggatgtttgaggttgtgtagatgtggccggcacccttgagagtggagctagggggtgcagactgagcagtgaacagaaggagccttggacagggctgggccagcctcccggtaagtaagcagtagtttctggtggtgacgggggtgatgcacactttttggctgggcccatcacgtgaggtacagacaaggccctttgcatgaggatgagcttccagacactcaggtcattgctatgaagtcc

SEQ ID NO: 23654 - DNA, 2300 bp, Homo sapien
gttctattaagatatagagcccaccttacctgtgacttctgagctctggagaaggggttccctgtttctcagatctcatcacccattagcaccaaaagagctatggctgccaggaatgactcaataaacataacacgtcctggcttctttgaccagacagacctaggtcctggggtggggaggggaaggggtttcatcttgtgtggctgagcctgttgtaattcttctagcaggttttgacaggagaatggggagaagtcttgtggactcggtgattctgaatgagaatgagtgagaagctctgagtgtggaaggagggtgcagggaccaggtatgcatgtatgtttcttggaaggggggctgaagcagaaagacaagtttatcctggcatctagggttgtcgttagcattttcttttctaaatcagtagtagctctcagagtggtgtttctaaagtgttagtgtgcaaaggaatcactagggctgcttgttaaaattaccaatcctgagcctacctccagagattctggttccacagcagcactgtggtgggggccagtgacttttgtgggggtgtctgagggctgtggtgccccagaacctggaagggcagaggggccatgatcaggtttcagatcagtggccagaggcttttctggaagctgtacattttcacaagcacattttcaaaagcccttggagaggatgttgattgaggggagttttggggactggtggagattatgggggtgaaaagtccagagctatctcttaacacccctactctctgagggccaggccttgaaagtattggaaatgggaggtgccttaggtacactgtcattttacagaggaagacaacgaggcccagagaggttaagtgggttgattaaggtctcacagctagttaagagcagctctgagacggcaaccgaagtattctggttccctatccagttccccactcactacacacctgttccttctggggcgggagacctgaggaaggaaaggagtgagaggagaatgtagtgagagttggagagcgttgggtccacagcccccaagggcagggccacaacaaaaatgttgtcctggttgaaaaggagtgagaatcaggacagggagaattttggtttggaattcagtcaaacaattgctattaaaatcactaatagaattatcttccgaaggctagctgtcctttccagacgaaaagaaatattccaagtctaagacttttgctttcttccttccagggagaatacattcccccaagggagctctgtttcagattttctccctagtaacagactcccctgcttagctctggccatcccgggtagtgagtggtgcggggcgggggtggaagggggctggaagcctggctaggggggtctgcggcggcgcgggcgggggcgctgcggggaggaggggggcgctgcggggcggtagtgggggtgctgcggggcgaggccgctgcggggcggtggggggcgctgcgggcgggggcactgcagcaccgcggccctcgggcggccggcgcggcctgctggagggggcgctgtgggcaccgcgcagcggccttttgtcagcgcgcagggccaggagagctctcatttcctcccagcctcgtgcgggaaatggctttaattctgacggcagggctgtgagggactagcgggaacccgagccttttgtcaaggaactgcggcgtcggtggccagtcatccccgccgccgcggagccgctgcactgctgggggatctcccagcagctctgacgagcgcgggctgcagcatgggcagaaaacgctgccctgcagattagctgggtggattttttaagcgcaccccaccccccaaacccataaaataacaaaaccaacccgcagtggccgaccggagatagctaagatgccgcgcaggaggtaagggtctggggagcgggcctggtgggctgcctggggtcgctggtctcctggcgcggagaccctggcatccctcggccgggcgggagccgcttggcccaggtggggcgcgtctgttgccgagcgcgtcggtgctgcagccctggccggcagcggtgtgttttgcgcctaaaggtttctggtgatgatgtagcatccgaggctcttaggaaatcggggctgcaagcactggcccctgcttggggatggtgggaccctcgcccggagcgtaacgcctgacaggtggggctttcttttgggtccgaatggaggggcggcaagcctcgcctcgcctagccgggcggggccgctcctcccctcccctccctcc

SEQ ID NO: 23655 - DNA, 2300 bp, Homo sapien
aggcaggagaatcgcttaaacctggggagaggaagttgcagtgagctgagatcatgccactgcactccagcctggggggcagcatgagactctgtctcaaaagaaaaaaaaaaagtttattgtcccctctgggaggccatgcagtgtagtggttagggcccacaaactctggagccacagcacttgagtttgattcattgctcagccacccactagctgtgtgacctagggcaagcgacttaacatccctgtgcctcagtctcttcatctataaaatggggatgataatagtaccaccctcacagagtttttgcaaggattatgtgaaaatgcatgtaaagctctcagaacagtgccaggaaccaacaagggtttgctaggattcatgtgagaaaacaaaataacacactaggaagagaaattttgggggatggaaatgactggggtgacttatgaaacctgctatttctaacaaaaattctccattctttttgggggttctattaagatatagagcccaccttacctgtgacttctgagctctggagaaggggttccctgtttctcagatctcatcacccattagcaccaaaagagctatggctgccaggaatgactcaataaacataacacgtcctggcttctttgaccagacagacctaggtcctggggtggggaggggaaggggtttcatcttgtgtggctgagcctgttgtaattcttctagcaggttttgacaggagaatggggagaagtcttgtggactcggtgattctgaatgagaatgagtgagaagctctgagtgtggaaggagggtgcagggaccaggtatgcatgtatgtttcttggaaggggggctgaagcagaaagacaagtttatcctggcatctagggttgtcgttagcattttcttttctaaatcagtagtagctctcagagtggtgtttctaaagtgttagtgtgcaaaggaatcactagggctgcttgttaaaattaccaatcctgagcctacctccagagattctggttccacagcagcactgtggtgggggccagtgacttttgtgggggtgtctgagggctgtggtgccccagaacctggaagggcagaggggccatgatcaggtttcagatcagtggccagaggcttttctggaagctgtacattttcacaagcacattttcaaaagcccttggagaggatgttgattgaggggagttttggggactggtggagattatgggggtgaaaagtccagagctatctcttaacacccctactctctgagggccaggccttgaaagtattggaaatgggaggtgccttaggtacactgtcattttacagaggaagacaacgaggcccagagaggttaagtgggttgattaaggtctcacagctagttaagagcagctctgagacggcaaccgaagtattctggttccctatccagttccccactcactacacacctgttccttctggggcgggagacctgaggaaggaaaggagtgagaggagaatgtagtgagagttggagagcgttgggtccacagcccccaagggcagggccacaacaaaaatgttgtcctggttgaaaaggagtgagaatcaggacagggagaattttggtttggaattcagtcaaacaattgctattaaaatcactaatagaattatcttccgaaggctagctgtcctttccagacgaaaagaaatattccaagtctaagacttttgctttcttccttccagggagaatacattcccccaagggagctctgtttcagattttctccctagtaacagactcccctgcttagctctggccatcccgggtagtgagtggtgcggggcgggggtggaagggggctggaagcctggctaggggggtctgcggcggcgcgggcgggggcgctgcggggaggaggggggcgctgcggggcggtagtgggggtgctgcggggcgaggccgctgcggggcggtggggggcgctgcgggcgggggcactgcagcaccgcggccctcgggcggccggcgcggcctgctggagggggcgctgtgggcaccgcgcagcggccttttgtcagcgcgcagggccaggagagctctcatttcctcccagcctcgtgcgggaaatggctttaattctgacggcagggctgtgagggactagcgggaacccgagccttttgtcaaggaactgcggcgtcggtggccagtcatccccgccgccgcggagccgctgcactgctgggggatctcccagcagctctgacgagcgcgggctgcagcatg

SEQ ID NO: 23656 - DNA, 2300 bp, Homo sapien
atttttttttatttttattttttgagacggagtcttgctctgttgcccaggctggagtgcagtggcacagatctaggctcactgcaagctccgccttccgggttcacaccattctcctgcctcagcctcctgagtagctgggactacaggcacccgccaccgcgcccgtctaattttttaatattttttaatagagacagggtttcaccatgttagccaggatggtctcaatctcctgacctcgtgatccgcccgcctcagcctcccaaagtgctgggattacaggcatgagccaccgtgcctggcccacaaaatatttatcaatttatggtgaaaaaacctgacaccaccaccttgaccaggcgattaaggttaacatcaccagtggtggggcagatcaacctcatgtacttcctgatgtgatgcactgagaagagcccagcatcatttatatggagcccctccatgaaggcatggctggggtctggacatgagcaaatagtggacaaccccaggtcgagggacatactacagaatgaaaggcccctactcttttaaactgtcaagggcatgaagacaggacaagatggaggaaatggtccagaatgaaggagagtagaaatatgacaacagaataaaacttgtactcctggattggattccaaccagaagagaaaaagacattgttgagacagctggtggtactttgatggggtccatggattgtatggtagcacagtaccaatgcttacttcctagtttgagtggttgtgttgcggttatgtggaagagaggccttgtttagggggaatacccactggagtatttagaggtgatatgacagcatgtctgcaacttaaaaactttaaaaaaagaatagatcaatggatgcagctagacgtcattattgtaagggaactaacacagaaacagaaaaccaaacattgcctgttctcactttataagtgtgagctaaacattgaatacacagggacacaaagatggaaacaatagacactggggtctgcttgagggggaagtaagaggggggcgtgggttggaaggatacctattgggtactaggctcactacttacgccacgggatcattcgtacaccaaacctcagcaacacacaatttacccacttaacaaacctgcacatatacccctgaacctgaaacaaaagcgtagaaaaaatattttctcagaccaaagaaaaaaaaatgtatttctatgcttggaaggaatgattttacagagggcttccagaaacatgtctgattttcaggtgcaagatcagaatgttccagttatattgataacctccagagaaacaaactctcatgagtaatctactcaaaacagaagatgtagttaattatttctagagtactaaattgtactctactattaaacaagtttgggatcgctattttccagcacattttctgaagtaacaactgtgtttggctgtgttgacaataaaggtctgtgtggaaaagggggaaaatgaataaagcgatgtatccccccactcgcgaaaaaagaaaatagttcaaatagaatggaaaaagaataatgaaaatgagaatattcacagcgagaaagagggcaacggagcaaacgtgaaaacttagcaagtagagagcgtggcgaagggggtacaggagctcttagaaactcttcttgccattttccccgcaacttttatttcaaaacgaattcttaaaaaagttttgtggatatccatcacatttttctgtatacacatagccagaagctcaggccccaagacagattgattaaatgggaatttgggggactggaaccgtggcatgtggattgagaaaaacaccactaccacgctcccggcggttccaggtgtgcagccggggctgcgctccagcgctcccgagtcacacctgtgcggcttattcaacgcgatgcctggacgcagcctccagagaggaggccgggattggaatacgcagccggggaatggttgcaggtggtccagctcccgcccccgccccgcccccgcccgggcctcgtgcggccccgggtgcgcaggtgaaagcccggcctcagcggcctcggccctgccatggaccccgcgcccggcgtcctagatccccgcgccgcgccgcccgcgctcctgggcaccccgcaagccgaggtgctggaggacgtgttgcgggagcagttcgggccgctgccccagctggccgctgtctgccggctcaagcggctgccctcgggcggctactcgtccactgaaaacctccagttggtgctggag

SEQ ID NO: 23657 - DNA, 2300 bp, Homo sapien
tttatttcaaaaagattgtgaccgtttgaagtaatggagacaagaaggaaccaaagaacaggaatctgctggtaaccccagcactggcttttagaggggttccttgaccagccatgggaatattggttctgttcagctggtaacccctgtggcagggacagggacatcacgtttgcacagctccatggcactgtccactgggatgcctcatgccttctcttctaatgctaggcccacccagcagcaggaacccctgaagcagtatctgttcctcctggaagggatagggctcattgaaagccacacattggccccagcctgctccatcagattctttggagttagtcttgagaacctggtcacctcaggaggcatggatccaatcagctaaagttggggcctgcttggtattttctgacaccacttctgacaccaaatgtgtgctttttcctgacaccagccgattctctgacacccgctgggcatccaacaattcaaacagattctaacactaacttccagagttagcacagatctcacagggtaaggcctcagtcccacaagactgccccccttcagatgctagctacaagtgaggtagtgaccccacttctgcctggtcaactacaaatttgggggttctggctaggcaaggtggctcatgcctgtagtcccagcactttgggaggctgaggtgggaggatcacttgaagccaggagttccagaccagcctggggtataaaaagagatcccatctctacaaaaaaataaaaataaaaaattagccaggtatgttggcacacacctgtagtcccagttatgctggggttatgctggatgtgacagaggctgggatgttggggctgagaactgaggatcacttgtgtccaggagttcaaggctgcattgacttatgatcgtaccactgcactccagcctgagtgacagagggagaccctgtctcaaacaaaaaattagggggtttctgcaacaacctctcagttttcataattcactagaacaattcacagaactcagaaaaacactgtacttcctattcttttattgtaaaggacaaaaacagcctgatgaagaggtacacagggcaaggccagtggggtcccaagtgcaggagactctgtctctgtggagtcagggcatgacaccctcctggcatgtggatcaccaatccctaagctccttgaatctcattttttaagagtcgttatagcccagaccccaggccatctcccatacctggaggtctgggagtagggaatgggagtgggtggctgaaagtcccagtcttccaaagtctaatcccatgtttggtctttctgggaccagcctccagcctgaaattatctaagggtccaccctgtgtcacctcattagcataaacccaagtgtagtcctaaggggcttattatgaataacaaaaaacactcctgtcacccaggaaactctaagcgttttaggagttctgtgtcaggaactgagatgaagaccagatatattttttacagagttgtcccttggtatctgcaggggatttgtttcaggactcccatgggtaccaaagtccacagatgctcaagtcccttgtacaaaatcatgtagtatttttatataacctccgcacatcctcctgtatactataattcagttgtgagtccccaagtggctggtcaccccgcttcctcctttgacctgcaaatatcggccgcactgacctggcccctcttttacctgactccttttacttaagaggttctgaggctagaattaaaggtcagccatagtcataaggatgttttctgtgcaaagctgagacccccttcctaggtgccagtcccagcccccagagaagaagaggtgtgtttggggttatgctggatgcggcagaggctgggatgatggggctgagaactgacgggaaggtgctaatgggaagaggaagaaaatagggcagatgggtatctgggagcctctaggggaggggcccactggggcgggtttctgcagagtcaggcagggagggaggaagagctgggagggtggtcaggagcatataagtgtgggtgtctcagctttgcttccactgccattggtccacgggacggcccttccaggagccagtggctgggagcagtgctggaggatcaaggaagcagagatggacggtgaggcagtccgcttctgcacagataaccagtgtgtctccctgcacccccaaggtgagaaaactggggccccagctcttgcccagtgagggagtagcctgcctgtcctttggccc

SEQ ID NO: 23658 - DNA, 2300 bp, Homo sapien
agagtccagaagtggaacattctaatcctgtctaagccctgatggaaccaaggctctgcaaccacacgagccacctgaagagagtaggaatcttcatggacacccagaggcaggcagtgatgtggagccaggccctcatattcgggactatcaaatgttaaaatttagagcagacagcaggcctggaagttacagacaggctgggtagggaagcgatgggacagaacaaatgagacaccatctttgctacccagtttccttcccagagcttcccagtgtggggtcctctctgggttccctcatccagtccgagaagccactccagcctgaggcccggttagctggagagagagcatcaagggcctgtaactacaatgagctgcacataggcatgggctgagcgtgcagccactatcctcccaagtaccaaaggtggcagtagcccctgaaagcataggtagatatttccttggccctgttaacttaacctctaatcctggtccctgatacaggctgtcatccagctccactggctcagcctcagcaggcccaggacagctttcttttcctgcggccagagcttttgttcattcctgggtaaggagtaaatcacacttccccttatgcttttgcattgaagatgaatgagaacttctggagacagtggaaaaaagcagcagcttctagaaggcagatcccaggccccagactgtgtaaatgtctgagtggcatgatcagctatcaagtctccaagtcacttaccattcacacatccatccatgcatcctctatccatccattcatccattcacccatcctccaattatctggaccaatttccttcttttttctttccttccctccctctttcctctcctctttcctatattccaagaaatatttgtctagagtctgccatgtgccaaatttctcagatttggcagacttcttcaaagcatgagaagccgcccaggagaaaatttagtccttcattgagcccaaatcagctcttctgtgccctgagcttcttgcacatatggaactctctatttaggactacaaagaaggagagaggaggtgcggacagagagagaggagagagaaacagaacgattcctagtctgaggttgctgagcgcccctactttttttgaaaatctcacatggtgcaggaagcagggaggagaacccaagtcttaggtttacactttgaatctccaagttgcatattataaagggatattgtatcagccaagatgcattaataacaggaagcaggatattctattgcaatggttgcctatttggtatctctgcttccaggcttctccccaccagtctgctcctcaccaggatcagagtgatgtttctacagtgtccctgtccttgtctctctcctgcctgaagtccttaattggccccatgtcacccacaagccagaggtccagctccttgacatgatcagaaggatcttcatcatcagaccccaggtgcctcttcaaccccgtgtgcatccccttcctgttggaatgtatattttacattccagcaatattgcaactatttacaatttgccaagcactccatgctatcttatgctccatcctttggcatatgcttatctttctactggatttttttttttcccattactccatttcatatgcttctttgaactgggcatatttgtctcttgtgctcatcaccttgcaatttatttgctcatgtctgtctttcctaccagactatgagctgcttggtgcaaggactgcgagttattcatcactgtggccctatgcctggtagagcatcagtacctagaaggcactcagcctgtatttgtggggtgaatggatgggtggatggatgacgagagtcttacaagagaaatgggataggtttgggacaagatggttaatgtatccatgtaacagacccccagagaagacaacaaatggcctcttcctgaaagctcagacttctgaggatgggagtaagccagacaaggtatctagtcaggaatagggaagttgggatgatatggtgacctgctgtgggactgacttcctgtttcctctagataagagcccttggagagacaggcagccagaagcacctgtgctcccaggataagggtgagcactcaggatgactgtggagaaggaggcccctgatgcgcacttcactgtggacaaacagaacatctccctctggccccgagcaagccacatcgctgctgagaacctgctccgtgttctgtgtgcaaacctgccctttgctgctccttcaacacacattttc

SEQ ID NO: 23659 - DNA, 2300 bp, Homo sapien
gtttaccaaatgttgagaccctcaatcccatccccagcccctaagacacctggtcttcctctgcaagcaggagactggaagagccttctctgggaaatctaaccggcccaggagaaagatattcaaggcaatgaaaattgatagatttttctgaagaaattgagaggagttgtagagagttggcagagtctgaggttgaattatttcaaagcatatagaaaactaaccaaatgaaaagaaaaaataattattaattttttaaagtagtataggaaaggaaaatataattgtgattcagctgtgaataatgtttacatattcatagcaatatgattactgaatactgatataccaactgttatttattggtttgccgcatccatttccattactgttatgttcttccctaaatcacagcagatggaaggctagaaactattcttccagacttacaaaaagtttgggatctgattgtgattttagatctgccacagggattttttttttatctgtttggcctatcaataatctagaagtgttttgaaatccctcactaggatagtaaatgtgtacatttctccctataattcgttcgtttttatgttatcattagaaaccatgttaattgctcccagcactttgggaggccgaggcaggcggatcacgaggtcaggagattgagaccatcctggctaacatggtgaaaccctgtctctactaaaaatacaaaaaattagccgggcgtggtggcgggtgcctgtagtcccagctactcaggaggctgaggcaggagaatggcttgaacccaggaggcggagcttgcagtaagccgagattgcgccactgcaccactgcactccagcctgggcgacagagtgagactctgtctcaaaagaaaaaaaaaaaccatgttaattgcatacatgtttagaactgttgccgggtgtggtggctcatgcctgcaatcctagcactttgggaggctgaggtgggagaatcacttcagcccaggagtttgacaccagcctgggcaacagaggagaacccatctctacaaaaaataataaaaaaaacattggtgggtgtggtggtgcacacagtcccagctactcaggaggctgtggtgggaggatcacttgagcccaagagttcaaggctgcagtgagccatctttgtgccattgcactccagcctgagggacagagagagaccctatctcaagaaaaacaaaaacaaaaaaaacctgttttatctgcttagtgaatattttgtcatgagaatgatattaatatggccatgcttgcttttttgtttgtttgtccaatgtatctttttccctttcttcacattcagtttgtccgtatctttacatcttaaatgtgtctgtttaaaaagacatatagctaggttttctgtctcatctttttttagttctttctccaaaagcgttttcagcgtaggtcatcctacagtatatattgagaaaaatgtttagtatgccctcatatctgagtgacaatctgcctggatataaaattataattttcaaaagagtcaccctcacataccccagcagggtctatgttctgccctgatcataccttctataatctgaatgtgtccctccagaattcatttgtgttaacctacgtggacactggggtggtatgaagaggcagggcctttggggacatggttgagtcataagtgctgcaccctcatggatgggactagagcccttagaaaagaagttgaagggagctccctggcccctccaccatgtgatgactcagcaaaaggggccatatttgaagcagagcaaaccctcaccagacagaatctgccagcaccttgatctcagacttcccaacctccaaaactgtgagcaatgaatttctactgtttataaattacccagttcatgggtttgtgtttttgtttgttttgttttgttttttgaaatggagtctctgtctgtctcccaggctggagtgcaatgacatgatctcggctcactacaacctctgcctcccaggttcaaacaatccccctgcctcagcctccctagtagctgggattacagacacgtgccaccacgcccagctaatttttttttttttttttttgtatttttagtagagatggggtttgccatctctgttggccaggctggtctcaaactcctgacctcaagtgatctgcccacctcggcctcccaaagtgctgggattacaggcgtgagccaccacgcttggccccatagttcatggtatttttgttacaacagtctgaatggactt

SEQ ID NO: 23660 - DNA, 2300 bp, Homo sapien
tgaagtgcagagtagaagtggtggttgggtgagagacaagacttttggggagcttggcggatggagagggagagggtctgacctgcatggcagtcattaaggagttcactgccactcccagggcctggccgggaggaacagagtgcagagctcaccgcacatcatgcaacatggattccttcagccgagctcgagctcggttccactggatcacactttccccaggaccctcctgaaacctctttctcactcctccctcctacatacatatacattcctacagccccgtgccccaggcccacaaactctcagcacctacaggtagtccacgctgctctccctctgaaccgtaacttaagccttgggctcaatcccacctttcctgcccccccgcccaaatcactttgtggctgcatttcccttccttccttccttcctttttttctttccttccttccttccttccctccttctttccttcctttcttcccctcttctttcctcccttcccttctttccgttagtattaccagcaagacctcccgacctgccctttttaccctccccttttcctaggttccataccctaagtggagtagttgttaatcactcaattaaataattggtgtgtgtcccccccaacctcaccttctgccgggaacatctggcatcggaaacacacaaccattcacatgcacattggacacacactatgccactgaaacacgcacacactcatacacctgctttcccactcacagggataatggaggctgcaccagggacacactcagccatgctacagccactttcacgggcatatccacgccagctctcacagacacccttaaccagattattggacagaccaaagcaccctgctcacgccagcaggtcagaaaaacgaaggaaagtctgagattgtagtgctttaggggaagggtcacaggccttgttgctcgtgcacacatttgcacacacaccttcgttctcaatctttcgtccaggcccccttctgagtcaaagaaggccccttctggtgcgttgagagagacactaggctcgggagagcgctggcctctccagtaaatggtggggatccgcacgcctcaaagggctgcgccccgggaccccagctgctccgctcctcacagcctgaccctgcttcacttccagccgtgctcacctccgccctttacctctcctcagcctcggagaaggcgggacccgggacagcgacagagcacggagaaagctccgcgggggaaacaaggaaatccccaccttctatccctgtctcgtggtgcggtcccctgtgacggcctcagacctgcggggaacccaggactttgccgcctaccacggtctcagccttattctcgagcctctgggcgcctgcaaccggctgtctgtctgtgtgcctgttcactctcccccggggatgcgggtgagtcggtcttcttgcctcactttgctagccttattcgcccactcttgccttgctcttccaggagggccgggggagggggtcctccggtctgggttcatgagtgtgggtgtgggtataaatctaggggttggcgcactgagcctaggcctgcgcccccgcctccagcacccccaccgaccccaccccgccaagcgcccgagcaaggccaacctcctgttctctgctaggtctctccgaggtcgccttctttgcgcactttggttattgatcctgctgaaccggccggagcgcagcggctgcgcttctctgggaaagaacggagtggggaggtgagtaggctaggggaacggtggaggggaggagaggttgatcaactttaggagggggtgtagggcgttcctcagggccgccccagtctccctctgccgggcttggagcagggctagactaggggtggagcgggaccaccgctcccctccccctctccccctggcgcggagccccggcgcagctgggagtcttggaaacctgactcccgcccaatcagcagggaggggaggagcagcggccaggagcggggcctgaggaggaggagtcgagcgggggcgcgaggggcggggagcggcgctcccggccagcgtaggctggctccgccgtagaggggttggcagtggcggtcagcatgggcgatgggggcgccgagcgcgaccggggccccgcgcgccgggcggagtctggtggcggcggtgggcgctgcggagaccgcagcggagcgggggacttgcgagctgatggcggtggccacagcccaacggaggtggccgggacctcagcctccagtcccgcaggc

SEQ ID NO: 23661 - DNA, 2300 bp, Homo sapien
caagcaagagtccagatgtttagagacggcctacccatcacaaactgcaacatgaaaccctttaaaatatctatacacagcctggccaacatggggaaactccatctctactcaaaatacaaaaattagctgggcatggtggcgggcgcctgtaatctcagccactcaggaggctgaagcaggagaatcgcttgaacccaggaggtggaggctgcagtgagccaagatcatgcctctgcatttcagcctgacaacagagggagactctgactcaaaaaaaaaaaaaaatatatatatatatatacacacacacacacacacacacacacatacatattatatatatttcatattgctcaaacaatataaatttttttaaagttaaataagagtcttgctcaagactcttttatttaactttttattttgcagtaattatagatttacaggaagctgcagagataggacagagaagttccttccattggcaggaactcaatagtatgagacagataggcttcatcttccctaactatagtacaatatcaaaactaggaaattggcattggtaccgtgtgtgtgcatagtgccatgtcattttatagattcatggactcactgctgcaatccagatgcagacctgttccatcaccacagagatcttcctcatgctgctccttgatggtcacacccacccccgccctccacaggagagttctttgaaaggatgggcattaggaaccagagacctgaaatgggtcctcaggagggaggatgcggggtaagattttgactctgtgaagagaaataacaagcacagtctcctccagtctgctctgagaaacatagtagctgctgctttggtttcaaattggctgtcctgagtcacctggagtgggtgcttggggacagtgatccctaggcaaatgtacttctgccgttccctctgctcagtggtatggtttggggaggagcttagaaatgcagaaatcctgagcctagaatgaggcatgggggtgactagaagaccttgggttgggcaggtccagctaccacccagggtccaccctgccttgcccagaggaactgtaccacactccactcaccaggagaaaccacaactcttagtttcatgacatgaagagagagttcttgggaagcagtggtgaggtcttgggtggaacccaggccaggctgtgcacatagtttgatttataactccaggtatttagttatacaatacagggacctccattttactttctgacctgggctggaaaggtcagggcaggcctgctgtatagaaatctggaggtgaatgtgagaagatgagacacggttctatgatcagatggagagagaccagccctcattctcaagaactctcaatagtatgagacagacaggcttcaggagacccaggtctgtgggttgagacacaggctcagcttttgggggctcacagcccagtggcagggacaagagaggcctctcctaaagggcatgacttaggaaagaggctagatgtgtagtaaatcttggctgctagagaatccagagaaggcttcatgtaggagatggcactgaggctgaccaggaaataattctctacagatgttcaaaaagatgacgatggaattgtcagggggcagaagtatccaggtatagtcagggcaaggagtgcagggtaaggtcaggttgcgagaacagtgaagaaagggcagcctgccagaagttgggtgtggagagaccagaaagagctgtggtgagggacgagtgtgggaatgttgacagcacctgatggtccaggggaggaattgaattcatacagtttggggttggcggggaggaaccgcctagcacagaagaaggaaaaagccagccctcccctcttcccttctccctccacatcctccagctctcaggtgacgggggcccctcccagacctgcacagcttggtgtggggaaagcttgggagccagagccccaggcttccttgtttactgtcaacctagaggaggaggagagggaggggagggggagaggggaggggtggctgcaggggaaggctgagcagctctctccagctccagctggacctgaagtctcagagctgccaccagcagcaggctcagacactgggctcccagctggggactgctccatggccatggagatagacagcaggcctggggggctccccggcagtagctgcaacctaggtgcagcccgagaacacatgcaggcggtcacccgaaactacatcacccacccccgtgtcagtgagtagcccctccac

SEQ ID NO: 23662 - DNA, 2300 bp, Homo sapien
ttaagtgtacttggagtggtgtgtgtggcagtgcagagtgtcagcgctctcagcctgaggaaataggtgccccgtgtgcgtcacatcaatgggtgcatgtcgtatgtgtgttctgaggagggtgcctgtgtgcataagcaggtaggagcatgtgcctagggggtgctcccaccttcacttggggtaaggaaatgtgtgactgcatgcttatgcactcagggcaaaggtgtgtgtgtgtgcacttaggtgtgatgtacgtgtgtgcatgtgcactcatggagagaacacttgtgtatgtgttctggcagtgtcacatatctgagtatggtgagtgtgtgtacagctgggataagaatgcgtatccaggtgtggggcatggaagtgtctacaggtgctgggatgtacccttgtcaatttcagaggggaggccctacttgtggctcctgtgcctgtcctgcaagggtggcccagatgtctggggcaaggtccagaggaccaaagggaacccctgcatctccttgtccaaggtcactctccctggcctggtgaattctcaggccgccctgctcactggagtaaaccagcatggcccgccacagctatgcaaagccagaggctcactggagtaaaccagcatggcccgccacagctatgcagagccagaggctcactggagtaaaccagcatggcccgccacagctatgcagagccagaggctcctaacagggagtgtggtgtgaggggaagtgagcctgatgcagccaccccacctccctctgttcctctgttgctatccaggccaggagaggaggtggagtgaactcagagggtagctgaggggtgaaatcagagtaaaggggcccgggggcgcatgggaggagagccctggggtgtggggcacctcctgaggcctgaggcaggtgctgagggtggagcacattccagctaagaagaaatggtgagaatggggtgggtcagatttctcaagcaaggcctgtaggccctgccccatggagctcgggggaggataggaggtccggatactccctaggccaaagctagggtcaccaaggcccagaaatatgcagtgactgggcccccttgggtccagagcccaggcctggagccctgagctggcatgtgtgactcttgccagtctgttgtgatgagccccactccctgcaggccgtccctcctccctgcaggcacccgggagttgctgggtgctgagtgtggtgtgtgatctgcaccttcatgctctgctttccttcttcctggaaagtgcccccacctcctgatacccagggaccctataggtaccatctaaccccacactcctctgggcaggttggcccaagcctggagccacctccagccagctctttcccacccagccccttatgtatagtcaacatgccctggaggttctgacccaggctggaacccagggatggctgtgcccgccccccatgtttgcatgcttccctcgatgctggctctatatggcctccacccaggagaatgtgttcacaccaaacaacccaacagtggacccagagcaaaggtcagtgcaggggagcccctctaggctctgctccctgccagcgcctttacttttgctgcctatcaagtatcctcacaggatgcaccgggccagcctcagcccagcccagatgccctcccacccccaggggaaggctgggattccttggtgtgtcccttcatccacagtgtctcccaatcccctccccgcctcactcacttcctcctcaggctctgggagtgggagggatgaggggggtggttctccctggggcctgtggacaggcgcagggctggcaagggtttggaaatttagggctgcaccctcagtacgccagaggcagggccactctgtccctctccacctgtctcctccccagcctggcctcctaccctgggtctgtaagcactcccagacaggagaactctgggagaaaagctgggggtgcctaagggcagggaggccccagtgctcgctgggccacggtggaggtgagtccaggtgacttaggcattcccctcccccgggggaggtgggctaaagaggcctgagactttaaggctgatttcactgcagtggctgagagaggattggctagaaaggaggagacactagaaagagtggaggcagcctggggagctgaccctgccaacatctaccttgggaaagaagggtcccctgtgcctcccgtggagctagaatggttccccaagggccttggctcccggctggggaggaggtatcctggagcttcatc

SEQ ID NO: 23663 - DNA, 2300 bp, Homo sapien
agacaacactgattcaagcaacagttattgcttagctactctatattctaaaaagtcaaaaggcaaactgaggaaaatattgacaacaaatataacatacataaagggtcactatgctaataagttttacagatcagtaagaaacacattaaggccctcaaagaaccatgtgagtaaaagaattcctagaagacaaaaccactgataattaaatgtttaacccttgttggtaatcaaagagccacattagaacatcatttccactaccaaattagtgaacatttacttaaaatcctaatatctgatgctagcaatggtttgaatagttcttctttgagtaatagcagattcacaggtagtgcttctctgctagcactgttctcattgtttgcattccttcattccttgtaaagtaggtgctattatccccattttgctgctgtagcaacttgtagggaccagccccacagggtgggtgggtttttctccccgtgtgcggagatgagagattgtagaaataaagacacaagacaaagagataaaagaaaagacagctgggcccgggggaccactaccaccaagagggcagagatcggtagtggccccgaatgcctggctgtgctgttatttattggatacaaggcaaaaggggcagggtaaggagtgtgagtcatctccaatgattgataaggtcacgtgagtcacgtgtccaccggacagggggcccttccctgcttggcagccgaggtgggtgggggtgggggcggggacagggggagggagagagagagagagagagaggacagcttacgccattatttctgtgtatcagagacttttagtactttcactaattttgctactgctatctagaaggcagagccagatgtacaggatggaacatgaaagtgaaacaggagtgtgaccgctgaagtacagcgtcacagggagatgtttaggcctccagataactgtgggcgggcctgactgatgtcaagccctccacaaaaggtggtggagtaaagtcttctctaaactccccctgggaaagggagactccctttcccggtctgctaagtagcgggtgcttttcctttgcattgatgctaccgctagaccacggtccgccagaccagggtccgccagaccacggtccacttggtaaccggcgtcttcccagacgctggcattaccgctagatcaaggagccctctggtggccctgtccggacataacagaaggctcgcactcttgtcttctggtcacttctcactatgtccctttggttcctatctctctatggcctggtttttcctaggttatgattatagagcgaggattattacaatattggaataaagagtaattgctacaaactaatgattaacgatattcatatataatcacgtctatgatctagatctagatctagtataactcttgttgttttgtatattttattatactggaacagcttgtgccctcggtctcttgccttggcacctgggtggcttgccgcccacagaaactaagtcagataacttgccaaaagccacactgctgatgtgcagcgcacccgcttcactgcaggtggaagtggaagtgaataataaccttcctggaaggcagtctgcaagcccatattgacagctgaaaaatattcattccctttcacctagtgattcgactcccaggaatccattctaagaaaacaaccagagttgagccatttcgttcttggcagcacatgtgaaacaatggcacatccattatgacgctgggctctggttgcgtcataatgtacgtttagtatgtggagtgacaatgggcgctagctcgtaatataatgctattaataaacgaaaagagatacaaaaaatagtcatgatatgcatatatattgcaataaaccatgatttctgtgcgtggtgggatggtaatttttaatttccacattgaatatttctgttttctacttattagtttgataatcggaaacaaaagccaagtgtctttgttgtttgtgtgtttgatgctgagtttcccgggcagcaggactgggaggttgagtgggggttttggctcagaccgggagcagagcggcgggtggggagcggcaggcgggcagggtccccggaggcccccgggctctgcccctccagctagagaggcagccgaaccctagcggcctggaaggggccgggaaaccgcggccagctggcaaggagtggcccccgggggcggggcgccggcgggtgtgtgagtagcccgcccggcccgggtccgagttccagccccgc

SEQ ID NO: 23664 - DNA, 2300 bp, Homo sapien
ggacagagttggggaggcagctgatgtggttgggtgtgcccatctccatcctgggcactaaaggggatacagaaaaaggaagccagctgttgaagtcctccaggaagccaggctagttgggaagatgcggttcttactgctgaggactctagagcccaccttggctctagtgaatagaatttgttggggctggggactcagacagggagggctttcccagagaggtaagtttgaaggagagtttgggaaagaagaggttgtggattggctgaggcagggcccccaactgagcagttccagcctcaaaaaaaccacttggccagaaaaagcccaaagcccttccggtaggcaggcagctgtccgtccagtcctctgacccaaagtcattgttaggactggagcctcatggggctgtgagcaccttgcagactctggcctggtgtgaatgcctcctgggggctgcagcttctcatctcattctcactggctgccgctgcctcgggcttgagcctggatgtggaggacccagtcttcttggcgttgccctgccaccactttctgaccctggggaatcattggccctctctgggccttagcttctccatctattcagagaggatgtttctgaaagaactattgggagactcagtgggcatatagtaggtgcatataggtatttacagatattcctggaaaaggcttcggaaagtattttggttgccaagattgccattgctcctgttcatcattgctggctaccctagctttcagtcagggtatcagatggagttaggggttttttagagtgacttttctatttctatgagagagcctggagggtgaatattatccacacaaagggcatattgttaaagccaaaactggtttcttccttgggtgtgatttcaccaaagaatttgttcagcagaggtttgttagggagcccttccatggagaccaggcccctctgtccagggaagaagtcctgcccccagcccctcagcagcaggctcccctgacttcactcccttgatctgccctttaatgcctaaaagagtttttccaaaagatcttgtgggcaccaggcactatcctacctcccattatctcttagccctagagtgtggctaggcatagcagaactgtagtctttgccttagaatgggagaggcaggagagaagaaaggagacatgagaattgctgtgaggtgtgtgtgaggggacagtcagtttcaggggacatgttctttctggtgcctgcccttcacctcaccatgggaaccggcagggatgactgtctcttgagcagcctgtgtccaggatatgcacacgtgccctcttttataaactcagttacacaccaaggaggggtggctgtgtgtgtgtgtgtgtccagaacgtatcagttcacaccggtatgccttacctgggggcaggatgaggagggaccccctcccccagaatgttgaggaacctgaagactgcacctcaaagcatctagcaagtcttgcccttttattcctgaggagtgagagcctttttatttgagcaggccttctccttgctgcccagtttgtttatttgagcaggccttctccttgctgcgagtttggagtagagcctcttaggggcgtctggtctgcacacccatgatttctccccacctgtcactgtgggagagctttctttagccctcacatccacgaaaaacgaggttcatcgtcatgatgctttggattatgtaacatagaagtctcacttttataacatgcaaagagccttcttctaattttactcagaatgccctgtgcagtgggcaggttgaggctcattctcccattttagcagatgggaaacggttctaggcagtagcctactctgagttgagtgtaaagtcaggcctaagactccatggaggctcccaacttctgagggccttttgaagttaaaagtacagctttctgttattccccttaaactgactgactcttcattccctcaacaggactagtggtggtgaatcattacctagcatttcagttttttgcagaagaatattatcccttctcagaggtaagaagtgtccagcacattcagctgttaacagggacagggtagtaaaagggaacttgcatggtttactttataaacttagctatgatttgaaactgaatctgttcaaggattacatgtttgaaaaaaacaaaacatagatggtttgagaaagctgtgtggatggggacagactgtgctcatttggccgaggtggggaggacactgctcttcctcagtgagtcctt

SEQ ID NO: 23665 - DNA, 2300 bp, Homo sapien
catcaaatgcagactttcgttgatttttatgagatttgtccttagttgccctaagaaagttttacttctccagacttggaagggcaacacatgggatgtttggtttgttcttgaccttctggggtccatgaagggtggatggggactgggctgcagagagaggggtgaccaggatggtgggagtgaccctggctgatagtctccctgcctcccaccctgcagcggctggactctattacctggcagaactgatagaagaatacacagtggccaccagcaggatcataaaatacatgatctgggtaagtggcatctttctccaggagtcctcctcactcttttgccctgcctcaaaagcaggaagtggggagagtttggcatggatgatgaggcctgtgtctctgctgtttcctgagcatacactcttacctccttgccctgaacgctgtcttttgggtctgcactcctgggcccagatcttccctggccgccttccccaagtggcattgtttcactgcaggccttgtgctctagtccttaaggtgacagcgaagtgtacttctctgttgacaagaccgtagatttgactttgcttagctctctcccgctgtctttagccctttgctctgctcacagcatttaaaacttagaggagccataagacagttttgcatatatgttcattgccatctttctaatcggatcaagtgatttgtcctaagatcggcacagcttcgctgccctcgcccttccctggtctcatgggaggcttctcttactgaagacacagtccttgccactgatatcaaagccataggggtgactgctggtggacagacttccttcagctgcaggaaaggctgggggtaggggtgccattggagagaaagcgtccacagcccctcaagtcgcctggtgtcagcagccatgtgcactctgggcatggctgaggttgggagttcacagtggaggcaagactatagccctcagctctggtccagaggcccagcttgtgggtgttggcacagtaattagcccttcattcagccaactgtcatttgctaagcactgacaactgtaggtacttatcagtagtgtttttcaaactgtaggcatgattcattatttggctgtatagtaggtcacaatcagcattttttaaaaaaaggaacataaatagaattgaaatttgagctttgaatcatatatatgtatatatgtgttggggtcacagtgtaaaatgtttttctttttctttttttttttttgagatggagtttcgctcttattacccaggctggagtgcagtggcacaatctcagctcaccgcaacctctgcctcctgggttcaagcgattctcctgcctcagcctcccgagtagctgggattataggcatgtgccaccatgcctggctaattttgtatttttagtagagatggggtttctccatgttggtcaggctggtcacaaactcccaacctcaggtgatctgcctgccttggcctcccaaagtgttgggattccaggcgtgagccacctcgcctggcagatgtttttcttactgtgggttgctgtcaaaaagtttgagaaatgggctgggtgcggtggctcacacctgtaatcccagcactttgggaggccatcagaagtttgagaccagcctggccaacatggcaaaaccctgtctctactaaagacacaaaaattagctgggcgtggttgtgcatgcctgtagtcccaactactcaggaggctgaggcaagagaattgcttgaatccaggagatcgcgccactgcactccagcctggatgacagagtgagactccgtctcaaaaaaaaaaaaaaaaatgttgccttttgggagcagagaacctagctggggaggccagacctgtgaaatgaggagattgaagcatgaacctagtgctgcccagagcgggctgggggttggtgagtccaggaacgttgcctggaagaagcgccctgcactgtctgcctctggttgtttcagttctccaccgctgtactgattggcctctacgtctttgagcgcttccccaccagcatgattggagtgggcctattcaccaacctcgtctactttggcctcctccagaccttccccttcatcatgctgacctcgcctaacttcatcctgtcgtgtggtgagaggggacagagttggggaggcagctgatgtggttgggtgtgcccatctccatcctgggcactaaaggggatacagaaaaaggaagccagctgttgaagtcctccaggaagccaggctagttgggaag

SEQ ID NO: 23666 - DNA, 2300 bp, Homo sapien
tgaatattggtatacaaatgtctctgctttctcagttcttttgggtatatacccagaagtagaattgctaaatcatacggtaattgttttttttaggaatacgtatttttatgcaggaaaaatatgattctgaaataagcctactagactcttgttctacatactttattttgcatgcctgtctccgccactagatgggagacttgttgacaaggactaaccggttccaggtgcccctcaggaaccctcccagaggtgtagtaaatgcatccagcgcctagcggacgccctgcgtgcccggcaaggggtgaggtgcaggcgatacaaaggtgcagaatgtaccccaaaagaacagcctagaggggaattaggccggaggatgaccgattaaaatcaccccaactcctgattgtgccgcttcctaggtgcatgacccagggcaacttcctttggccccggcttccccgtctataaaatgatttacattatctgctcaaatttccgacaagaacacacctcgcctttatcacagagcgtggcacatattaggaattcaataattttgtccctatcacctgcgatagcaagagacagacttgtccgcaacctgccgggaggcaggttctggggaggttgctggggcgcggtcgggcggccctgtccggccctggaccacctccaggctggtacgggagtgcacagggagggactggaggctgcactccgagccccagtatgggcgcttggtcgtctccgcccctgggcaccgtcccgcctccctctggctgcagcggtctgcattcattcccctcagtggagcgggggatcctggcggggcagcggcggttggccctcctctccggcgggcggcgctagcgcgagcctggccccgggcagcgctagggccgggctcctctcggcggcggcgcaccgtcgtcctgtcgtccgcggggcggggacgcggcggcggcggcggcggtggcggctgtgtgtcgccggagccgaagcgcgcaggcccgtcccggtggccggggagcgggcgggtgggggcgccatgtggttcatgtacctgctgagctggctgtcgctcttcatccaggtggccttcatcacgctggctgtcggtgagactgcacgaccccggcccgcgcgggctcccgccccggcatcggtgctcgttgggggtcgcatcgcgggggtttcggagccactcgggggaccactgcccggcgctcccggccttcgccgccccaaccccttcccgcctgatcctgcccctcctgtcgagcctggcagcccggcctgaccgtggctccttccaggtgtcacagagtccgctccggcactgcccgagaaagggtgactcgagtgccgcccccgcgtctgcggaccgctaaccgctgcggctcccactcttcgcgggcctgccgcgcggaacttttccccaacgcctaccgccgcctttgcgcctctggcccttcatgctccctgctctctccacctttgacacttctcctctggctggttcccattcggcctcagttgagatgtcatcttttccgggaagtccacaggggttgatggtccagcagtgccctgtcctttccctaaagtagcatttctcacactaaactcgtctgtctctccctactgttccccttccctttcccaagctgggtcagggaaggacccttgtctgtctttttcagctgtattctcagcccagggacctggctcatgccaagtgcccagcaggtgtttattgaatacgtgaaattccgttttctgagccagaggttatcattgtactgtggcatcaaatgcagactttcgttgatttttatgagatttgtccttagttgccctaagaaagttttacttctccagacttggaagggcaacacatgggatgtttggtttgttcttgaccttctggggtccatgaagggtggatggggactgggctgcagagagaggggtgaccaggatggtgggagtgaccctggctgatagtctccctgcctcccaccctgcagcggctggactctattacctggcagaactgatagaagaatacacagtggccaccagcaggatcataaaatacatgatctgggtaagtggcatctttctccaggagtcctcctcactcttttgccctgcctcaaaagcaggaagtggggagagtttggcatggatgatgaggcctgtgtctctgctgtttcctgagcatacactcttacctccttgccctgaacgctgtcttttgggtctgcactcctgggcccagatcttccctg

SEQ ID NO: 23667 - DNA, 2300 bp, Homo sapien
ccgccaccatgcccggctaatttttttttttgtattttttagtggagacagagtttcaccgtgttagccaggatggtctcaatctcctgacctcgtgatcctcccgcctcggcctcccaaagtgctgggattacaggcgtgagccaccgcgcccggcaactgcaattttttttttttttgagacaagttttcattctgtcatcccagctggaatgcagtggcccaatcatagctcactgcagccgccatctcctggactcaagtaatcctcctgcctcagcccagagtaactgcgactacaggtacgcaccaccatgcctggccattttaaaatttttctttgcccaggctggtcttgaactcctggcctcaagtgatcctcctacctcagcctcccaaagtactgggattacaggcatgagccactgtgcccagcctgctttgtaatctttttttttttttttttcttgagacggagtctcgctctgtcgcccaggctggagtgcagtggcgcaatctcggctcactgcaacttctgcctcccgggttcacgctcttctcctgcctcagtttcttgagtagctgggactacaggcgcccgccaccaagcccggctaattttttgtatttttagtagagactgggtttcaccgtgttagccaggatgggctttgtaatcttatgtattttgttggggggagggggaagctatgcataacataaaattgaccgttttaaccattttacaattctgtaacactgtatacaattcagtgacattaagcacattcacactgttgtgatgccatcagcaccatccatcttcccaaactgaaaccctgtatccattaaaaagtaactccccattctttgtcccccagaccctggcaagcaccatttaactttctgcccatgattttgactactctgggtacctcatatgaggggaatcatacaatgtgtgtccttccctatttggcttatttcacttagcatcatgccttcaaggttcattgatgttgtagcatgtgtcagaatttcacttcattttaaggctagataatattccattgtatgtttatagcactttatgtctatcttttcgtcaaccgatggacatttgggttgcttccctcttctgaccattgtgaataatgctatgaatattggtatacaaatgtctctgctttctcagttcttttgggtatatacccagaagtagaattgctaaatcatacggtaattgttttttttaggaatacgtatttttatgcaggaaaaatatgattctgaaataagcctactagactcttgttctacatactttattttgcatgcctgtctccgccactagatgggagacttgttgacaaggactaaccggttccaggtgcccctcaggaaccctcccagaggtgtagtaaatgcatccagcgcctagcggacgccctgcgtgcccggcaaggggtgaggtgcaggcgatacaaaggtgcagaatgtaccccaaaagaacagcctagaggggaattaggccggaggatgaccgattaaaatcaccccaactcctgattgtgccgcttcctaggtgcatgacccagggcaacttcctttggccccggcttccccgtctataaaatgatttacattatctgctcaaatttccgacaagaacacacctcgcctttatcacagagcgtggcacatattaggaattcaataattttgtccctatcacctgcgatagcaagagacagacttgtccgcaacctgccgggaggcaggttctggggaggttgctggggcgcggtcgggcggccctgtccggccctggaccacctccaggctggtacgggagtgcacagggagggactggaggctgcactccgagccccagtatgggcgcttggtcgtctccgcccctgggcaccgtcccgcctccctctggctgcagcggtctgcattcattcccctcagtggagcgggggatcctggcggggcagcggcggttggccctcctctccggcgggcggcgctagcgcgagcctggccccgggcagcgctagggccgggctcctctcggcggcggcgcaccgtcgtcctgtcgtccgcggggcggggacgcggcggcggcggcggcggtggcggctgtgtgtcgccggagccgaagcgcgcaggcccgtcccggtggccggggagcgggcgggtgggggcgccatgtggttcatgtacctgctgagctggctgtcgctcttcatccaggtggccttcatcacgctggctgtcggtgagactgcacgacc

SEQ ID NO: 23668 - DNA, 2300 bp, Homo sapien
gacccggtccccagagaagctcttcaaggtatccaggtccgtctcgagcacctaagaacttttggaattattgttccttgtcagtctccatggaacactcccctcctgcctgttcccaagccacggaccaaggactaccggccggtacaggatttgcgcttgcttaatcaagctacactgactttacatccaacagtacctaacccatccacattgttggggttgctgccagctgaggacagctggttcacctgcttggacctgaaagatgctttctttcctatcagattagcccctgagaggcagaagctatttgcctttcagtgggaagatccggagtcaggtgtcagtacactgagtagtgtacacttggaccgggcttccccaagggttcaagaactcccccaccatcttcggggaggcgttggctcaagacctccagaagtttcccaccagagacctaggctgcatgttgctccagtaggttgatgaccttctgctgggacaccccacggcagtcgggtgcaccaagggaacagatgccctacaccggcacctggaggactgtgggtataaggtgtccaagaagaaagctcagatctgccgacagcaggtaccttacttgggatttactatccgacaggggtcggaacggaggccgggataagaaagaaagcaggtcatttgcaatctacccgagcctaaaggcagaaggcaggtgagagaattcttaggagctgtggggttttgcagactgtggatcccaaactttgcagtattagccaagcctttgtaggaggtcacaaagggggcagggaccgggaacctttggaatggggatcccaacaacagcaagtctttcatgagttaaaggaacaacttctggcagccccagccctggggctacccgatctgacaaagccttttccattgtatgcttgagagagagaaaagatggcagctggacttttaacccaaagtgtggggccctggctgaggctggtggcctacctctctaaacaagtagacggggtttctaaaggatggcccccctgtttgagggccttggcagcaactgccctgctagtccaagaagcaaataagctgactcttaggcaaaacctgaacataaaggccccccatgctgtggtgacttcaatgaatactaaaggacatcattgactaatgaatgccagactcaccaagtgccaaactttgctctgtgaaaatccctgtataaccattgaagtttgtaacactctacaccctgccaccttgctcctggtatcagagagccctgtcgagcctgattgtgtagaagtgttggactcagttgactctagcagacctgacctccgggaccagccttgggcatcagtagactgggaactatacgtggatgggaacagcttcttcaacccccaaggagagagaggtgcagggtgtgcagtggtaaccctggacactgttgttgaagccagatcgttgccccaggccactgcagcccagaaagctgaactcattgctttcattggggccttagaactcagtgaaggtgagactgtcaacatttacactgattctcggtatgtctttttaatccttcaagtgcatggagcgtgatagaaagaaaagggcctattgaactctgggggaaaagacagaaaatatcaacgagaaatcttgcaattatgagaagcagtatggaaaccccacaaggtggcagttatgcattgcagaggacaccagcgagcttccaccttgctgggtttggggaattcccacgctgactcagaggctcgaaaagcagcatctgccctcttccgggcatcagtgctccctcaaacacctgatcttggacctacctacttcttctaaagaagaaaaggactgtctccaggtagagggaaggacaagtgatggaggaaggatggattcggttaccagatgggagagtagctgtgccacagttgctaggagctgcagttgtactggctgtgcaagaaaccacccatgtaggtcaggagtcactggaaaagttgttaggccggtatttctacacctcgcatttgtcagcccttgccaaaacggtgaggcagcggtgtgttacctgccgacagcataatgtgaggcaaggtccagccgttccgcccagcatacaagcttatggagcagccccctttggagatctccaggtagacttcagagagatgccaaagtgtggaggtaacaagtattcactagttcttgggtgtacctactctgggtgggtggaggcctatccaacacgaactgagaaa

SEQ ID NO: 23669 - DNA, 2300 bp, Homo sapien
gggcatagtggtgggcgcctgtcatctcagctactcggcaggctgaggcaagagaatagcttgaacctgggatgcggaggttgcagtgagccgagatcactccactgcactccagcctaggcaacagaacgagactccgtctcaaaaacaaaaacaaaaataaaaacacaaacacaaacaaaaaagaacccacaacattttgagggttgggagaccatcaagtatagtgcccgggacttagagtctggccattgattttcagtaccaccctttctacttatctgtatggcaaggggtgagacgtccatcctctgagactcagcactctcatctgagttgatttctagttgatccaatggaagtgagcgatgattaaaccaatcgtgggtgcctgctgcgtgatctctatgtgatggatgcgtaaagtaaaggcaaagtgaattttagatacattcgttagtattttaagcttaaactccatacggttcaacggaaatgtcccctgacctgaagttctggtttccctgcattccggacaggacattttattttgtccttatctcagtaagtactgagtattgtgagaggaacaagtgagtctcttttgtttctgattccccagagcctatatcttgcttggcatcaaggagatagcaaagtaaacatctatgtgaattgttgaattgacacttccttggttcacaaaaattggctgtcatcggtgtgacgtcagtgtgacagagcgtgtgtttttggttttttgttttttgagaaggagttttgctcttgttgcccaggctggagtgcggtggtgtgatctcggctcactgtagcctctgcctcccaggttcaagccattctcctgcctcagcctcccgagtagctgggactacaggcgcgcgccgccatactgggtgaagtttttgtattttcagtagaggcggagtttcaccatgttggccgggatggtcttgatctcctgacctcgtgatccacccttcttggcctcccaaaatgctgggatcacaggcgtgagccaccgcgtccggccaaacgttctgatgaaaactctaagtccaccgaagctaaggacaggagttacagcttacatgaattttaaaacaagacccaccgatttgagtaagaaattactctcttgaaggagaaaagtcagaaaacatattgatgacatcactaggacctaactggcctgtggaactattttctgcttatgaactatcaactttaatttcatttccagatggcatggtctcagcagttatacagtgtttacagatgttctaaatcaagggaatttctatcaatctcttcgaataaaataaaatatttgagttcttaatttcctttcactaggataacctttttcttacagtgaagagaatggttttattacatagtttccttcggtaaagataggctgtcttttctagcaattatgaatttgttatatatgatgatctggttcttggaacattcttgaatctagtgtctctgaggcaggtgtgtacagcaagaagtgaataacacagaaatcaatgatgaaagcattagaagacaattgagtttgtcagaactgcaaagtattgctgaatgtggcttgctctgaaatctgaaaacattacttgcgaattgtttctatccaaaatgcagacatgattctgggtgttggtttacttgtttccgatttctcaatcctcttttctaggcaaaaggtgtccaatctctacagacccacagaatctaacagatgtctctatattcctcctccgagaacctcagaggatccagaatggcagctggtccttgctgggttgttcctgtccatgtgcctggtaacggtgctggggaacctgctcatcatcctggccgtcagccctgactcccacctccacacccccatgtacttcttcctctccaacctgtccttgcctgacatcggtttcacctccaccacggtagccaagatgattgtggacatccaatctcacagcagagtcatctcctatgcaggctgcctgactcagatgtctccctttgccatttttggaggcatggaagagagacacgctcctgagtgtgatggcctctgaccgctttgtagccatctgtcaccctctatatcattcagccatcatgaacccgtgtttctgtggctttctagttttgttgtcttttttttttttctgtcttttagatgcccagctgcacaacttgattgccttacaaatgacctgcttcaaggatgtggaaattcctaatttcttctgtgacccttctca

SEQ ID NO: 23670 - DNA, 2300 bp, Homo sapien
acaaacaaacaaacaaacaaaaagaattataatgtacaacataaacgtattttatttattctttttttttttttttttttgagacggagtttcactcttgtcacccaagctggagtgcaatggcacaatcttggctcaccacaacctccacctcctgggttcaagtgattctcctgcctcagcctcccaagtagctgggattacaggcgcctgtcaccacgcccaactaacttttgtatttttagtagagacagggtctcgccctgttggccaggctggtcttgaactcctgatcttgggtgatccaccccctcggcctcccaaagtgctgggattacaggaatgagccaccacgcccggctactttcttctttaaatcaattatatggccattatttatttcataaataggcattcagtgactttgaaatattatggtccagatagagacaacagggttgtacaacagaaatatgtaggtcaaaattttaaatattctagtagtgacactaaaaaatataatagattggcaaaatttagtaatctataatcttgatctactacatccagaatgttatttcaacatgtgattcatataatagtgactaatgaggtatcttacactctttttttgtagtaagtctttgaaatcctgtgtgtattctacattgacgggacatctcattttggactaaccacatttcaagtgctcagtattcacatatggatactgtgcaggacagcacacactaattggtaatgtaaatacaagttagttaagatctgtgaagtactttatggtttccaaaactcttttggcatttaaatcttgcgtcagccccagcaggtagatgtttatcatttccattttgtagaggagaggctgcagcaattacctgtaagtcacccaagctcatccagctagtaaatggtgaactcaattcttgtcttaaacctgggcactttcccttttgcttgcttgcctaaacaagcaatacaaagacaaacttaatatttatacacatacgtcccatggctcattgcagtagtacaggacagaaacaattatttcaaaatccacctacaatctagtctccaaaaatcctgcccagtttaattgcaccacaatctactaactgtaattctaaaaatgtgtatgttggataatcttccagctctaaagtgctgtgaattaaaaaaatgccataggcaggcataaaaaaatcctaccctctattatattctccatctgatatagaatatatgatatatattctataaatgaatacatgatacagagtctatcatgtagtgatttactttttacttttgtgaattacaacgtggtagggtaggaaatgagaaagcttaaaaagcctaattttctcactaaagcataaccagacacagcagcctattaggggtttctccagaagatggcaggcagtcaagggggacagagttcgacccgcgacaggccaactgatttccccaaaaagatgccaagggcagctaaccgccctcctggcccgcgaagctgctccttgagggcccaaaacttcccggaggagccagaggaggccctcaggagccacagctctccctgacttggcctgtatttgcacccctagggatcccattccctttcccgacgcagcgcaaggaaggggagcggaatgggggctgaaaggcaataaaaaacttgtaaagccgtatctgctagttctcccagtgggctatgtccctgcaaatatcctccacaagaagtaaactgggtgggtaggaagaggtgaaggctccctcctcagggctgccgggaccgcctcgagggcttgtctgtttaggtcccaattcctcccggatccgtacattcacacgagcgcagggcaacaatctgagcgagtgttcgtgtgtgcccgtgtgactcgccatcgcgtggcagatgttcagtagaacattacagtaatttctgttacaggtccatgggcgcaggtccctgagcccacagcttcgcgggggtctggccgagcatgcgtcacaacctacgcggccaagagcagtgcgcacgcgcaacctaacgcgggactgccagcaacttccgggcgtttacaggcaggcaggtcagtgatgtgtcctaagggtccgaccgacctagatacccctctttgattcctcctcttgggattagtgtccatctctggaagcaggatccaggaggacgggaggggccgctgcggaccgcagtcgctccacctggaggagacaccagaaggaagacagcctgagggacgcagccatcc

SEQ ID NO: 23671 - DNA, 2300 bp, Homo sapien
tacaggactgggtggtgattcccttgcctggggctgttttctgtcctgtctttccacagtggcaagctgttgctctgtgccaggcctcggccacactgagcctcctattccctttccccaggtggagttgtgctcatatctggaacaggctccaactgcaggctcatcaaccctgatggctccgagagtggctgcggcggctggggccatatgatgggtgatgagggttcaggtgagctcactgactggcccagctccaggtcctggatctgctccttccttcactccctgtctttctctccttagccttggctcactgagcccttggggcttcctggggacaactcctgaacctggccattccatgtgcaggatcatgactgagatcatagaggtgcaaatgctggacgagctgctgaccctgctctccagcagtgacttgcacccaggactcagattcatccctcagcacaggggcctgcctgtgttgacttgctgtccttagggaggagttgaaactgagggtaaggccatagatgccaggagatgccataccagtctgctaggggaaagggtgtagaagcccttccaacatcacctctctctaggtagtgtgtgtttattttcataggggcccttgaggtccagttcatggcagtgactccggtggtatttgtgacaacagactgaccttgccttatccttgggtaggagctggtgtgacacagcctcacctattctgttttccccctccaactttcccttatcttggtcagtcagatacagtttgatagagaccctcccacccccctctcccaccccctgccacccctggctgggaatcaggaaacctaatttgtataaaattcaagcagatcactaacctgtctggatctgagtttccctcctcgtgagctcaggatgactgctcccatcttcttagccctctctgctccctgcagcctactggatcgcacaccaagcagtgaaaatagtgtttgactccattgacaacctagaggcggctcctcatgatatcggctacgtcaaacaggccatgttccactatttccaggtactcctcctgctcccagtaaacatgcgcacctggggtagggcagtgaaacactccaagtaagagtggatgcaggggagggcctgggcggaccggcaggaaatagggtgagttgtgggtctgagttgcagggtgaagtcataggtgaggacagggtgcattctaggaggtgcattctaggacagggcagtgcattctaggagggtgtcagtcatgaggaagcgatggtttggggacaggtgattagccagacttcattcttgggcagctagaacctgctgggaggtgaaagagatggcattctaggctagaatgaaaagtgcaggatgagatcacagggcagagacagcaggtagagtatgaatgtgtgcactgggctgtgagctgcttctggcctggatgggtcaagagagcccttaaagaggtggacagggagagttctgggggatatgcatcttcctcctctgggcgttggggattgactcctccttgtctgtgctgtgttcatttgtggtaagttaggaaacatctgcctttagcggaaccagaggtaaaaggcgggagagaaggtgaaagggagaggacaaggttgatgagtttgatagttacctgtgaggcccagttagtcttcctgtccagacatttaggtgggctggggctggggctgggaccaggaccaaggaaggaaaatagagatgctgggaagtagggcctggattatcagggctgagggattgatgattaaagaggggcccggctaggccaaggtgaggaataggaggggaccaggaagagaaatcacttgatgagcagttgtcataggaagtgcagttagtaactgttaagctatccggactcagccaattggttccaaactctactgataggtctactgctccctcttctatcctttagtcattcttacagggttgtttcaaagatcagatgagatagtatataacgtgcttactacattgctgtaggtgctcaagttttaccacccaccccctcagacatttacttaaaatatattctgggggctgggcacggtggctcacacctgtaatcccagcactttgagaggccaaggtgggcggatcacttgaggtcaggtgttcaagaccagcctggccaacatggtgaaaccccgtctgtactaaaaatacaaaaattagccaggcgtggtggcgggtgcctgtaatcccaggtactcaggaggctgagg

SEQ ID NO: 23672 - DNA, 2300 bp, Homo sapien
aggggcccttgaggtccagttcatggcagtgactccggtggtatttgtgacaacagactgaccttgccttatccttgggtaggagctggtgtgacacagcctcacctattctgttttccccctccaactttcccttatcttggtcagtcagatacagtttgatagagaccctcccacccccctctcccaccccctgccacccctggctgggaatcaggaaacctaatttgtataaaattcaagcagatcactaacctgtctggatctgagtttccctcctcgtgagctcaggatgactgctcccatcttcttagccctctctgctccctgcagcctactggatcgcacaccaagcagtgaaaatagtgtttgactccattgacaacctagaggcggctcctcatgatatcggctacgtcaaacaggccatgttccactatttccaggtactcctcctgctcccagtaaacatgcgcacctggggtagggcagtgaaacactccaagtaagagtggatgcaggggagggcctgggcggaccggcaggaaatagggtgagttgtgggtctgagttgcagggtgaagtcataggtgaggacagggtgcattctaggaggtgcattctaggacagggcagtgcattctaggagggtgtcagtcatgaggaagcgatggtttggggacaggtgattagccagacttcattcttgggcagctagaacctgctgggaggtgaaagagatggcattctaggctagaatgaaaagtgcaggatgagatcacagggcagagacagcaggtagagtatgaatgtgtgcactgggctgtgagctgcttctggcctggatgggtcaagagagcccttaaagaggtggacagggagagttctgggggatatgcatcttcctcctctgggcgttggggattgactcctccttgtctgtgctgtgttcatttgtggtaagttaggaaacatctgcctttagcggaaccagaggtaaaaggcgggagagaaggtgaaagggagaggacaaggttgatgagtttgatagttacctgtgaggcccagttagtcttcctgtccagacatttaggtgggctggggctggggctgggaccaggaccaaggaaggaaaatagagatgctgggaagtagggcctggattatcagggctgagggattgatgattaaagaggggcccggctaggccaaggtgaggaataggaggggaccaggaagagaaatcacttgatgagcagttgtcataggaagtgcagttagtaactgttaagctatccggactcagccaattggttccaaactctactgataggtctactgctccctcttctatcctttagtcattcttacagggttgtttcaaagatcagatgagatagtatataacgtgcttactacattgctgtaggtgctcaagttttaccacccaccccctcagacatttacttaaaatatattctgggggctgggcacggtggctcacacctgtaatcccagcactttgagaggccaaggtgggcggatcacttgaggtcaggtgttcaagaccagcctggccaacatggtgaaaccccgtctgtactaaaaatacaaaaattagccaggcgtggtggcgggtgcctgtaatcccaggtactcaggaggctgaggcagagagaattgcttgaacctgggaggcggaggttgcagtgaggtgagagcacaccactgtactccagcttgggtgacagagcgagactctgcctcaaaaaaaataaaaaaaatattctggggaaccattggttcctcaggaccttagaggtgttaaagatgtataagtttgttgggattggaaggacctaccttctgtggtcaaataagttttgggagaaacaaattgatttcttgattgcaggacttctcagagcctttaatttgctaatgtgcattgtgactccccaagggagagttacaatatgcaatattccttggattcctttgaccaaagaaatcttttcaagagcaccccaacccagctactcaggaggctgacgtgggaggattgcttaaggccagcctaggcaacagcaagaccttgtccctaaaaaggaaaaaaaaaaaattacaaaaaaagagcagctcaagaaactataggaaacactttggttaacacaaatctgttctctgtgctgccttcaaactaatctataagaaataatgaagtccatgttagggaacacagataacttttctcaaatgagaaatctcaaatccctgtactttggagttaaaaaaaatta

SEQ ID NO: 23673 - DNA, 2300 bp, Homo sapien
taacaggttcaatttccattttcagaacttttctacgtgttcactctgatttttctgtgcttttgtttttcggcgaagttttatgttccttaaaagaggggccataacatagaattaccatgtaatccagcaattccacttatgagtatacacacccccaaagaagcgggaattcagaagtatttgtacacccacgttcatagctgtattacaatagccaaaaggtggggataacccaaatgtctatcaagagacgaatggataaacaaaatgtggtatacacacacaatggaatattattcagtcttaaaaagcaattttttttttttttctgagacggagtttcgctttggttgcccaggctggagtgcagtggcgcgatcttggctcacgccaacctccgcctcccgggttcaagcgattatcctgcctcagcctcccgagtacccgggataacaggcgtgtgctaccacgcccggctaatttttgtatttttagtagagacgggctcacgcctgtaatcccagcactttgggaagacgaggtgggcagatcacctgaggccaggagttccaaaccagcctggccaacatggtgaaatctcgtctccactaaaaatgcaaaaaattagccgggcgtggtgccgggtgcctgtaatcccagctactcgggaggctgaggcggaagaatggcttgaacctgggaggcagaggttgcagtgagctaacgccactgcactccagcctgggcgacagagtgagactctgtctcaaaaaaaaaaaaaaaggtaaattttactttatgtatattcaaccacacacacacacacacaagtggagacattaagcttcaagtatcttaataggacaaatcaaaggcaatctttggaatacactgtcttcatttttcctttatgccaagatgtgtatgtaagtacaaaacaaacatgcacctttatctgtattgagttcttgcagtatgtatatgacctgttggaagtcatactttttcccaaactgtcaatcattaaagtgtgcagttctaaaaatagacataaaaatgccttttcccaaatattcatttatttatagttttacgttcctatcttgtgtatcacctaagaggaaggtatgccttacggttaagaatgtgggctctggtgctagaaggatttatcacgaatgtcccggagtaactctggggcattaccacttggcaccttcttcctaatagggaatctcagattaagggaaatacttgccctctcataaaaggaggaagagaaaaaaaaaaaggataaaaagaggagaaagtgagtcagaaaacgtgacaattattacagttatttctgtcataactgattctatgtacatattttaaaaaaaatgaagggggagagaactcaagaaagtttccaaatccacatgcttttatctgtgtacgcgataaatatattagtgcacgtggaaaaaccactccttttgtattctttacaccactgacctttgagtgttcccaacagaaagctggtcacgcttggagttcggccgactagtagttgttgtttttacggaacgtgctctcctttctggtttctccccagtctctttattggtgcgcggtaaaataacttaccgatccgcttctatttacttctgtccctgccctgcctgacctgccgggcaagttccctcgactctcccgcccacatactggaaggtgcagagcccaaggcgcacagctctcggatggaaatgggactcatgcacaaggcaatccccgctactaagcggtggcgcttctggaaggcaccctctgcctaagtgacagcagctgctgtggaacgcgcccccgggggaggacattagatcaaggtgctttggccacgccgaggcctcctccgcccccgaccgccgttcccacgctccctgtcccatggcgaaggtcgccggtgcccggtattcacctacggcattcgcggctgcagccttcagcacccgcgccattttggaaagcaacccgccacgtcaagactagccacggaggttgagagacgcgcggcagagggcggggcgggaggcagagggggcggggacagaaaggtcaggggcgtggcgaaggtcgctgctttcctgctacaacgggcctactttagctaaaacagaaacgtaaggccaggacgggtcaccctttgtgggcccctgaaaaatacaaaacgaagtttggagagagttgaaaggcgtttgggctgaccatggagatttttgtttcccaccctcctgcgaaagcgctcgcgctgc

SEQ ID NO: 23674 - DNA, 2300 bp, Homo sapien
gccaaattatgcatggttcaggagtaagaatttgtcatttaaagtgtaaagagaaaacattttaagcagagggatgaaatgatgatttacacgaaggaaggagaaagggacgagggaggaggaggaaagtacagtgattagaaggttgatgcagcattccagcgaaaggataatggtgatttagactggagttagagcagtgaatatgctgagtatagtttggaggtagaactgacaggattgctaaagaattagatatagaatagagaaaaatgaagacattaaagtagcagcctagttttatgtttgagtacctgaaaagacagaagtgccatttactgagatagggaaggcttgggtggtggtgtcaggcctctgagctgaagctcagccattgtaacccctgtgacctgcacatatatgtccagatggcctgcaggagccaagaagtctggggcagccgaaaaaccacaaaagaaataaaacagccagttcctgccttaattgattaatcaacattacaacattcctccattgtgacttgtccctgccctaccttaactgatcaatcgaccttgtgacattcttcttctggacaataagtcttatgatctccccaccatgtaccttgtgaccccgtcctcctctgctaatagataaccaccttttactgtaattttccattacctacccaactcctataaagcaaccccttccccatcaccattagttgactctcttttcggactcagcccacttgcacccaagtgaataaacagccttgtggctcacacaaagcctgttttagtggtctcttcacacagacgcgcttgacaggtgtagcatgggaaaaggacttcaggggatggcagagtataggtgggtagaaacaacaattctattaaacagacacaacagctctattttggacgcagtgaatttgagatgcttgacagtaccaaaattttaaaaatcgttaaaagttgtacagtgtggatatcccagttgtgtgctacggaattcaaactaagctcagtctgtagttgctgtgagctgggaactcagggaaaggttggggtttgaaacataaatgagtaataatttcatagatcacattttaaattcttcaacaaaatacatataaaacgcttgtgttgggaagagacatggaagttctatttctgaagaagcttagtcatggggggtggacagacaagtgacaagttcgtactttcaataaagtatgctaagcgctaagtgctttgagagcacataggaggaaggagaaaccaacagtctgtgtgtagagggatgggggcgtaagaagcccaagggaagcttctaggtgttaacaattgaggttagagtgatttcagtaacactcaactgagagatccatctatacaaattttaacagtttttaaaattttgatagcctaggaaagcataaactctgaaatttggggaaaagcgattttacgtttccccttaccttcccccagctccacaatttgccggaggcctgcaacccgcgtccacgtgagaccccggtcgcaccccgagcccgggatctgcgcacttacgtgaggaagcactcgggccgacccgtggctttgccgacttccgtcagacaccgctccagggtccgtcgacgccagacctgcggcgccatggctgtcagcaactcccgacacaatgcagcatgcaagggaagggagccgcccggaaaccgcgcggcaaagatgcgcccagcgcaacttggatttcagagccgaaagttccgcggcgcacaggttccggactcgccctcagccagagccaatggcagcgcgagcgctttcgcaggagggtgggaaacaaaaatctccatggtcagcccaaacgcctttcaactctctccaaacttcgttttgtatttttcaggggcccacaaagggtgacccgtcctggccttacgtttctgttttagctaaagtaggcccgttgtagcaggaaagcagcgaccttcgccacgcccctgacctttctgtccccgccccctctgcctcccgccccgccctctgccgcgcgtctctcaacctccgtggctagtcttgacgtggcgggttgctttccaaaatggcgcgggtgctgaaggctgcagccgcgaatgccgtaggtgaataccgggcaccggcgaccttcgccatgggacagggagcgtgggaacggcggtcgggggcggaggaggcctcggcgtggccaaagcaccttgatctaatgtcctcccccgggggcgcgttccacagcagctgctgtca

SEQ ID NO: 23675 - DNA, 2300 bp, Homo sapien
agagaggttttccttgaccactgtagccaaagcaaatgttgatcattgaatgaataagtgaacaaatgaatggagtggtatataatgtagcagaattgataatttaaggttaattcactatatatctccaagcaaatagatttataatggttttcctgcctaaaatctatacagccgattcacagatacttggttgacaggttttatatatcagtgtagctcatcagcttatatgttgttgggggccagaatctatacttatacttcattcaaattttattttacaaaagagttgggttttttttatttttattaagagtgctgtgaaattattacctgtaattctaaatctcacttaattcctcccaataggattcaagagggattggcatcaaagttcacttctttaacaaaagtgctttatgactttaataaaatattagagaatggtaggatccatggaagccccttgcaaaaacttgtgatagaaaattttgatgatgagcagatttggcaacaactggaattgcaaaatgaaccaattttacaatactttcagaatgcagttagtgaaacaattaatgatgaagatatcagtcttctcccagagagtgaagaacaggaacgtgaagaggatggttcagagatagaggctgatgacaaggaggacctagaagatttagaggaggaggaagtgtccgacatgggtaatgatgatcctgaaatgggtgagagagctgaaaactcaagcaaatctgatctgaggaaaagccccgttttcagtgatgaggattctgaccttgactttgatatcagcaaattggaacagcagagcaaggtgcaaaacaaaggacagggaaaaccaagagaaaagtccatagtagatgataaattcttcaaactctctgaaatggaggcctatttagaaaacatagaaaaagaagaggaacgaaaagatgataatgatgaggaggaggaagatattgatttttttgaagatattgattctgatgaagatgaagggggactgtttggaagtaaaaaacttaaggtaaagttttgagagaagagagagcactttcctcctcaaattagcttttcttctgtttttctaggagagatttaattgtagttagaagatttagtgataagaaatattgtgctctatcttatcagttataaatgaatctgtacttccattcaatttatgttccagttggtcttataattttgtggtagtgttattagttgccattttcacctaataattatttagttattagtttggttattagttattagcttgtagtgttattaagtcagaaagtaatatatacatacaatatacatgcaaatctatatgcatgtgttaatatatttttctatccctaattaatagtttttaatatctttttattttagtcaggtaaaagttccagaaatctgaaatacaaagatttttttgatccagttgaaagtgatgaagacataacaaatgttcatgatgatgagctggattcaaacaaagaagatgatgaaattgctgaagaagaagcagaagaactaagtatttcggaaacgtgagtattttgaaccatcctttacattgtaagctggaattgcccaatcatgtgtgtgtactcgtagttatcaaatgtgtttgtcttagcaagttctattctctaatatcagatattctcaagatagccagaggaaagtctctgactgtaaagggacattagagatcacttaatgaagaaaaatatctctggtagtagcaatcaaaccttccttaccaggaactttgatttggttttgtgtcaataaaatcctgttatttttgtgagataagagatttgtattatagattgatgaataatttattttctatatgttggacacttttttttctgtttcttacatagcgttttacctaaataataccttttgttccttaataactgaatgattttggaagttctgagtatttggttgcattaggtatataaaataagaactttattaagggaaaatttgtttccttttgtttttctaatggaaagtagtatatttctttttataagagttttggtattgtagggatgaagatgatgaccttcaagaaaatgaagacaataaacaacataaagaaagcttgaaaagagtgacctttgctttaccagatgatgcggaaactgaagatacaggtgttttaaatgtaaagaaaaattctgatgaagttaaatcctcctttgaaaaaagacaggaaaaggtaattagtaatttaaggaatttttaat

SEQ ID NO: 23676 - DNA, 2300 bp, Homo sapien
gctttaaaccagagttggcagccctaaatggatgtacacctaatacacaacttcaaaatacatggagcaatgtgaatagtgatcctggagttgtgcactgtagtggctctgcttattagccccttcccactcttcacttcttcacattattcacatctctgttcagtgctgtttcctcaaacagctcttaaactaaccatcctacttaaaatagccatttccccaaccatcccatgactctgctttattttcctttgtagcatttattcacaacataccattttattatttattggttacttttctgttgtcagtctccttcactacagtataaacaccatgggtgcatcttcactgtcttattcatatcatatacccagttccatgatcagagcctagaacattcatagtagatgctaaataatacttgttgaatgaatttatttatttacttatatcatttaatatgaagtatgtattagtccattctcacattgctataaagaactacctgagactgagtaatttataaagaaaagaggtttaattgactcaccgttcctcaggctgtacaggaggcatggctggtgaggcctcaggaaacttacaatcagggcaaaggggaagcaagcacgttttcacatggtagcaagagggagagagagctaagggggaaggacacacactttttttaccatcagaccttgtgagaactcactcactatcacgagaacagcaagggggaaatctgcccccatgatccaatcgcctcccaccaagtccctcccccaacattgggaattataattcaaaatgagatttgggtggggacacagagccaaaccatatcaaagtatacagctaatatttataattgttatttgagtttatctttttcatttttatattttttccattcattctgcaattccctaactttgtgtcatgtatacagtcagcttgagaggtgggggggagagaaaaatgtataaagtaagagctccacaaagaaatccctacttcctgtggaatacaattcgaagtcctttgcaagcagattggacattctaaatccaagggaggcaataaagttttattttaatttgtatttattgatgtatttttttttgagtcgcaacctcactctattgcccagattggagtgcagtggtgcgatcttggctcactgcaacctctgcctcccgggttcaagtgattctcctgcctcagcctcccgagtagctgggactacaggagcccgccaccacgcccagctaatttttgcatttttagtagagacggggtttcaccatactggcgaggctggtctagaactcctgaccttgtgatccgcccgtctcggcctcccagagtggtgggattacaggcgtgagccaccgcgcccggccaagttttatttttttaaagcactcaagaagttaggtttgtttctagaaacgtggaagcatccgtctgcttccttccagcgtccctttgcttccttccagcctcccaaggagcccaattccttaattttccctacagagaatagcaccaggtccaaagcagcctgaatcaaagctcctcctttggtaattgacagctgagggaaatcctactgaggcccacccccaccctcctccttgctaggctgacaggcaaaactcggtggcagtggcttccagctcagccaatagacgaagcgggagcaagagcctgtgtaaacaaacccagagtgcggcgccttggtctcctcccccacgagtgggccgggcgcatccttggcccaatgcctatcccaggctagcgtagcgtcctttcagccaatcagagccggcatctccctcaaggaggtgttccaccacaggaaaaaaaaaatgaaggaagagaaaagacagacattaaaaccaatcagaagctgaaacttctgagggagtgggcgggcactgcttcacatttagaccaataaaaaccacatatgccattctaggtgaccgaacggcatcttctttggcccaatagacgaatggggcggtgcccggcaaccaatggcttgggttcgggggcggggcgaggaggcagtgtgcagtaagagataacctggcaagtggtagtggcgcttctcgggtgctgtgcttcacgttttggtactaaaggccgagactgttgtggcgacggcgacctctacggcaacggcttaagctctcggaggagtggcagagtacgatctgaaggaggggcttctggttagcccaggtgggctcgggtgcccgggctgctggggaaaggactcgagggaa

SEQ ID NO: 23677 - DNA, 2300 bp, Homo sapien
aattagagaagaacaactctcagaaaaagcaccaaacaagatatttcaaaggtgaattatttcaaactttaaagaacaggtaagtccaatgatatttaaagtatttcaggtttgagaaagaagtgagtttgtagggaaatggttattttctttttttttttttttttttttgagacagagtctgactctgtcacccaggctggagtgcagtggcgtgatctcggctcactgcaacctctgcctcctgggttcaagtgattctcctgcctcagcctcccgagtagctgggattacaggcgtgcaccaccacagccagctaatttttatatttttagtagagattgggtttcaccatgttggtcaggctggtcttgaactcctaaccttgtgattcacctgcctcagcctcccaaagtgctgggattacaggcatgagccaccttgccctgcctattttcttacatatttagtggaagtgacactttgtagaaactttttgggaagtttttctacaacacctattaaaattaaatgtatgtacacacatatacatttaatctagcattcccactatgatgattctagcctttagaaattaaagcataatttggtaagtctttgtatacagcagtgtttgcagtagcaaaaagactggaaacaacttcagtgttcaacaacaggctgaataattgctgaggcagctatactatgaatattatacaattatttaaaaaaggattatatggtttacttggagaaatgtcagtaatcagaaaagcaaatagctaatgtgtgaaaaaagaaaacatttcctgttacatgcaaataatgtgtttgtatgaatataaagaaatgtatggaaggaaacttatcaaatgttaacatgggttatttggtgtttagggggagcttgttggctttttctttgttgtttttgatttgttgtccctagcaggatttttggtttgaaatgaaaatccgataagatatctttttaaaacgacttttctttttagtctttcaaatgcttgttttaatgtgaataaaagaaatgcatttgcttgagtgctaggtaaaaccgatgtgtgagactcagggtgggtggtgtgatttgtgtggtatgcatacggcagggcttgtagctttaccagattttgaacaatgactgggttttcatattggtgtagtacagccacctcgagaagataaaacattgcataacacagttctttaacgtctgtcatcccaaggttttccatgggtaaaatggagattacaaatatctaccacacagatagggctttttattgtgaaatgacaaaaggattttcagagtgttaaagttttagctgaatagctttggttgaattctactttacagttttgagtagctatgacacacatcattgccatagggatcaaaaggtgcaaggtgacaggataaaagcaggcaaaatcttgaccatacaaagcattatattaacgtgctaggcgcgaatataacctgttataatataatgttgttattattatttgagatggagtctcactctgttgcccaggctggagtgcagtggtgcaatcttccctcactgcaacctccgcctcccgggttcaagcaattcacctgcctcagcaccccctagtagctgggactacaggcgcgcgccaccggctattttttgtgtttttagtaacggggtttcaccctgttggccgggctggtctcgaactcctgacctcagatgatccacccacctcggtctcccaaagtgctgggattacaggcgtgaaccaccgcgcctggccatataatgttattattgaaggcacaaatgatcagggaagacttcatgaaggaggtgagacaatataggtcttaaaaggatgagcggtttggagaggacaggcacagaaccagcaaaagagtgaagacggcgctggagtttttttttttttttgccgcacgccttcgccgccaccacgcgggagcgccccttccgggagcccgctccgcccggctcttctcgggcttcgggcgagcgcggtgccagcggtacgcaggcgccgggagcctacgagggctcgcaggagctgggaggcgcgcatgcgtgcagctctttggaggcggtagcgttttcggcgtcgagactggaggctgagtgctaaactgtgtggggcgcggatgggatccagctgttagtcgggtaggcataggtaggaccgctgccctgtggggagtagggggttggaaggcggaggccggtatcgtgggggtcctgagcccttcctgtgagatc

SEQ ID NO: 23678 - DNA, 2300 bp, Homo sapien
tcaggagtttgagaccagcctggccgacatgacgaaaccccatctctactaaaaatacaaaaaattagccaggtagcatggtggcacatgcctgtaatcccagctactcgggaggctgaggcaggagaatggcttgaacccaagaggtggaggttgcagtgagccgagattgcgccattggactccagcctgagtgacaaagtgcatccctgtctttaaaaaaagaaaaaaaaaagaaagattattggaagactcactcttggcattggtagtcaagggaggttgaatgggggtgaccttgaaggatgaataaagtcaggtgagcgtccagggcaaggtttgtttttgattggaagagatgaagagatttgggaagaataggaacaaaggcatagcaaaaatacctgtctgataaaattagagagattggttagattggttggaccttaaacaataaagctaagaaatgaagggaatgagatatttgtggatttttgaacagaggagttgtgtggtgaaaatgtccttttgcaaaggttaaatgtggtggcagcatgcaaaatgattggagggaagggtgttaaccagataaagaccattttcccagccaaattaacaattactaacattatatataaatagagaaaagtgtatagtaaagtaacggatgaaattgtggcttgaaccagacagtgatggttagcaaataggatccatgatgttgatgtttataacaattgtagatgcctcaagacctcacattttccaccatgcatttcaatcacacataaaagtgaggtcctgatagcaccagcatagtctatatgctcatacattttttaattgtagaaaaggcaagttgtgtggctgctgaccttggtcctgaatggtagctaaagtactgttttctgagaagagtgttgaagggggtagtacagtctgatgggctggtcagcaaccagttttaactaataaagtgcctggaaactgtaagttacttttactcacatctgttaatggttaagagcacagattactggaccagataaccttgaatacaaatctcagcacagtcacttttctttgtaagttactttacctgtgtgtgccttagtgtcttcctctgtaaaactgtacatatctcaggactgttgtgagcatcaaatgacccattccatttaaagttcatagaacgctgactgacacgtggacagtgctctatatagttaatcattattgtcatccatatatattcgtccatactgcgtctatggatggaatccaagggaagggttactggttttgttatgtattatgttctatgttataacgaattccatgccattgcatactgttttcttagactctgtagtcaggttattggcaacaaatttttatcttacaagaaacaactatttaataataggaacataagtgtagtttaattgccctatgggatttattagatgtcaaggctgattccaaggaagattgtgttttacaaaaatgggtcttttaggcttacagttcttactttcattatttgtatatctgataacatgcgtattaaatgtgtgcatttataagtattttaatgccttcatcttttttttccccagtattacagcgtgaaataaattcccagtatttttcaagattatgtaaaaggagttgtaattactgctcagcacctaggacagcacccagtgcaacacaatgtacatgaactctggcttgaggtttggggcttgtgttctgcattcaggaaagaaaagaagagaaagtttttgggaaatttaaatcttcgtaagcccttactctaaaagtatatgaaatgcagaatggtttcatggctttatttcaaaatgttttacactggctgtagaacccacttcatgaagtagtttgagttaaaatgatctaatatttgtgttttaactttcagctttgtgttattcttggaaaatttcgcaccacttgtgaattccttgaacctgggcattgcaaacccacttctgttgggcccatctcctttgcactttgctcagattaagactcagttggcgcttcagcagctgaatgccgttgcctcacatggttcaacaccaccttatactttattaaatcaggctttcttgaaaatagccatgtcgagacccaggtttaatcctcgaggagactttccacttcaaaggccacgagcacctaacccttctgggatgaggcctccaggaccatttatgaggcctggatctatgggtctcccaagattttacccagcagggagagcacgtggaatt

SEQ ID NO: 23679 - DNA, 2300 bp, Homo sapien
aattattttctctcattttgtgggttgtctgttgtttcctttgctctgcagaagctttttaacttgaagtggtcccatttgttcatttttgtacagcatttgcctgtgtttgtggggtattactgaagaaatatttgcccagactgatgtcctggagagagagttcctccagtgttttcttgtagtagtttcatagttagagatcttagataaaagtctttaatctatttttatttgatttttgtatatggtgagagatagggttcaggttcattaatgcatatggatatccagttttcccagctggtacctccctaggttacatgccatcccagcccactagctctaatcccagccccagccctaagagttgcctaggagttgttgtccttgtgtcctagactacctttcaggtttacctagcaccctggagcactttagcccatggtagtgagacttgccaagaaattcagattcttattgccgggatggatgagtcctctttggctaggtctggtccaaaggctccttcagtgcatgggtgctggctgagtacagcatggctttgctgtccactgtgacagagcagcactgagttcaatgtaaagtcccctagttactgcgctgtcccttcctaaagtgcacagactctgtccatgttgtggggccagattagggaggtgtgctgtcagggatttaaggctgtctctgctaccctcgtcaatgcctctttcagtgatacaaagtcaaaaccaggtagtatgaatgctcacttgatatttggttcttgtgatgatgcttttctgtgtgcagatagtcgttaaaatttggtgttcctgctggggatgggatgaacagtgtagggttctattctaccattttgctccacccagctatgtgttctagtaatttaatttttctactagctgtggaatggctactttatagaggttctataacacacatttctcaataatttgatttggtagtctaaccatgttagtgcattcctcattctttgtaacttctctatagtgtttctctgtatgaatataccacagatgtattaccaattccttactgattgatatttaggttgtttctagaaacagaactttagttaacaccttgtgtaccttcacaggccatcttttgacatttatgatagtggttttttaggtgatacctacccaatggaatggttggtttataggatgcacagtaatggataatataagattgctcactaaataactgttataatttactccctggtaatttatgagagtattaccaacaacatcttaatttcttcagctttaaaaattcgttatatagaaaatgatatctagttttaatttgcatctttttgattattcattaacttcatctttttatataattgttagctatatctattaactgtttaagtgagttgtctgtatcttttcctattttattattgttgtctttttaaaaatattcatttgaaggtgcatgaatattgtgcattctagacactaattttgcattgtatgtaagaagtcttttcttacagtctgttgcttgtgttatgcatacatatatcaagtttgaatttttttttttttttttttttttttttggcggagcctctctctgtcgcccaggctggagtgcagtggcaccatctcgcctcactgcaagctccacctcccgggttcacgtcattctcctgcctcagcctcctgagtacctgggactacaggtgctcgccactaacagagatggggtttcaccatgttagccaggatggtcttgatctcctgacctcgtgatccgtccgcctcggcctctgaaagtgctgggattacaggcgtgagccacctcgcccggccaagtttgatgtttttatgtactcaaatttattggtattctatggcttctgcatttttttctttattatttttatgcctgtgacacagcctcaggaggttctgaggacatgttcccctctttttgagacaaggtctcactctatcacccaggctggaatgcggtggcacaatttcggctcattgccacctccgcctcccaggctcaagtaatcctcccacctcagcctcctgagtacctgggactacaggtgcaagccaccgcgcatagctaagttttaatttattttttgtagatatgaggtttcactttgttgcccaaggtgatctcacactcctgggctcaggtgattctcctgcctcggcctcccgaagtgttgggattacaggcatgagccactgtttctggcctgcttttttttcttt

SEQ ID NO: 23680 - DNA, 2300 bp, Homo sapien
catgccactcagcctgggcaacagagcaagactctctcaaaaaaaaaaaagtaaaagtgcttatatcaaactgcagttggatcaaagatttactatgatacataagatgataacagtattctttaagtgtggagaatattttttgtaaaatttaggttgagaagtccttcccaatcaggaagacatttgactacataaaatgtattaatgcataagtattttgagtgactttagaaaattgttaacctatgtgttaattttcttaaggaactctaataaaaaataagaagcctcaacccaaaagataaattggaaaatagtatgattaggcagattatagagaaagaagtagagatgacttttaaacatatgaagacggatacaactacacttataattaaagaaaaaaaaatcctaccagtttccatttcacattgggaaggttgatcatttcagttaaccatgttaggtttttgtaggagattggtcagggtggtgggaaaagttataaggagagacgcaaaccttcttggaagtcctgggaggttttgcaaagcttcgggagagaataaaggctgaaggcagctaaattctcttaccctgaggctaagggcaagtagtaggtaacaaaggagtgtaaaggaatttatctagataagtttatttacttttgccgacctttgatcatccgacctttgatcatccgacctttgatcatctgacctttgatcatctgacctttgatcatccgacctttgatcatctgacctttgatcatccgcgtgcaggactgctccctacaggcgggggcaacaactacccacagattgtgttggctccaggcctttgtcattaaatctgtactaaataaatacaagcagctccagcttattggggctgcgttctctcttcggcgtctctaaggccgagcagtttcctagctgcgctcacgcaaaatacctgtgtctgcgtacttttttcatccgtcgctcggccagagtcggtggatcagactcagcagctggtgcccctcgtgaggaacactgcaagggatcacgacggaacccccgaaaatgaaggcgaagagactgtgcagtcagtaagtcattggtgcccactcgggatatccaagttcaggggaattctcagactagagtttcatcatgagacaacagctgtccgcacaacagaaacagtatataaaagtattgaaacaactgcttaaagctagcagagcctcggtttcacaggctcagttaagggtcctaaggcaaactgttgtttcccataatccatggttcccagcagaaggcatgctggacctagagctctgggaataagtggggagaaatcttaaacaataccataaacaagggcaacgggtcccagtaacatctttaaccttatgggccttagttagggctgctttggccctgctgtacacagaagatcccaagaagggaagggagaaggaaccatcacctaccttaccgccgcctcctcttccctcagccctgccattactgggtaaagataccaaagaggaaacagaggttttccctgagccccctcccccaataaattggaaaaaagacaagggatacactacagctgtgggaccctgtcttaggcaagtggcattagaaggggagctcttaacctgcccggtaatgcaagatcagcaaggtactcaggtatatgaacccatttcttttgacgcttataaagataagaaaaagcatcagagcaaacggagctgctagtccatttatgaaaggattaattgaagccatagcagacaacttctgtttggccccatgggactggtcagtgctagctaaaacaactttagagcccagtcagtacctcctctggaagacagagtatgatgagttgtatgaacaacaagccaaccagaatcaattggccgggcaaaacataacagctgctatgcttcaggggaggggttcctatgccagtgtccaacaacaattaagttttgttccctaagcctatgcacaagtgtctttgtgtgctatgagggcttgggactgaattcccgaattccgaaagcggaagttcaacaaggatctttataaatgttcgacaagggcctcaggagccattttttgaatttatcaatcggttaacccaggcaattaagagacaaattagtcatccccaggccgctgataatcttattgttgcagttggcttatgaaaatgctaacgtcgactgccaacaagcaatgcaggcagtcagaggaaaggcagttacggccagggaacttacacgagca

SEQ ID NO: 23681 - DNA, 2300 bp, Homo sapien
aataaagtctcctgaagtgaaaagggagaaaaccccaaattgttttctgtgtggagagccaggtcataagaagaggcagtgccccactagtagagaccaaggtaactcagcaaaagaacccccttctatatgcccccgacgtagaaaggggaaacgttgggcaaatcagtgcaagtccaaatttgataaagatgccaaccacctaagtaatcaggtgggaaacttcatgaggggccagccccaggccctgctccaaacttgggcaatgccagcggctttcctcggtcaattggaaagcccacagtccactctctcagaacagccacctctgggagcgcaggattgggcttactctgccccaacgaattagtgctaaaaggagaagaccctaaaaggattgcaacagggatctggggcccactgcctccagaacagtgggattggtcctaggatgatcaagcctatccagcaaaggaattaatgtgctcaccagggtaattgatagtgattatcaagattgaggtattagttatgatggagtgtaaaggtctgcatattcttccccctaaatctaaaatagctcagttactattcttaccgtactgggtccccaatgcccagggaaagaggaagggaagttttggaagcacgggagccgtaggagtgtattggaaccagttaatcactgatcagagacccatgattaccttaaaaatcggaaataagaattttactggcttataggatacaggggtgaatatttcgattattagttatcaaaactggtcagaaacttggccttgggtcactcagaaacaaaaaattgtcagcactggctaagtgcacacagccaagcagagcacacaccccctaacgttgtgatttggagggaaaaaacagttagcaactctaaacatgactgtccctgttaacctttggggacgggaccgattagcccaatgggggctgcaaacccctttctaataatggccactgttgttattcttcccctacccctgacgtggttctctcaagatccaatttgggtagcacagtggcctttaaagggagggaaataacagtgagcccatgagttagttcagcaattaaaagccagccatatagaaccatcaagcagcccttagaatttgcccattttcatcattcccaaaaggtctgggaaatggggacttgcatgacttacgggctatcagtggcagtttgcaacctatggggccccttcaacggggctcccttcccctgtggcaattcttcaagataggcctatagtcgatattgacttaaaagactgctttaatactattccccttgcagaacagggcagagaacaatttacatttaccatactagctatcagtaatgaaagggcagcttgccaatttcattggaaagtacttcctcaaggaatgctgaacagtcctaccatgtgtcagcatcatgtaaatcaggctttgctccccagtagaaaaaaatttcctaattgcaagattattcattttgtagatgatattttactagcagacccaacagagccaatacttttgagtttatatgcctctgtcgttaagatgttaatcatagcacctgaaaaagtacagatgtcctcaccttggaaatatcttaggtacatactaacttcctggtcagtaagacctcaaaaggttaaattaaatactagcaacttacataccttaaatgattatcaaaaattactgggtgatattaactggcatccccccaccttgggcataactactgataaattacagaacctgttttctatcctaaaaggcagtgctgccctagactcacccaggtatttaacccccgcagcaaaaagggaaattgaggaaatagaccaagttatttctcagagacaactagatagcatagatccacgatattcagttcagttgtttgtttttcctgctaaacactcctctacaggattaataggacagatggccacagggctgcgcttcctagaatgtgttttttgctcacatactgggactaaaacactatttggctatatccagctagttagtaaagtcatctatatgggctgcagacgatgcaatctgtggctgggttatgaccctgaatgtcataagaattttcttgagtagaaattcgaagtagtcttgctccatctctagattttcaattagcactctttgattatgcaggccatataaaatatgcccttcctgctggcagactatttcagttcttatctcatactcctctagttttgccaacaaaagtagttcactccc

SEQ ID NO: 23682 - DNA, 2300 bp, Homo sapien
gctttgatatccttgttccctgatgttcttggcctcttcataattcagtagcatcaaatctgcatttatgctctgtgctgttttatttgcctgcatttctgttctttctcatctcctactttgcttagttaacttttcttttgtaatttgaattctcttcctgttgtctaaattaaatctctattccttctgtgaatttgaatgtcttttctaaatggtactatcttattagtcttttatattcttaggggaataagaagaattaaattgtatgggttagaatgaggcttgtttaggagagaaagatttttggaaagaatgtaaatcttgctgcttcttaattttataaaatactttgtaatgcatatttgtatagattgtcatgttataaatcttaactaagtaagtatttgtatgagaaagagcttataccatcaacctttatctatttttgctttttaggaagctatatttataaccttggtaaaagaaaatgacccagaggtaagttttgcatttaaatgcttttgtatacttatttaattgatggaaacattgttttacttgtttgccttttaggaattaaaaccttagaactaattttaagatattgaggtgatggagatgtcagatgggtcttcttggtaacaataaaaaaataaaggtttcttgtagtacttgatgcgaaaaaatttttcaggtactggagtgcatattaagtggtctaataggtcaatatcttgtctgaggatgttttgggtaaacgttatgttgatagtagaaatattatacttcccattttagtacgtcattttactgattactcgtacgtaaaattaagacctcactgtcttcccccatgtagtcattttcttactcttgggagagaacatcatctgacctctgtaatagtaagttaatgttaatctgttttaccgtttgttgcttcagctgtggttttttctgtgctgtctcttaaaaaactacaggcaaacatagatacaatttatgatcgatttgtacatcttgataatttaccggaagatggacttcagtgtgtactttgtgttggacttcagtttggaaaagtggatcaccatgtattcataagtaatagaaacaaggtaacaagttccctcataatttagctattcattctgtaaagaatgtataataaccctgtattctgacaatctgcaacttctgatctgaagcacctgtaaatattactcaaccacttcgcagaattattataaaccagaatattttattttggactgggccgagaaagaagagatgacctctcttttttcagaactcctagtttttaaggaaaaataagacttacgcaagggggaaaggtaatatagtgtagacagcattatcttactgggaagtttagacctgagttcctttggctctgattttaactatctttgtggtcttggctaagttggtttacacttacttgtaaaatgaaaggggtattacccaatatttctttaagtcccttccagctatgaaacacctgagttaggtctatttgtttgtttatatggaaagagagagataaaataattgctggatgcagtggctcacccctgtaatcccagcactttgggaggctgaggcgaggggattgcttgagcccaggagtttgagaccagcctgggcaacatagtgggatgtcgtctctacaaaaagtttaaaaattagctgggcatggtgacgtgtgcctctggtcccagctgcctgggaggctgaggcaggaggatggtttgagcccaggagttggaggctgtagtgagctgtgttcacgccaccacactccagcctgggtaacatagcgagaccctgtctcaaaaataaagtaatcattccttactttcatgatttggcctcttaaccaaaaattattcatttatttacatttggtatgccttctgtatttaatatgtatttcagctacatgttcattaaaattaaatttttatcagccatatattacctagaaaggcagggttttacataaaagtggacaatattcataaaaagcacttaattaaccaacaactagataatttctttgatatgcttctgataaatagagcatagaatggaatatgataaatagtgtgacatagaatggaaggtggggcacagatggcacataggaattctgaacctttcttgtaaacatttttaatcctctatttaaaagaatacctatcattctcttcagttttgccttggctttacaacattttaaggattgttttctcttgtttcctttaaataag

SEQ ID NO: 23683 - DNA, 2300 bp, Homo sapien
acgtagatttggtcttttcacatagtcccatatttcttggaggctttgctcatttctttttattcttttttctctaaacttcccttcttgcttcatttcattcatttcatcttccatcgctgataccctttcttccagttgatcgcatcggctcctgaggcttctgcattcttcacgtagttctcgagccttggttttcagctccatcagctcctttaagcacttctctgtattggttattctagttatacattcttctaaatttttttcaaagttttcaacttctttgcctttggtttgaatgtcctcccgtagctcagagtaatttgatcgtctgaagccttcttctctcagctcgtcaaaatcattctccatccagctttgttccgttgctggtgaggaactgcgttcctttggaggaggagaggcgctctgcgttttagagtttccagtttttctgttctgttttttccccatctttgtggttttatctacttttggtctttgatgatggtgatgtacagatgggttttcggtgtagatgtcctttctgcttgttagttttccttctaacagacaggaccctcagctgcaggtctgttggaataccctgccgtgtgaggtgtcagtgtgcccctgctggggggtgcctcccagttaggctgctcgggggtcaggggtcagggacccacttgaggaggcagtctgcccgttctcagatctccagctgcgtgctgggagaaccactgctctcttcaaagctgtcagacagggacacttaagtctgcagaggttactgtgtctttttgtttgtctgtgccctgcccccagaggtggagcctacagaggcaggcaggcctccttgagttgtggtgggctccacccagttcgagcttcccggctgctttgtttacctaagcaagcctgggcaatggcgggcgcccctcccccagcctcgttgccgccttgcagtttgatctcagagtgctgtgctagcaatcagcgagattccgtgggcataggaccctctgagccaggtgtgggatatagtctcgtggtgtgccgtttcttaagctggtctgaaaagcgcaatattcgggtgggagtgacccgattttccaggtgcgtccgtcacccctttctttgactcggaaagggaactccctgaccccttgcgcttcccaggtgaggcaatgcctcgccctgcttcggctcgcgcacggtgcgcgcacacactgacctgcgcccactgtctggcactccctagtgagatgaacccggtacctcagatggaaatgcagaaatcacccgtcttctgcgtcgctcacgctgggagctgtagaccggagctgttcctattcggccatcttggctcctccctgagttttttaaaaggcacttcagttgtctgaaatatcttttctttagcttactttgtttacttttgtgcatttgtttttccgttattcctttatgaataaggaagtaagttggccaatataggtatctgatgtagagttcctctgataccatgcagggtttttttttttttctctctaataaacttttctccttaatggaaagctgctagtaaacactctctgtaattgggacttaaaaaccatcatctttagttttgggcagtatcattaggatataagctagacttatcaccagatatcccagtaaaggaagtctttactgttggactcaaacacctatgccaggaatcctctctagacacattgaatttccttaaagtattgttttcagtttttagtctgacaaaatctttctagaagacttctacccagagagtgcatgatttctcagaaaaggcttccttctagtatgtataagctctgaatggcagatatgttttgccattttgttcactgatgcatcccaagtacccaggacagtgcttgccatatagggactgatttttaattcctgcccttttttggggctacagagtattgctttcttgggacccacatatcagataaatatttaaaatatttatcagatatcagacaaatatttaaaaggattattgttcaattttatttagcatttctaggtattttgaataggaaacttttttagtcagctgatctctcttagaagtcttttaaaataattcctcaaggaagatgttgatatttcacatttattgtttagggaaaagatagaatttccaggcttctaaagttaataaagtttcttatttatatcattattaaggaaacttattttttcattaatataagttattgtgtgtgacctaatttggaggt

SEQ ID NO: 23684 - DNA, 2300 bp, Homo sapien
cacttccactctgatcccttgcactgtattctccaaaggcagcccaagggagcttttgagaagtaaatcagatcctgccactcctctggacttagcaggcctcaggcagcttcccccaggccctgcatggtgccctccagcctgcctgccccattccacaaccccttaatctacactcctctcctcccatggccttgacagagcgcttccttctttctctctggaatactctcttccttgcccccacctcagtcctgcccagtgaactcctagctgaccttcagatctcatctcaaatagctcttactgtcctgggcacgcgatgaggactccctgctctctgttctcacactcccacattttctgtcttttatggcacttacatatttgtaatggtatgtgactgacgtgattattccataagtgtcagtttccctcactgaagtggaagctctttgaggttagggactctacttgtttgctagggctgtcatagcaaaatactgcagactggggggcttaaataacaaaaatttatttctcacacttctggaggctggaagtccaagatcaaggtgtagtcagcaggcttggtttcttctgaggcctctcttcttggcttgcagatggccgccttttccctgtgcccttcacatggccttttctctgcgtgcatgcatccctggtttgtctgtatctaaatttcctctttttataagggcactggtcagattggatgaccctaatgacctcactttaacttgttcacctctttaaaggtgctatctctaagtagaatcacattccaaggtactggaagttgcctttcacatagaaatttcgagaggacctaattcagcccataacacagactgtgtcacttgtgcccaccactgtgtccccacccaggacagtgcctgacttattttaggacttgacacactcccattaaatgaatgattgcatttcagctccccccttcctcttcctcttcctctccccaccccccaccatacgttgtgctaaaggcaaagaaaagaaggcatagaccactacagaaggaccctaagtgaccacaggaaatgtttgctaccctaatcttgaaattacagacctttttttggggagtgttgctctcttctagtatctccctatggggaaaaaaatcagccacctgtcagcggccagcccatcctgccctgggtgtgtctactgcccccaggggctgctgtgggagttttgctgacagctgcacacccatccaactggccctctttagagggtgagtcaacaggctgccgggagtgtggatctatctgcaggaaggcagtttagcaataggtactagaacctaaaaaaaagtcatatcctgtgaccttacaatctaatctgaagaactgggtggggggagggggagggctaagatgagtttatatcttttttattaaaaagaaactccctttctcactattatagtagaatctggggagagcctaaatgtgaaacaagagaaagtttgtgaatctagtacattcatatgacagacaattatatagctattgaaaatagtgtttatgaataattgtttaatgatgtaagatgttacatgaaaacgtgggacacagactgcattctacactcagatatataataaatactgcaatttacatgtgtgtatacattcagaggagaaagcctgggctgccaaatacccaaatgttaatatactattttttcagaaccagagatttctttctttatgctttttgttttaaaatggcatgtgttgcttttaaagccagaaaaagggggcaaagtttttaaggcagctgccttgcttgtcaatgaaattctcaactccaggcttctcttagggaaagaggcctccccaggatcccccgtcctaccccgggcggtcgggttgagttctggagagactgctccaatccccgaggcggaaggaggcaaccgatttggcgcagcactcagccagggggtagaagctcaggggaggagccgagcctttctcctgtccaagagcgagatctgggctacgccgggcgcccggagccctagtccagcccccggccatcgcggccgccgcccagccaggtgcaaaatgccgtgtcattgggagactccgcagccggagcattagattacagctcgacggagctcgggaagggcggcgggggtggaagatgagcagaagcccctgttctcggaacgccggctgacaagcggggtgagcgcagccggggcggggacccagcctagcccactggagcagccgggggtgg

SEQ ID NO: 23685 - DNA, 2300 bp, Homo sapien
ccactgcaattagtttcttttatattattctggttttgtgatgcacgtgtaagcaaatatgactacagattctttcttcatttttttttgagatggagtctcactcagtagcccaggctggagtgcagtggtgcaatctccgctcattgcagcctctgcctcctggattcaggcaattctgatgccttggtctcctgagtagctggtactataggcatgtgacaccacttccagctaacttttgtatttttagtagagacagggctttgccacattatccaggcttgtcttgaactcctgacctcaagtgacccacctgccttgggctcccaaagtgctgggattaaggcatgagccaccgtgcccagccgactatagatttttgtcttttaccttttagcacaaatggctgcacatcacaccactctgcgccttgcttttttcacttaatcatataacttggagatggtttcacgtcactacctagaggcatcctcattctgtttgacagctgcctagtactccattgtacggacggaccatacttcatttaacctgctttccattggtggacacatgggttgttccaaatccttgctagttcaagccatgctgcagtgaatagcctcacacatatgtcattcctcacatgtgcaagtatttctgtaggatgggtgtctagaggtaggattcatagggcagtgggaacatgcatttgaaactacaatacatagtggccaattgtcctctgaaggggtcaaactattttgttttcccaccagcaaaacatgagcatgcagttttcccatagccttgccaacagtggtctatcagactttagagatttttatgaatctgatgggtgaggaatggtattttgttggttttctttgtgtttctttctgagtgggatgaagcatctttttatatgtctcaaggccttgcgtcttcattctgtgaactgtctcttccactctttgctctttcttccactggattggatcgttggtctctcttctttccttactcctctctttgctaactaacacaagggccaaatcctggcactcagccccacacccagccctgtgtggcctttgtctggggctctttttacagggaggagggggaaggtgggggcaggggccagcactgggtggaccaggaatggagacatcatcctcacccctggggacctgaagtctctgatttaagtcagatgctcattaaatgagataatgcacatgaaatgcctagcacaatgcagggcttatcatagtaaatgctctgaaaaggctgctcattattttcatgtgtagaacatggaaatctaccaggatctgtgtatctgaaactgagtctttacctgctgcccccgtgtgtgggtataggatccctggggctggctaaggggcctggtgttccttatggactccaaggccagggctggcctgtgagctgctggtttggatctggtttccactcctgtgaggtttcttgtttgggaaaaacctggtctttaggacagggctggttggaggcagactatggcttatagggtttgtatcttcactgaattttctttcactctctgacctctgtgcatggctcccctctcccatctctgatctcctaggggtcacagtcttcctacatggtggatgatctggggtaatgggcaaaagagccttctgggccataagggcctctgggaaagctggtctggactggactcagggcccccacatttagggtcatggccataatgggaggtatggagagggattttcagccagaggtgtgagttaagggtagaagggctgtggcattcagacagcccaccccacccttacccactccccagctctgggtctgaccttccattgagctttgtctctgcaaagattccctgtgtatgaaccccctgcactaggccccaaccccagggtcttacacccagccctaagggcagccagcatggcagagaatggtcactggctggcatgtggccccgggggagcccagagtccccatggagcttgatcaacttgtcccctccctgtgtcttctagctgtgcagcaagatcttggagaagacggccaaccctcagtggaaccagaacatcacactgcctgccatggtgagcctcctgcccccagcaaacccaaggaggcccctggggctctgggcttcgggaggtccagggctcctgcctccccagcatcctgccagtatcccagacttcagctcggggtagggaggggctgttctatcttcaaaaggactcttctcccaacac

SEQ ID NO: 23686 - DNA, 2300 bp, Homo sapien
tggaaaagaaggtatatcttctgtttttagtgtaaataatgtttgtctatttagttgtcactgttaatggtattattcagactatctgtctctaattcctttggaaatttacttggttattcaggattgagggaagtgtgataccttccccacaattcttgttcctgtcttttctttgtacagaactcactggttggttgtctgtctgtgcctgactctgagcctgagttataaactcaaacctttaagtatttgggctgggaaagaaaaataaagatttaggggaactcaacagctaaattggattccattctaaccatttctacctaagtgtccatgtttgcctgtgtgccagtatgtgcagttgtgtgtttctgtgggggcatatgtgtgttttagcatacacatctcctttggacgtgactgtgtaagtcagttcttctgcgtgtgggtcatcctgtgagtttgatatgtatgtctgtatatgtgtgtcacccatagcatctttttctttaaattgaactttaaacatcaaggcttgggtctgccttgctctaagctggctttttctagagtggttacaagtcagaaagctctgccatgctgtacgctaccccacctgaccttgtttcctctctcctggctgcagaagaccctccgggtaagtgggtctggtagggcctggctgcagattcagcctcactctggtacacgttccctgtgtggtgtgtctggagacacctggccacacaaggtgtgttaggaccacacttccaggacgggtggagactcgagaacctcatcctaccgtctccccaggatgcctgttcaggaacccttggcggggcaccagcttgtgtttgcctttagtaagctggagctcagagcacttggctttagtttgaaggggccaccagcattttcagaaactctgtgataggtgttcagttcctggtggagaattagagcaggctcctgggagatcttctagcctaccttctcatacagaggaggaaagcgagttccagaatgagctcctgaagccgtgtccttggcccttcccactaaaccagataagctctaatggtacagatgggctcagagtgagtgatgggaccttggtgggcttttggggtgaactgaccatcccagcttcagggagcttggtgaccctctaggtgataggacaccccacctgccgagacaggacacagctgaaggaatattctagacaccagagctaagagggcctgcagacacaccatgtacaggaggagttaaatggtggggaggtcaggatttgccacaacaggcctgtccatcttttcctgcaaataggagtgactggaggaaggatgcggatgtcacacagaaaatttgtgctgtcacatacttcctttcttctcacctaatacctcacatttagcagtgtctttggaataaaggcacttagtattagttgattttcagggactctgccttgatttgaccttggggaggttaagtgctgatttccaatgcttcctttattgcctgggtagggaggcagatgggcagaatagataaaactcttttgggtctgaattttcctggatctactgcattttgttcataaataatacattattgacattttcccctaagagctaccctatgtaccctctgattttggtctcagtgtgttgtgtccctgggatgcaggaactacaaagatgcttatgcccacttcacagaaaggaaaagggaggctggggagtttgacagaaacacacatgcttggggggcagagccagggctagagcctccgcctctcaacaccaaccaaatgctgaaacctcttcctcagtctgcagtctttgccccaggagaggcggaggtttcctctctctgctcccccacatcacccttaggaaagccttgtggtccagagcggcctagcagcggagggagggtttccaactctgaagaatgctgcttggcgagtcctgtttctgaaatggtctctttctttctacccactcaggaggaagagttcatcgattggtggagcaaattctttgcctccataggggagagggaaaagtgcggctcctacctggagaaggattttgacaccctgaaggtaaggcctctcttcagtctgacagtcggtgtgtgtgtgcgtactgggcagtgggagacacaacagaaagagagctcatgcagtagatgtatttgcatttgtctcctcattcggtgtctgagggtgatgaatgctgctagaccagctgggtgagaaagccacccaccgatttacagcc

SEQ ID NO: 23687 - DNA, 2300 bp, Homo sapien
tcaatccttccttgacccatttcttcacagtctgagtgcggccatggttggcctgggaggggatctttaggtcctggcttcctctggctgcctccatccctcagggcctgcgaaacgaggctgagcttctcccctcacccctgtaggcctggcctccgacctctccttgtcatcctgaagcctctctgtttcagcctgacttcaggttggattcccccatccaaccactatctgtcagtgactcagtctcagatgcccggccctgtgctgggtggctgtggggtatgcagccagggtggccctggcatcctatgaccaaatgacaaagccacccacagagagcagtcctcagtgggaggggaatcctcccacgctgaagggcggggaccacagagacagcagccttgggatggtgacagggagggcttcctggaagaggtgagctcagagctgggttttggaagaggagaaggggagacaaggttataggcaaagagaaaggccaaagtgagccatgaggatgcctttgtgaatgccagaggacattacctctgttgtttggaactgagctctctctccacctaggtggtttggctaccggcctccccaaagtggcacaacaggtgtggaaacttcagctctttcatcttctagttctgtgaccctgcagaagtgacttaattgaattacttcaattcctgctccttctgctctaagatgagacaaattcacacctcgcttgcagagagggaggaggataaggggtgggcagggagagtgatgtcctgccatggaagccttctgagccctccataactgaacggtgctctttgacacgccacgactgtgcacatgccattcccctggctgccaagactcagctcagccaccaccatctctgagaagcccaccctgacccttgacccccaggcacaggcccaagtcagaggcctgtggggcagtggtcacctctgcggttgaccctgtagtcccctgtttagggcagtgaggctttctctggaagggcctgggtttctctgttctgtgccctcagcatctggcccagagcaggtgcttggtaacagctggttaaatgagaagggtggggagagaacggaccctgtctccgcaggggaagctgcagatgtgggtcgacctatttccgaaggccctggggcggcctggacctcccttcaacatcaccccacggagagccagaaggtgacttgcccagccacaggctctgagctgggctgaggggtgggggcgttgcagcctgctgtgggcgggactaggcggttgctcttttctgccgggcttcaggctatttgggccatggaatacagttctcgtttgggcctgggccagtgtccagccaggcaggcatcgagtcctcttggaccagtctgcttcttggcttcttggcttcttaaggccttcccatcctttggtaggaaatctaggtggattagagtgatacctttccccaggtttttcctgcgttgtattatctggaataccagagatgtgatcctggatgacctgagcctcacgggggagaagatgagcgacatttatgtgaaagggtagggagccagcgtcctcttgcctgtccagcttcccgcagctcccgtgctccctctgggttgtgcacagcacggggggctctggctcagggaagggaagaacaaacaaacttccaacgagggctcctgggggtggtccctgcctttggggaaatcgctctcccaccagatttctttttctgcactgaactttgggttgaacttacaagtttagtggctgggaagttagaatgttttcaaatttatggcacattttgtacatcgtgccgatttcctgggaattctttttgcgataagctcatttaccttcttaactccttgtctgcctaagttgacgatgtatatactgtgttggaaatcttaatgagaactattctctaaaaacatgtatgtctagttggatgattggctttgaagaacacaagcaaaagacagacgtgcattatcgttccctgggaggtgaaggcaacttcaactggaggttcattttccccttcgactacctgccagctgagcaagtctgtaccattgccaagaaggtcagtgtccttccgattccctgtggtgccagcaccagggcttctaaagttagcctgacctgaccaccacgtccctgcctggcaactgtcacaatctcactgctgccccaccatgttggagctaccactgccatctccacatggccaccacctccactgtcccagcactgccagt

SEQ ID NO: 23688 - DNA, 2300 bp, Homo sapien
gggcaccccccccgtctcccaggctgccctttgcctaggagggcagctacctgtatcttctggtttctttgaccatgctagggaagaggttccattttatagaaagggaactccagtggggagggttcggccagaaatcccctaggcagggaggccactgtacctctggctttggcctattcccatagaatcctgggatttcttgcgattctctctctctgcttcctctctctgctttaagaatccgatctggacaaagacacctttttcttgtggtctaaagcttagttgtagccattggtttgacatttcctgcaggaatcaggcttaatctacagaagcagcaggaacatacttggagagaaagccaagcgcttgaaaacatcacgtttccaagagtctcctgcatctctcgcctgaggggctgaactctgtgagcacagagctggcagcctccactcccgttacccagcgggtgtccccggttttccacggtgaccctgcatcctggcccagtcctccttggctcttcactgattggcaggactgggggtggttgggacagggttgatgtctggaacctgcctgggtgagggagctacaccttgaaagcagggtgcttcttacttcaggagagcttcaggctagaggtggctatgagtcctgagaccctgacacctgaaccctagagccaggggccacgccgcacgtaggacacagcagggactggggtcagagcttttctgggaaggtcagtctggtgctgagccttcactgagcacactaagcatgcctgtggggaggcagtgagaggaggctggcctttagggagggctagagggagaggaaggaaggggtggggccaccacttcaggaggccccgagcgagatttttaggagagggaaaacctgagaatatttgaagggaggaaggaggaagccacttgttagggaaagatcaaagacacaagaaagagtatgaggtaattcatggaatcagtttctggagaaggagaggagggggtttgctttggaaagaaggtctgttttgtcttccagggcggaaaggcaagaggaaatgaatgaataccatgcaactatcagctggattaaaagagctttaggggtcattgtgctcattttttcatttcttccttcactttattcttgattctctgggttgcaggtaatggaaaaccccactcaagctacgaaagggaattcaatggctttacagaaatgaaacacccagatgattggtttcaggtaaaggctgatccagctcctcaatgtgagatcattgagagtttgtgttctcaaggttggcttcagtttaaagctggctccattcatcgtgctgggcttgaagctgctctctgagaccacatagaccactaagaaaaactcagagggggatgaggaatggatggcaaggggacaccatccccagcaaacgcgccttgagatgctctatgtggcaggcctagagcaaggtctgaggatgagttgcatgtgactctttgccttccatagctcccagcacggtggggaaattgttcccttttgggagtatcaaagaaggagtgcccactgccctggggaaggaaggggcaggagactctctcaagaagggataccatttgagtggagcatcggactggcccggcggctaagagaggaaaggtgttctcagtggcagaagtggaggctgagtggtggagctgtcgaagaactcagctggttcagggcatggctggggagagtgagcctggagggaagtggcccaacagagaaggaagagaggccaggtggcaaggccaggtggggagggccttgcgtgtgcggctgaggagtttgaacttcattatggagacttgaggaagaccagaaggactcgaagctgaacagaccttgatcagaatcatgtttttctgaaaaaccattctagctttgttcttgggagacaggagtcccctgggggtacatgggtgagcttcaggtatataaacattttgtcaaactgcctttgatggggtgagggcccagtgatcccactcgattcttaaaatggtccatggtcacaaatggcaaaggacaatttctcaggctgctgtgcggctggttgcagagggccattctagaagagtggttcgctaatccaggagccaaatgggaaaggtctgaaaggcagggctcagggtgattcatccattcatccatccattcattcgcgcattaaagaaatatatatatcatatatgcattgggggggctatctgtgtaccaggcagggtggtagg

SEQ ID NO: 23689 - DNA, 2300 bp, Homo sapien
gatctggagcccgagtcggtacgctcgtgggctggcaggcggggcggctagacaggtggcgcccctcccctttgcgccgggtgctgccccggcaggagaagggttaacgtggggtggggtaactagtgccgacgtcaaaggtgagcgggacgcccttgcccccgcccctctgaggtctccacggtttccggtacccgcgcccggccggctccgccagccgtttcgagagtccggccggccccggccccgccatcctcggcttgcgccgccaccaccggggatctggttacctgcgcgggtcgccctgcccggtcccgccccgccccgcgctcgggttccaaactccagggcggcaaccaaagtccgtctccgttatttccagggcaaaatgcattaggaaaatcgcggctctgggcccgtgaccccgccctgcagagtcctccgagggccgccgggtccctgcgcgggccacaccggagagcggaggaaactccaacccccatctgtagttgctgcctccgggcaccgaccgcttaccgctataaataatctttggcctgcggccaccccgcggggtctcgccagcccgtggcccggagcctggaaatatttattccgagaggctcccgagcgcggggtgggggtgtgggggtgggggtgggggcggagactcccgcttcgggtccagctgtccgggatacctctttcctctcgaaagtcattaccaaaaaacagcctcctgggggtgcccctgggcctccgcctccttgcattatttattatcctctaggccctacttcgcagttcttgtgcacgctatgaaaaataaaacctgcgtgctcgtctgtgtgagtgtgtttggtggggagagggggcaggtgactgtaccccgggttggggtccgccgcccctccctcgcgggccctctgcagaagtgcaccctgagagagacccgggtgtggctcccgcagggttctggcttccagtcgtcgcggagggagaagtatggcaacgtgttcaagacgcatttgttggggcggccgctgatacgcgtgaccggcgcggagaacgtgcgcaagatcctcatgggcgagcaccacctcgtgagcaccgagtggcctcgcagcacccgcatgttgctgggccccaacacggtgtccaattccattggcgacatccaccgcaacaagcgcaaggtaagaactctgcccgttttcttccgcgcaatccctcccccacctcggggcaaggagttcctggagcccggggaatgtcccctaccgaatctgtgcccccctttgcacaccatgcttgaagactccgcagttccccgccgacaaggcctcgagtccggatccagggcctgctccggcctcctcttggtcccttttcttgctggccgactgcgtcatgggcacccccaacggtggcttggaagagcttgagcgtgcggggtctggggtgtccaaagcctgtccttgccttgctccacagagctggaaaaagaagggggcgggacagttggccggcgttcgccttttcgccacgtttcccagggaattccgaggactggagaccgatcattctaaaatcaaagctgtccttcccaccacaggctgcttgaagggagtcgcgggcaggcggctgcgcgtggaggttggggacagcttgtgggctgcggtggcggggcctggtcagagaggtgcggcgagcctgggcagcggagcgcacgggtctgggccgtgggggaagggcgggcggggggagagcaggcgaggcacgagcggggatcaaagcgcacccacccccccccgaaagaggaagggaaagtgggtgtttatcccttggatttcccgagcgactggaggaggcgcggaggaggcgcgcacgggacaggcccccgcccctcccggctgcgctaggctcccagcgctggcggcacgtgctgtttgaactgcagtaacccgaaagcggagccagcgggcgggccctaagccgccgggagggaggctgcgcgacctctcccactccatttttttccactgggtcagaggactcacccaggtttgaaacctaaggaaagggagaggcagccccccgtccctgagcggtggcagaccggggaggtggggaggcggactccctccgtcaggggccgcatgtgctgtggtcttggcgaaggtggggagcgctctactagccgacgcatcctgtagcacttgacgttctctgaacagcctgtgaagggtaattcttaacggcagacaaaagaaggagcggtcaaaccgaggagactgggt

SEQ ID NO: 23690 - DNA, 2300 bp, Homo sapien
cgcgagcgcgcggattgcacgcgtctgttaatttcaagccaagctttcgcacctgtaaacccacaggtcgcagcgctcacctttcgcttcacctctctagtgcggggattgtcagtttcaggacatccctgcttcccctaacagaacaaacgcgcgtacacacaaatacacctcccgcagttactgcagaggcgctccgctcccccaccccaagaagaaaaccggtgtgtatcacattgcaaaagcgattgtctggcacttgatgaggtgaactccaggttaatctccccattacctacctgggtctggtccctgacgcgcctcacccccgttatcaccagcagagtggggttgtgcggcatctaacaagcacacacgcactctctctctatggatcccacactcacctctcccaagtttccctctcctgccaaactgtccccacccaataagtaaatagacccttttccccgaaagcctagagccctggattctcatttttccttgggttaccttcttcctcttccaccacaaaacagacacactcgcgcggaccgcggaccagggacactgtacctggcgctgccgacggcgccgcaggaacacagttttaaatcggcaattcaagctgccaccagccccctcctctcccgactcaattttcggctcccagcgacacagccaaccccagaaagccgagggcgactgggggcttgcagcaccgaggggaggcgaaagcggctcaggaccggaccctcccccgggaccgcgcctcgctaggcgcccccggggcgctccacgccccctgccaggccagccgcgacccaggcaagtccatcttgggagccccctcaggtccgggaacccctcttaccagccccctgaacctgcgccgcgggcgccagtggtcccggaaccgcgctgccggcgggctggggaagcccgggctgctgcggcagagaggagggaaggggcggggcggggaccagtgccttcaggctcccggcgccccctggccggcccgccgctccgtctgccccgcgctcgcagctagcggaccccggagtgcagcggagcgagcgcgcccttacctgcagcagccagtggccggtctctccgatgagcgggaagcccatggatcccttggggatgggcagcttgcagctcttgtcgcgagtggcggcccagcgcagctgccacagctgctgcgacacggccagcagcagcgtcacggacaccaggcacgcggcgagggtggccagcgccgacaccagatccaagccctcaaagagcatgttggcggccgctcgggggattggctgtgccggccgcggcgggggaggggagggcccgacgggaggggaccggagcggcgggggaggggaggctgcggccgggggtcctggcacctccagccgaaacagagaaggaggaaggggccaagggaaagggagtggaggctgcgaggggagcggagagagggaggaaaaaaattgcctaaaagaagagaggaaacacgaggcgactggggtgcaactttgtttgtttgtttgtttgtttgttcctttatagcgggcttaggggctgctcaaggggtggtgagatgaagccgtgagtcaagctggtgggtttgctctccccgctaccatcacactcggaaaactttggaaaactttgtccagagggagcctctctctcgtaagccccttcccctgctcggaaaaaaagaagggggcagagagctagcagagagaaagtgcggtcgatttgtcaaaagtattgcagtatggccccaaaattcctaggtgaaaaaaagaaaaaaagaaaaaattcctgaatccaaaaattccaacgaacccagaaactttgggggcgagggagaaagctccctggctgaggcgagtggagaggccggagcctaaaagtccctgggctgcccggggcggcgcgctcgagccccagagccgccgcagcacccccgaggcaggagcggcgggcgaggcggcgaggcgggcgctgcggcccgagcgcgggtgcggagccggcgggccgcggccgggacgggacgcagccggcgacagagccccgggcgggcgatggggcggcggcggcggcggcggcggcggcggcggcggcagcgggcgggaggggtgaggcggggtggggttgggggaggaggtggaaaacccgagctgggctattgtatcaattaagaaaaggcagtccgtcccgggacgcggtctctcggctctggagttgctgctgggggaagaaatggggaaaaaagaaaggaaggcaaa

SEQ ID NO: 23691 - DNA, 2300 bp, Homo sapien
agcgctgagaaggtggccgtgctcacccagcatgtttatttactcatttgtatcaatgaacgtttgtgcccgtcttctcccgcctctgggtaccggggccgccgcgtttgtccccgcgcaggacacttgccggaccagtatcggggttccccgacgctgcgggcggtggagggggactacaaaagcaggggaggggggtcccaatgtgcaggaaaggaggggctgcagagtcagcagcctgggacgctgacggggacaggagaacctccaggttccgtagggtaagagacatatggcgggggcggaccttagcatcggaggtgtgaggatatagggatcgggaatgggggatctggcttagggggattgggactggtaactcaggggtccctggagataagagccagcgggatcccgggggttggaagctcgggaccctaaggcacagtttcgagggctttgggcgcctgccagtcgagggggcagtccggccaggacctccgctgccggggcttcggcccaggagggactgctcggagctggaggaggggaccgctgacctgggaaggaggaaaagaggaagggaaggagcctagaagccaagcaggcactaagcgagtgcgcaccgtgtgtgcggaggtgtgtgtgttgtgtgtgtgcgcgtgtgtgttgtgtgtgtgtgcgcgtaggtgcgcgcgcgtgtgtctcatctcgtccgtctgtaggcgctgggctcagcgagacgccggcgagaaagaagaggaggcgagaggtgaactgagtttgatcctgcggcggctacaagtgggtcccgggcgggctgcgggcggcgggcggcgggcggccggggcggggcgggaggccgggctgcgctctccagctccggccgcgggcccggcctctcaccacgcctccggctttgtgagcgcgcgggttggggcgggggggtgctggcggggcgcccacggcgcagcctcccgcctctatataaacacacgcatcgcctcgctttggactcaaattcacattgagagaagcttttaaaaccaccagccctgaaatcctgcctcctgcttttccccctctttcattccttttgccttcctttcttttttccccatttcttcccccagcagcaactccagagccgagagaccgcgtcccgggacggactgccttttcttaattgatacaatagcccagctcgggttttccacctcctcccccaaccccaccccgcctcacccctcccgcccgctgccgccgccgccgccgccgccgccgccgccgccgccccatcgcccgcccggggctctgtcgccggctgcgtcccgtcccggccgcggcccgccggctccgcacccgcgctcgggccgcagcgcccgcctcgccgcctcgcccgccgctcctgcctcgggggtgctgcggcggctctggggctcgagcgcgccgccccgggcagcccagggacttttaggctccggcctctccactcgcctcagccagggagctttctccctcgcccccaaagtttctgggttcgttggaatttttggattcaggaattttttctttttttctttttttcacctaggaattttggggccatactgcaatacttttgacaaatcgaccgcactttctctctgctagctctctgcccccttctttttttccgagcaggggaaggggcttacgagagagaggctccctctggacaaagttttccaaagttttccgagtgtgatggtagcggggagagcaaacccaccagcttgactcacggcttcatctcaccaccccttgagcagcccctaagcccgctataaaggaacaaacaaacaaacaaacaaacaaagttgcaccccagtcgcctcgtgtttcctctcttcttttaggcaatttttttcctccctctctccgctcccctcgcagcctccactccctttcccttggccccttcctccttctctgtttcggctggaggtgccaggacccccggccgcagcctcccctcccccgccgctccggtcccctcccgtcgggccctcccctcccccgccgcggccggcacagccaatcccccgagcggccgccaacatgctctttgagggcttggatctggtgtcggcgctggccaccctcgccgcgtgcctggtgtccgtgacgctgctgctggccgtgtcgcagcagctgtggcagctgcgctgggccgccactcgcgacaagagctgcaagctgcccatccccaagggatccatgggcttcccgctcatcggagagaccggccactggctgct

SEQ ID NO: 23692 - DNA, 2300 bp, Homo sapien
ttgtttaatcaattttgtctaagatttgtttatttaattgattttatttttaacttggtctttggtttatttaatcaaatcttccatatcttttttaatttcattaggttctgtttttaatttaattaattttattctctcatttacttatggttcattggctttcccccatagtttcatcagttcagtgcttagtttgtttattttcaatcttttgtgttttgtgatgtttacataaagaaatacaaatttattttgaaaatggttttagccacataccatagtttttgatatgaagtattttatagttgttcatttttaaaagtgtcaattttgttttcttctttaaccaaagagttatttagaagtgcatttttaaattcccaagtgttaaaaatatagatcatggttattgaacttgctgtactcagctgttccctggctgaacctggtgttaccttgtaccagggaagtgttgaattatttctagggaaagaatttaccaggtaaagaatttgccagataaagcgctaaacaattaaataaataaaaatttaattgcatttttactaataacatgtttttcctcctttgtcttttatttactttagtcttactgttctgatccaaaccttgtgttagatttgaagaacctcattgtgctttttgctgacacacttcaggtatgtgatttctgtttacatatgctcatctagattggtattataatcagctctaaacctttttcttgactgggtctggtggcttttgcctgtaatcatagttctttggaagcctgaggtaggagaattgcttgagtccaagagtccaagactagcctcagaaatatagtgagactccatctatacaaaaaataaaaacataaaaaatcaccagtagcagtaccacattcctgtagtcccaggcactctgggggcagaggtgagaggattgcctgaacataggagtccaagcctgtggcaagctatgatctcgccactgcactcctgcatgggtgatagagacccatctcaaaaaaaaaaaaaaaaatctgactgggtgcagtacctcacgcctgttatttcagcactttgggaggctgaggcaggcggatcacttgaggtcaggagtttgagaccagcctggccaacatggtgaaaccctgtctttagtaaaaatgcaaaaattagccggatgtggtggtaagtgcctgtaatcccagctacttgggaggctgaggcaggagaatttcttgaacctgggaggtggaggttgcagtgagctgagatagtgccattgccctccagcctgggcgacagggtgaaactctgtcttaaaaaaaaaaaaaaaaaatctacataagcttggataagttacctgttagttttaagttgggtttattattttcctaggaactaggtctttttatctcttttatagcatttcctgaactttaccctgagccattatgttttcatatgtagtttccacctcctttttttctctcacatcaaatcaattaattgaactactgactacattagtttttcaaaatgttcttaattcatatatggcagctgagttagtttgcagtttctttaactaccatcttgaataatggtggttgatttgaaccacatattatatctaatagaatagcattagaagtggatgagattcgaagcatttttactttctctcccttctgtgaacgcttactataggtagtaggacttataggaagggatgtagggaggacttatcccatagtataccctttatatatagattttaattttcatctttttctcactggcttaaacattttgctaggtattatttaatttttgagagataaatgctagatattaggtgtgaatgaaagattctactaaatggttttatttaatttgctgttcaaagaatgtaatgtttttcagtatcttatccctctcattttgccaaaaaaaaaaaaaaccgaaaaaaaaactccttccttagacactgaagtgattttcttattttgtttcaggtgtatggtttccctgtaaatcagctttttgacatgctgttagaaatcagagaccaatatagtgaaactctgctaaagaagtgggcaggtattttcaggtgagaaattatctatagtcatatgtgtgtgtgttcatgtacattagtgtacacacatgtatttatgcgcaaaggttttcagatgttataggcaacaagtatatgttacttatattttgtagctactctaggttatgatccagaattcaaataaactgttagaacgtcca

SEQ ID NO: 23693 - DNA, 2300 bp, Homo sapien
aacatccagtagaaaagttgacataatttaaacccaagagaatgccactggaccaatatgtagtggagtactgaaaatatttaactgcctattcctaatcttttcatattaaatttagatctttttcaactattgtctaaatgtttgttttttatgagtttaaattgtcttctctccacagaatcaagtgacggatactaatagaaaactacaacatgagggaaaggaagtaagaccagtttaccttttgaagaaatcttttctgtttcatgccactctcttttaatgactatgttattcatttagtggttaagactgtaagtagtatgttggaagtacttggacattattgttgcttttcctaatgtttatctgaattaaatgaacatagtcactgggaagtctaaggagacaggatacaggcttcttagttgtgcttttaaatcatcgacttgtcataatacagtaatgctcttcctctgcctgatatgttatttcctcaatattcaccttcttcaaatctttgctcaaatgttgccttcttaatgaggcctttcctaaccaccttatttgaaattgtagtctcactctcacccgtgcattcttttgatcctttcccactttttcttcattgtgcctgtcatgctctgatattatatttaacatattttttacttatatttttttttgtatgtcattctccattggaaattaaactccatgagattaggaatttttgtttgctttattcattgctgtatcccctccatctacctaaatagtgactggcacagtgtggatgctcaacaaatatttatttaaaagattaatcaaccaggcacagtggctgagattatacgctctaatcccagtgctttgggaggatgaggtgggaggatcacttgaggccaggagtttgagaccagcttgggcaacatagtgagaccccatctctacctgccccccaaaacaaaaaaaacaaccataaccaggcgtggaggtgcatgtctatagtcccagctacttgggagactgaggtgggaggatctcttaagcccaggagtttgaggttgcattgaggcatgattgcgccactgcactctcagcctgggtgacaaagggagaccccatctctatccccccaccataaaaaaaatcattgattctattgattgacatatttaccatttaaaccatcacagtttacaatatttttatatctatttgctcatttgatcctcatggccgacaaaatcaggacaggtattatcactgttttattgatgaggaaactaaaacaaatgatttgctgtattttacatagttattggcaaggctgggactaaaacccaggttttctgacttgtagtacatgactgttctctgttatcatgcttctttcttatcacctaatacttttttgatgtttaattttaataacctttaagattagcttttgattgttttatcagtgacttaggaccattctcttgttcttttctgcatggtatctaagcagataataacatttttaggtatgggtataggatgaatgctgcaagtagatgtgtagattattactttttgaagaagtttgtctcacattctaaattctgtggagtacaatttcttctagttatattatggtatgacttctgatagaagcccttaaaactggggctaggggaataaaagtgaattacttttcaacaaactgtaacttttagaaaggccacatcttttaagtgtgtgggtttatttgttgaaatagagatttagttgaagatagtttttttctcctggataacccttgtattttaggacttcattttacctagcccttcctagtattgtatgtatcttggggagaaagcgggaaactgtgcaggaatgttttactggttaggaaaggcagttccttagttcacttggcaggtcttactatgaaactgtctgggattttctgatgaattgaacacagtgtggaaaaatgtgactgaaagctttttatttacagccataggcataattcagtctttttccctcttgccaagctggtaatagcaatggaagagctgaagcagtgtcgactacaacagagaaatatttctgccactgttgataaattaatgctgtgtcttccaggtgaggaactggaaatggagaaggattcttggtgtaattttttttttgctttaattaggctttctctaaatcatgtttgtgtattcttttctttcttttaagtcctagagatgtacagcaaactgagggaccagatgaaaactaaaaggtaagat

SEQ ID NO: 23694 - DNA, 2300 bp, Homo sapien
ttggcaaatcaggacttgtaacccattccccttactactggtttgtttatttttaaaatgcattcttaggtcatgactactatttttattaaaaaagcagtgcatgcacaaggaaaataattccaagagtgcaaatgataattacaaattaccttcttactacttcaaactccttctttccaattttttttttcctggatgccattactgttaacagttttttgggcattttttcagacagattctatctatgtaatattatatatatgtatatgtgtgtgtgtatatatatcaaagcgtatatatgaatatttattcttttaaaaaacaaatgaggacagagtctacatattgtttcatgccttgcatttttccactcaacaactacaacttggagacagtttcatgtatgaccatagagtcttttgtctttctttttaatgattgcataatagtctatagtatggttgtagcacaaattatttagcctaaacttccagtttggttcttctctcatgcctttttttttttgtcagtggaaactctcttctactagtcactctggtactaaaccttggagtaatatctaacctttttggtatctagtaaatcctgtcaattctctctttttgatgtttttcctacttgttcattctttttcattctcattgctgcttccctggtttaggccttctcatctcctacagtgttgccttatctccaaattctctgtctctgcacatcttgcacacttgcccttcaccaaatttcctaacgcccacattttgattgtgtcactcctcttaaaaacctgcacctctaatcccagcactttgggaggccgaggcgggcggatcatgaggtcaggagatcgagaccattctggctaacacagtgaaaccccgtctctactaaaaatacgaaacattagctgggcgtggtagtcccagggcgtgggcccgtagtcccagctacttgggaggctgaagtaggagaatggcgtgaacccgggaggtggagctcacggtgaactgagatcccgccactgcactccagcctgggcgacagagcgagactcagtctaaaaaaaaaaaaaaaaaaaattagccgggcgtggcggcgggcgcctgtagtctcagctactcaggaggctgaggcaggagactggcatgcacccgggaggcggagcttgcagtgagccgagatcgccccactgcactccagcctgggcgacagagcaagacactgtctcaaaaacaaacaaacaaacaaacccccaaaaaaccttcagtgccttcccattcattgtgttacgtaaaaactcaagcaatgattaataaatccgatttttaaattgtaactgatgagttcatgaaatgcagatgcctggatcagaatctccagatgtatgactgtcagtcagtctgtattaaaaaaaaatgtttccaggtgcttctgttgcagttggttgttggatcagtggaaccattagaacaaagtacacatttatcagcccagtatttaaggctcctcgtaatttctctccagcgaacctttccagacccatcccttactactacgtctttacacgtcagtgcaaatgaaattctttttggctgtctggattctcctcacaccttccagttatgccttttaacctccgaaacccagtgtctttatgaagccttggcaaccagaagagatctctgaactccattatcggaactggcttacagctcacagttttgaattctccagctccccgtgtctcccccactagactgtaaggcctctgtcagacattaagttagactttattattcgcgccgacggagccttggcactttgtggcaaaggtggtaaacaagaatttgtaggtttagtgccactgcctgacttgatcatcactgtttacgcactgtcgttaactgtttttgcttacagtgggcttcaactagtatttgcggattccatgtatgaatgaatggaatccaacctagcatttcccagagaactacaaatcccagcggacattacgcagaacgccgacggacgcggtgacgcaagggggcgtgtcgagcctgagggaggggtcggcctgcgggtagccagaggctggggcggctgtggagcctgtggtgggagcggcattgtggggcagggaaaaggtgagccgagccgacggaggggacgcgctgcggggcgcccccagtctatggagcggggtaagatggcggaggcggagagcctggagacagcggcagagcacgagcggatcctgcgagagatcgagagcactg

SEQ ID NO: 23695 - DNA, 2300 bp, Homo sapien
aatgttaacattttacctttgccttattcattctaatttttttctgaaacatttgaaagtaagttgcagatatgatgcccctttactaaatacttctgtgtacttccaaaaacaagaacactctctgatataacaatagttcactggtcaaagtcaggaaatgattcaatgccaataactaacctacagaccttattcaaatttcacccattcccctacccatgtcctttatcaggcttatgtttttaacacaatttttacacatttcttacctttcaggcatttgtatctttttaaaagagttactgttggccaggtggggtggctcacacctataatccctgcactttgggaggctgagatgggagaactgcttgagtccagttcaagaccacactgggcaacacagcaagagccatctctataaaaaaacacaaaaattagcgagagcagataatcatcttcctcagaaaagaagaattttccagaccctctcctagtataggaaaaccacgttctccttaggggctgttcccaagtggttcctcctagaagcagctaggttcagaagagtctaggtctgattttttgccatcccttcattgttccctccttttcttcaaaaatctggcaaatggtagaaatttaacaaatgtcaaatgaatggatggatgggatcgtgctttcatcaacctgtcttctaaggcctggagagcagggagaagctattaaaattctttaaatagtaagctgttgggccaatgagatctttatcttcagtgtgaataggtaagtgaaaagcagggcaacttcaaatggtatacacatatacagagtcttatcagcgttaaaataccaaaagcttaaaaaacaattagccaggcgtggtggtgcgcacctgtaatcctagctactcaggagcctgaggtggaaggattgcttgagcccaagaattcaaggctgcagtaaactgtgatcacacctctgcacttcagtttgggccacagagcgagactctgtcaaaaaaaagaaaaaagaaaagaaaaaagccttcctccaagttgtttcttccttagagttggcaataatagtggaaaggcggtaactttgctgtttagccccaggggagggatcagccctgtggggaattgggctaagttatcagaggttacttactgcccttgctaaactctaaagagattcgttttttaaaaactgacacacaatatttggacatatgtatatacacaatggaataccactcggccactaagaaggaaaccatgaagagattcctttttaatatatgtagctgcatgccaacttgtctcacgttcctcctctcctagaaaaaaaaaaatgtggatttttctgaagcacctgcctggaggtacagacagatgattgcgcaaacttgaagctgaaagtggatggaattgctgccagggagactgtagcatgagcaggagcagaatcctggggaacacacttttagggacaggagtcagaaatctcagagaagcaggggttactggtgggatcacggagctgctcagggcctagtaaaagggaaaggttttaatatcatttggagccactgtggttctcccagaggaagctcctgtcatccagagagcggtgagctcccaaacaagcagagacttcaattcctaaacaggcataagcttcattcagggtgttcactggccacgaccagggacgcccagcacccagtgcagggcctgccctggaagaggtcagtagtgcaaagttagggctggaactgggaggaaattcgagcatgcgtcccagccggaggctgagcttgcgggcgaagaacacggcagcgctgggaaccgggctagggctttccgtgtgggccgcgcctgccggccctctctgttgtcccacttggcacggactgggctaccgccacggtttgacttccgccaccagcaaccaagggaaccagatcccaagggaaccagcacccctgggcgctcgcggcccgaagcctgaggttcccgccccgccccggcagggcggccccgccgacacccgtagcggtcccgccccccgcggccgcaccgcctcctgcctggtctcgggtgccagcgccgccggcggagaacaggagcatggagggcgggctggggcgtgctgtgtgcttgctgaccggggcctcccgcggcttcggccggacgctggccccgctcctggcctcgctgctgtcgcccggctccgtgcttgtccttagcgcccgcaacgacgaggcactgcgccagctggaggccgagctg

SEQ ID NO: 23696 - DNA, 2300 bp, Homo sapien
aataggagagtctggatttggggccaggttattccagaaatagagagagggagggaaaacgttaatgtggggccagagccagaacaggtaggctaggctgtatcagcctgggaggcatcgggctattctccaaaaagtgaggctccgggttgcaggagatgggacctccaggaaactggtgggaggctggacaggggcaaagtgaaaggtaagcagcctgaagatgggtgggatgtagtggactccagcgtgaagagcctccagtctctggcagagctcagcagcttgggtgggaggaaacgaagggcagggagcagaaggtggtggggggaacgggttttggttaagatgggcagctgtccagtggtgaagaggggaagtatttgtgtatacgatcagttgtgggggatggtggtagagggagcagtatgagagtctgggaggaacagggcaggggagatggcacaggagaagattggggtgggggtgggggcactgatactgaatccagtacacagaggcaggcttagagaccccctgagggtgacaaattcttctcttaacttgctgcagaggaaacgacaagagaataggtcctaagaggagtgaaaatagaggaaactggccaagggataaagataagcagagctatggaagaaaaggaagaaaattagggaattactggagaggaagctgacagaaaggggcgctgggagaggaaaaggtgagggaggacgaaaacggaactcctatcacccagcgcattccagcaccccctccccctcccccgggaagtctgcgactgcatcctcacagggatggaatgggagtggaagctaggccaggctgggaccccggggctgtcccagcccaaccaagacggtgaccagactcaagttactgatcctccgctgtttcttcatctgtaaagtggagttaatgacagacagctggatgtcaacgttttttgttgtttgttttagagatgggatctccctgtatcgcccaggctggagtgcagcggtatgatcacggctcactgcagcctcgacctcctgggctcgagagatcttcctgtctcagcctcccgagtagaaatgtcagcatttgaatgcctcacaagggaaggtggtgtaataaaaggtctattgatttagatatgaacaagtatacccagagccacacgaatgaaaggaggtggccagtgtagatgcaagtctaggacggtcggtagattccaagcttctctacctgcccagttaaacaagttcgtggcccctggccagcctctcggtgggggtctgcgacagaacgggtgggattcattaccaggctaggagcgcaaggccctcgggccgggttcagcttgctgggctcctgtcttgtctcagcccccagcacttgctctgtcaccgcagagcacaggcccaggcaacgtttacccaactgaacccgcatccctgtgggaaccttgttccaacaaaatcccgtcgttgtctccttccatatggaacgaaaatctccttctgtacctctgcccagctccgcacccccgcccccttagagatacggcctggtcgggtcctggtccccccctcggcggcgcttccacttttcccagactgagggtggggaaaaggaggagggggaagaaatcagaggaggaaaagtcgggaggtaggggagccgggagacaggagagggggaaaataaagagcctgagacacaaacgagaggaaaagaccatcacagaaagctggaaatctccggagaggccagcgagaacccgcgctccccacggattccatcattccttccgaaggcgcctctgcggtgtctcagccgtgccaggccccggggttcccaggacgcggaggagtgctgggtgcggccgcctcgcctccccacccctggccgcccctccccacctcgcccaagggggccggaacggcgtcggcgcgcgggggcttttcggagcagtcgagtggaaaatagactttaacccgctttgtggcggccggggcgccctgagcgctctccaaaccacggctcccggcgctcaggcgggccgctgccaagacccggcctggagtccccgcagagttgcgcggcgcacggaccccgtggccttggggcgtcaggaggcccaacccagatctgcgcgcccaggcagcgctcaggccgctagaatggaccccggcagcggcgaggaagcggaactctctgcggctccctctccgcagtgcgccggcaaggtccaggtcccagcctccccaccgccgcccgcgccctcctaggcc

SEQ ID NO: 23697 - DNA, 2300 bp, Homo sapien
agtctaggacggtcggtagattccaagcttctctacctgcccagttaaacaagttcgtggcccctggccagcctctcggtgggggtctgcgacagaacgggtgggattcattaccaggctaggagcgcaaggccctcgggccgggttcagcttgctgggctcctgtcttgtctcagcccccagcacttgctctgtcaccgcagagcacaggcccaggcaacgtttacccaactgaacccgcatccctgtgggaaccttgttccaacaaaatcccgtcgttgtctccttccatatggaacgaaaatctccttctgtacctctgcccagctccgcacccccgcccccttagagatacggcctggtcgggtcctggtccccccctcggcggcgcttccacttttcccagactgagggtggggaaaaggaggagggggaagaaatcagaggaggaaaagtcgggaggtaggggagccgggagacaggagagggggaaaataaagagcctgagacacaaacgagaggaaaagaccatcacagaaagctggaaatctccggagaggccagcgagaacccgcgctccccacggattccatcattccttccgaaggcgcctctgcggtgtctcagccgtgccaggccccggggttcccaggacgcggaggagtgctgggtgcggccgcctcgcctccccacccctggccgcccctccccacctcgcccaagggggccggaacggcgtcggcgcgcgggggcttttcggagcagtcgagtggaaaatagactttaacccgctttgtggcggccggggcgccctgagcgctctccaaaccacggctcccggcgctcaggcgggccgctgccaagacccggcctggagtccccgcagagttgcgcggcgcacggaccccgtggccttggggcgtcaggaggcccaacccagatctgcgcgcccaggcagcgctcaggccgctagaatggaccccggcagcggcgaggaagcggaactctctgcggctccctctccgcagtgcgccggcaaggtccaggtcccagcctccccaccgccgcccgcgccctcctaggcctcggagcggcgcctttctgcggcctcgaaggtggggtgggaaagtttggggagtcccggctctcacagcctgtcgtgagaactgcccccggggaattcgtccgccgtacggaaaaactggccggagcagagtcgtccgcggttccgcggtcgcgggtggaaggtgaaggtcgagggaggtcaggctgcttctgcgtgtcctgacggctggcgtgttctcttgagatgggctcgggctacttggccagcttcaatttaagccacagtgtctccgaggccctgacctggtccggcccgccgacacttgagcccccagagcctcagagaaggcgagggggtggatctcccagtgccgaggcccgccgtcctggtccaagccggtcgcggcaccgtgtctgggcactggagctgcttccagccccgcgaacagctggagggtggcagtgggaccgctccggcggcttctcccgcgcagtgccccgcctggccccttgtgaagggagtgagcgtcccctttccagagctgtcccccgtgacatccagaaaacgcgaaacctcaggaacaaggtcgcagcttcagaccgcggcccaggaggccgatggtgggtgagtgggagagtcccggagagcaggggggcagagagctggttttcgggaaaaccaatgtgttggaccccaaacatccaccctccgctcggatccaagttctctgagaactgaaacgacatcccgggacgaatgggagagttaggctgagctacacaccggggaggggagggttggagtttagccccaagcccttcggacgccttcttcggctcccgcgtgggttgagacggcggcacggccaccagactcagctaaagggcggagtcgcgaggagaagccagtggcgaggggaggaggaggcctggatctccccgcgaaggctccagtccggcttttgcctccgactgcgggctccctccccacccgccgtccctcgccccgccccgccccgccccccaccttggggcaggtgagcggcggccaatgggcgagcgcggggcaggtgcccgctaactcgcgcctcgcagcgctgggcggccggggctgggcagggcagtgcggggacaccgggggctggggtcggtcccagcgggactccgaaaggagggagacgagctcaaccctcgggccttactggcagctcgcagcctagcacggagcccgcgcc

SEQ ID NO: 23698 - DNA, 2300 bp, Homo sapien
tggggctggggagcagttgaggcctaagcctagacccctggacccctgagttaggcctctggtgctggctctgggctcccactaccttctcagtgaaagaaccctcagctggacactccaggccttctgggactttttccagcttcttcacccatcaactgctgtccattttctgtacattctaagtatacgctttgagtcctaagtccaggctatatcctgaccctctaaggctgcctcctccaggaagcctcccttgatattcttagaccaaatccattgctgctgcctctgtgtccccagcacatgcttttatctccatcccatccccaggcacaggctcatttgcactctaaacaggggtgactacagtagtcccctgccccaccccactgtgagccgctccaggcagctcggtatccctatgccttgtgcacagtaggtcctcagtaacagctgagttaagtgacactgaagtgcctcgtgggcaagaatcctgtcttacacttttccggctcccctgtgctatgtgttcccagcaagtgctcagaccacaccccgccccctaccattttggagctttgcaccattcctgggtgccctctggtggaccaatctcagaatcattctctgtcctctgtcttctaagctttgaggcctcagtttccccacatgtatgatgggaagattttctaagatctcctggtgccacgaggattatatcacaaaatggataggatggccctttggaggcttagaaaacctgcgtgatgctgtgtaaagaggacagcacccagggtccccacactcagccccagccccactcactaagctcacagggctgagccttgctgcaggccaggcatgttccactttgcatgtattaatgcctttaatggaagctctgcacaaccaagccttctccctccctatcctggattcagctaggtgtcctggaaggtcctggaaaaaagaactgtgggggaaaggctgtcaggcagccccgccgaggcctgccacccgggcatgtgtacatgttcttgcgtgcacgtgtatgtgtgcgagcctgtgtgcacgcgcaggtttggggtgggggtgtggggaacaggcaaaatgacaggtggcgttggcgttcctgggctctgagcggctttgccattcccatccatccctcctggggggtcctgtgggcaaactccaagaaagcagcgggcggggaggcagcagatttctgacggcaaaaatagcccactttagagttcagtagggactgattaaaccagtaaatgagaaaaaccccaaacaaacatctccaagcaaagtaggagatggatttgagactggagggaaggaggcccctgctctgggagacgctgaatgctgctgtagactcaggagggatgcaatgtgccctagacattgtctctggcctcgcatcaaccctggaagagtgggagaagcagggaccaacaaagtcaaggtgaacccagatgagccacgctctgtactaggtgttgataaagggcaccagttctctgccacagggacaccttgtgtcatggaagggagaaaggtctactgtcctaagggggaagatggaacacagaaaacacaccaccagagcctacacaggtgaggtgagacagatcttagtggggaagatcagggaggacttcctggaggaggagccatttctagaccagcttgaatgtggactcacattccagcttattcccagctcttctccattcttggttgggggtcccaatactttctcaaagaaagataagctggggggactttgcttctggtggctcacagctgtttagccaggctggttcatcaaaaccaccattttcatcagggctggtaagagggtagagatagtggaggttctggtacccactgagggtacccacatttttgcccatacagggagggtatgcctctctgtttcttaaccctgaaagctgtaagtggggaggcaggaaggagtatggggtggctgaggttggccttcctgcctcgtctaccacatgggtgtggcctgtaagagccaccctctgaggccaggacgagacaaggctcataacgggctgaggacatcgggggaaggctttagacttcctcagaacatggcttctaatccccagaaccctctagagctgaggtgagtaggggctcagctgagagggagggacatggggagttcccagggctgacatgggaggctcagggcaggaagccctggccctgggagactcttaggctgtcttttcttctagttgaggtgcttggca

SEQ ID NO: 23699 - DNA, 2300 bp, Homo sapien
gctgcagtgcagtggcgcgatctctgctcgctgcaacctccacctcctaggttcaagcgattctcctgcttcagcctcccaagtagctgggattgcactaccacacctggctaatttttatatttttagtatggacggggtttcaccatgttggccaggctggtcttgaacccctgacctcaggtgatctgcctgccttggtctcccagagtgctgggattacaggcatgagccaccacgcccggtccagcatatatcttttaagaacaaggacattcttggccaggcgcggtggctcacgcctgtaatcccagcacttcgggaggccgaggtgggcagatcatgaggtcaggagatcgagaccatcctggctaacatggtgaaaccctgtctcaactaaaaatacaaaaaaaataagccgggcgtggtgtcactggcctgtagtcacagctactcgggaggctgaggcaggagaattgctaactcgggaggcagaggttgcagtgagctgagatcgtgccactgcactccagcctgggcaacagagttagaccctgtcttaaaaaaaaaaaaaaaagaacaaggacattctcttatataaccgcagtgtagtaattatattcaggagacttaacatggatacaacacttttattaacctatggtccatattccacttttgtcacttgtctcagtaatgctcttgagagcattcccccctctacgccaggatccaatcccgagttacacagtgcatctagttgtctctttagtttctttaatgtggaacagtctcattcccactctttctttgtctttatgacattgacatatttgatgaacaaaaccaattaatttatggaatgtctgtcagtgtgggtttgtgttgttttcttgtgattagatttatttagtccctttggaatattatgtgagtgatgctgtggacttctcggggtatcacatttggaagaacacagtgtcccacctgcccttcgttgatccttttaacatatccccatcattttttgggggtaagacttcattacttcctggtgcaacaaaatgtaccagtttcatcttgtaccctccctaccccagcctttgaatccgctcctttcctaaggaaccctggtctctgttagtggaccaggatctggatgtcatttggtctttttgcttttcacttagtatctgtctagctctgtttatccccttgtttattgagttggaatcacactgcttatatgcatttcataaaattttaagcattattccatgtcataaatgtttgaaaacatagttttaaaggctgcatagtattcagtcatatgaatggaccatcatttatttaaccatccacctttgtaaagaatgcagcagtgaatatccttggtatgtacacctgaccagatctttgaacatcttggattgtttccttagactacattctcagaggtgaaattttgccaggacagcattgtgagcctcccttatgtatgtctttaatgggaaaatggtctgggctgtgtggattataagaggttagagaggcagctgtttctgttaggaatggaccaaagcttgatctggtttgtgagagacagcacctgggtaggggtggcattaggggttagaggttgcttcatgcaggggtgccatggtgggagagaaatggaggtgggatgagaactggtgtgtggggggactttgaggtgacctggagcctattgcagggtccttattgggaagggaaaggaacaggaattggctgcagggtctggtgtcctactaaataaggggagggaatgtggaggcttctgtttcctccactgtgcaaaggatggtgcttggagagttgtggggctccagggaggaatttggggcagagcccggagtgtagtgaggcatgaaccccagcgattgcagcttccccttcatccccgagcttggcaccctctgtcttccccttgagctcagctttgcccagctggcttagtccccagggcagaaggcccagcagccgggttgcttggtttcctttcattgtgctccaatgcctgtggctgcgcttagcataaagccctccttttccacggcccctgctctggggcaaggttgggggagctgccccttgtcctgcacttcagcagctacagggctgtgggtgaaggagggcctgaggattgtgagctcagtgcttttaggcttgagctgcccttggggatcccccctggaggcagagctggaccttggggagggaccctgtggcgggtaggcaggatgctttgtcactcaagg

SEQ ID NO: 23700 - DNA, 2300 bp, Homo sapien
tgtactgcaggtggctctgttgtgttcctgttttggaatgaacagttacaggaggctgctgtgggagaaagcaccttaaatcaaggtgatgggattcttggatgacactgtccctgccccttataagggggcagcagcacagtgttgcccagcagcctgaacttagtcttttctgactcccagggtacccacatttattgcgcacctaagatgggcccatttattggtaatacagagggtaagaaatggattcctattctcaagttgcatggtctagcaggggaagataagatacaaatccaagatacaaatagttcttcatggctagatagaatctctaagataagatacaaatccaagatacaaattgttcttcgtggctagctagaatctccccctagctttatgaaaagtgtttcttgtggttcaactactagaggatgaaaaactttgactgctacagctcatgtagtgtccagaaacactggcagacatgagccaaccctgcactccaccacgagactaatgagacccaaagtggagttccctagaagaccaaatatttctactgtcatcttgggcaaaacaggcagctcccgaagtctggctcactgaccaggtaattcagctgggaatcttcagctaatccattctacaactgtatgtgtttattatccatactgatccttactccacaatctgtaatactcccccttacctaacaccctccccacccaccctagtcccaagttctcctcctgcccaggaattaggcccaggagggatcttccttggttggccagacaaggtgaaagctgccagggctcttaatcccccactgatgaactcacagccaacacttatttgagtctctactgtgagcccttttatgtctggctctgaaaactgaagtgaatcaaaaagtcatagcccctgccctgtgaactttacagtaagaaagactgtccagaacagtaagtagttgtgagtgcaaaagagaagtgctgggtgccacggagcctctgtgggattttgtgcaagcagagtgatggactgggaaatgcaatgtttaggctaaagccagaaagccagcatcaggcgaagatttagtcttccgggtacagaatgttcaggggtcgggaggcgggcaggcccagcatgctccaggaactgagtgtcagggcagccggagagcacaggacgagtgggcagggtggcgacggaggaaagtacgagaaggtccgcagtgcaactccttggagaaagccttccgaggttaaccctactccgcctggagtctttgcccatctggtcccaggttcccccttgaatgggacccttctgcgctgcctggccccaggagcgacgcccacggcagcaactctaacttctgggggcaactaagcagcgaggggtggcccgtggtcgtcgtacaggaacacctttcctggactgccgaccttgcaccttgcaacgcggacagcgggcaccgagacctctccggacggccgcaactctccgcagtctacggttgtaagcgccgcgacgcgaaaaactacactccccacaacgccttgcgcctcccgctcgctgcggttgattagggccaatcgggagaggcagctgtggcgggggccgaggagggacattttaaaagggccggagattgcgggcgtcagtggccatggcggatacagcgactacagcatcggcggcggcggctagtgccgctagcgcctcgagcgatgcacctcctttccaactgggcaaaccccgcttccagcaggtgaggaccgggctgtggtctgcgggccggcgggtggcaaagagaggacgagcaaactcccctccaaagtccccttccgcccaagggtctcccacccgcggccagcggagcctgcagctagcgccagggggggaacctcggtcacagtcacccttttcccattggtcaacggggcgggcgcggactcccatcttggcttcctattggcccttggcgccgtcactccccgactgcccgcgccctctagcctttcccgcccgcggcgccctgtgattggccaccggcggctgcggtcaaggtcccgagcgcccggcttcgagcggctgctcagggtcgctccgggttgtgcagctgcccgcccgggacgcaaagttctagtctggccctggatgggaagttggcgtggccgggatgccttctaactttttcccccggtggggactgacgttcctttcgagctgctggcggtgccgccgggcagcgtcgcgccccgcggtcactccccagccctggc

SEQ ID NO: 23701 - DNA, 2300 bp, Homo sapien
acttcttcaggagagggcctgtgggcttgcttttggaaggcctcaggcagacacgtgccctctgggtgatgtctgtctgctgccaggatggagcagaggagcgccacacatggaggaaagcccctgtaacgttacctaccttaaactccactcatcaaatctgagaaaagtatccactggtccccagggtttcagtcatgcttttgggggtcattgggtattagagaagtaagtatcttttctgagagagggggagtcaccccccctactggggattcctctgggctttattcactcccagccctggccctgacctttgtgggcctccctaatgcccagggcatggatggcttcagaggagtttttgaatcgaagcccagggtccttgttgatgtttcttctcctagccacacttggaggaaagttgcaggtgggttgggcagggagcaggcatggttctgctttgctgtttgtcttcctagttaaggctctttataaagagcttgttcttcatgttttaagcactttatgaagaataaaacattcatgtactgcaggtggctctgttgtgttcctgttttggaatgaacagttacaggaggctgctgtgggagaaagcaccttaaatcaaggtgatgggattcttggatgacactgtccctgccccttataagggggcagcagcacagtgttgcccagcagcctgaacttagtcttttctgactcccagggtacccacatttattgcgcacctaagatgggcccatttattggtaatacagagggtaagaaatggattcctattctcaagttgcatggtctagcaggggaagataagatacaaatccaagatacaaatagttcttcatggctagatagaatctctaagataagatacaaatccaagatacaaattgttcttcgtggctagctagaatctccccctagctttatgaaaagtgtttcttgtggttcaactactagaggatgaaaaactttgactgctacagctcatgtagtgtccagaaacactggcagacatgagccaaccctgcactccaccacgagactaatgagacccaaagtggagttccctagaagaccaaatatttctactgtcatcttgggcaaaacaggcagctcccgaagtctggctcactgaccaggtaattcagctgggaatcttcagctaatccattctacaactgtatgtgtttattatccatactgatccttactccacaatctgtaatactcccccttacctaacaccctccccacccaccctagtcccaagttctcctcctgcccaggaattaggcccaggagggatcttccttggttggccagacaaggtgaaagctgccagggctcttaatcccccactgatgaactcacagccaacacttatttgagtctctactgtgagcccttttatgtctggctctgaaaactgaagtgaatcaaaaagtcatagcccctgccctgtgaactttacagtaagaaagactgtccagaacagtaagtagttgtgagtgcaaaagagaagtgctgggtgccacggagcctctgtgggattttgtgcaagcagagtgatggactgggaaatgcaatgtttaggctaaagccagaaagccagcatcaggcgaagatttagtcttccgggtacagaatgttcaggggtcgggaggcgggcaggcccagcatgctccaggaactgagtgtcagggcagccggagagcacaggacgagtgggcagggtggcgacggaggaaagtacgagaaggtccgcagtgcaactccttggagaaagccttccgaggttaaccctactccgcctggagtctttgcccatctggtcccaggttcccccttgaatgggacccttctgcgctgcctggccccaggagcgacgcccacggcagcaactctaacttctgggggcaactaagcagcgaggggtggcccgtggtcgtcgtacaggaacacctttcctggactgccgaccttgcaccttgcaacgcggacagcgggcaccgagacctctccggacggccgcaactctccgcagtctacggttgtaagcgccgcgacgcgaaaaactacactccccacaacgccttgcgcctcccgctcgctgcggttgattagggccaatcgggagaggcagctgtggcgggggccgaggagggacattttaaaagggccggagattgcgggcgtcagtggccatggcggatacagcgactacagcatcggcggcggcggctagtgccgctagcgcctcgagcgatgcacct

SEQ ID NO: 23702 - DNA, 2300 bp, Homo sapien
aagttgcagtgagccaagatcgcgccactgcactccagcctgggcaagagactctatctcaaaaaaaaaaaaaaaaaaagggatgtaaggcgctttcagattagttttcccagatgtaaattccttgttgagtagaaccttagaagcttcagcatgggatagaggaaagaacacttggttaggtttggatcggatcctgcctatcagatgagatgatttctctctggggttggagtgagcattaaaatagctttgcctggcatatttctccttgggaggcacttgataatgttacatgttggggtcttccctctgtaccctggcccaagtaggtaaatccagcctatgtgtgtgttatggcccctggtcccgaagcagggggtggggcgtgggactcaggggcctttccagtcttggcattaaccaggaggctcacggttttgtctccctccacagcctggacgtgtctcctcaggtagaatctgacccagctgctcttcctcaccacctcccctgctccccctgggctccggcccctcccactcctgctcccactgctgctcccatgctaagcactaacctttttgcagccgcctcccccgctgctgccactgctgccgctgccgccaccaccgccgcccctgaagccaccccacctggattattgggtcttaccaacccgttcctcacctctttgcagagcaaccccttcttcgaggagctcatagccgacatagcactaaactctccttcacctgctccctctctccccagtgcctcgagggccagccccacccccctggcctcccctgggaaagccctgcctgagtgggacaacaccttcaacgtctttgctgccagcaggctgcgtccagaggccaggagcgagatcctggcccctgcaggagtggggctggaggcggcagggctgcaagacccaggccctggggccatgactgcgaaggcagctgagccccagggagagcctgggggaggaggaggaggaggaggaggaggaggaggaagaggtgggagcagcgtgtggctggagcccagggttcctctggacttgggaccgaaccaccagagcgcgagcgcggctgacccagggctcctcgggtcggtaggggctggcctgccctcctcgtcagcccagctacagctgagagcctcaggctcagaaccagacagggaactgccagccccggaagtggaagcagggcagagtccggcagacagtgggacatctctatttagctccccagaagtgatcagtgtgtgggagaggctgccgggcccagagagcgctgctgagggccaggacgatgagtcctcccgaggcgaaaatcagctttgccctgacgtcgagacagctgatgatgcctggccttgggatgtggtcaccatttctcctgcagctgagacagcctcactagtctttcggggagagtctgatgagcctgctccccaggtgcagcctgaatcaccagaaactgtgagccccaaggggagcgaggggcttcccccaccggagcccgagcctaaacccgagtgggtgtctgacaaggggctgcagcccagcaccccacctcccaagccaccgcgcctcttcacaccctcaagatcccaggaggaggaggaggagaaggccgcagtggggctgagtaacagggggccggagacagagggagaagatgcctccccaagtgcactggttgtcggtcccccggagaccaaggaggagggagagaagcgtgagtcggaggagtctgacagctgctcctctgcaaccctgctgggccagcctggcctggaagagctagtggaggatgccagcccccctgtgtctgggccctgcctgtctgcacccgccagctgccctgagggtcctgcccccataccctgtcactcaaagagcttggctcttcagagtcagcacatctgggggactccagaggttggagaaggccctgaggctcctgaggcccagggccaggatccagtaggagaggggcttgggtccttgtcagccacctcccagcaggctgatgtgtgggtctccaaggaagatgccttgaaccccttcttgtttcaggggagccgagatcctcccagcctctcatctgcatccccgccagggtcgagggaatcttctattcattctggtccagaagagctgcccactcccccagagcctgactttccaccgccccctctcccgccttgggccagccaccaccgtggggggcccagccctccatgctctcccctgtctgaagcctggcccctgactacctcct

SEQ ID NO: 23703 - DNA, 2300 bp, Homo sapien
tgggctcttctatagggatgtagaagagtcagaggtgccccaggaagcctttttaaaaaaacttcaacattaaaaaataatcaaaatactaccaccactaccaccaagcttttgctgtgacttaattctggatctttggatgtatagggacttttcatacaaaggctccccacaccccactctgtgtccaccagaagctcagggagctggcattgttgggggcagagctcaggcgggaggtggatcctgcatcactgactgcggcttgggtagctctgtgtgcgtgtgtgtgtgtgtgtatgtgtgtgtgtgctgtgcagtcaccaagggactttgagccctttagtgaccagcctgaccactaccaccgggctttattccaccttcatgctcgattggctgggtctggaattccaggctagtggaaggcttttccctcagaaatgtgaagacattccttcatgtggtgcccagtgttgctaaggaagactccagtgctgttcgaatcctttcatgcctggtgttctaagcctcatagtcatatctgttggcatgtgtctgtcttagttcattgcgctgcatacttgtaggactgttctagcattcatgttcttcagttcagaaaaacattcttgtatgatttccttcatagtttcttcctttttgtgttccctgctctcttttttttagttaataaagtctatttttcagagcagttttaagtttacagaaaaacgagtgaaaagtatagagagttcccatctactccacccacgcccccaccgccatttcttctgttaacatcttgcattagtgtggcatgtttgttgtatttgagagccaatatcaacacgtcattgttaactagagtctatacattatgttagggttcacttgctgttttgtgcattctgtgggtgtataacaatgcatgtccaccattacggtagcatgcaggatagtttttctctcctgagaagtccctgtgctctgcctattcatcgctctgtcctctcttcaatcccccagcaaccactgatcttttcactgtctccatagttttgccttttgcagaatgtcaaatagttttgtcgtgcaagcatgaagccttttcagattgtcttctttcacttatgtatgtaagatccatccgtgtctgttcatggcttgatagcctatttatttttatcattaagtagtattccattgtctggatgtaccacagtttgcttatcttttcacctactggaggacaccttggcagcttccaagttttggcaatcatgaacagagctgctataaacatttgtgtgcagggtgtttctttggacataagtctttacctcagtaggcaaagtaccaagaagtgtgattgctccttgtgtgatcggagtttgcttagttctctaagaaactgccaacccctgcataagaacatctctccccagtagggcgggccccagccaccctgtgtggtggccatgtgtgttgggggctgtctctgtgtctctctgggcacagtgggtgtgcaccgggaagaacttaagctttggagggctggacacctggctctgagtctccacggatgggttcctttaccactgagcctcaccctcctgatctgtacaatggggtagtacctcttacctcatatgctttttgggaggtatgtgcgggagtgaggtaagaaccctcatgctggtcgtaatgcaccatagatgctcaacagatatgagcgctcttcgtctttcctgggtctctttctgccattcttgtctgttcctgcatcttgtagaggtattcctgacagggcttggggtgagtcagtgtgtgagtgaggtgtgtgtgtgtgtgtgtgtgtgtgtgtgtgtgtatacatacatgagtgtatgcactagcattcctgtgttcctggccctgggcctctgggtgagctgttctttcctgggctcacggtggctgggagcagagctttggctgggactggccagaggagatgatgtcaacagggagaaatgtgggtaggtctgtctgtgctggggcctggagatgggagggctctcccaggcccagcctcacccctctgggcctcagagtttcagatgtaggggagatggggcagaggagaggtctctgagcaccaggagaaggtcctggggtgggaggaggcatggtgtggtaaccgccgccctacctggtggcacccgaggagcttccccactcaggatgtggttttctccatcatggaaatgttttggatagtttctcagctgcatctgaagcctggaagcccaggccga

SEQ ID NO: 23704 - DNA, 2300 bp, Homo sapien
ggtgctatcgtcagggttgctggaccatggggctggtgcctaggacttccccactccagtcttctgatggaagagttaaggtgggaggctgtgaggactgggcctgtgctgggtgtgctatcatgggtctcctctgcctactctactggtttcctaggttcatattcccagtagaggacatggcctggaaggtggacagttgaggggtactgtggagtctccctaagaagaaatacatgtttctcctgttgggtatcctatagagcactggttccccacctttttgacaccagggaccaaaatgtaagtttccacagactgagggtggcagggatggtttcaggatgattcaagtgcattacatttactgtgcactttatttctcttatcattacattgtaatatataatgaagcaattatatgactcaccataatgtagaatcagtgggagccctgaccttgttttcctgcaaccagatggtcccatctggggatgggagacagtgacagatcatcaggcattagattctcataaggagtatgcaacctagatccctcgcatgcacagttcacaatagggtttgtgctcctaggagaatttaatgccacagctgatctgacaggaggtggagctcaggcggtaatgcgataggaagcggctgtaaatacagatgaagtttcaccagctagcccctaccaccactcacctcctactgtgcagcccagttcctaacaggacatggagggttaccagtctgtggcccaagggttggggacccctgctatagaggaactaaaaataatagcataactacacaagattgagggatggaagtgggtgtgagccagctaaatcattatctatcataggaggaaggcaacagacagtggccagtcctgataaatgcagatgtagctatgtgagcatcttaatgtagtgatgtggaggtaaccatcagacctgaaaacaccagtggctttaagcagcatccctggattgaaggatggagagggagttcttgcttttcattgcaagccattctgtcctatttgatttttttaaaaaagctgtgtgtattatttttaaattattattttaaaagtacaggctctgaaagttaaaaaaaaaaaaaacgctctgggggcatctagtggattcacaaccctcccccatctgagctgacattttatcttctggaaaatagggataaaagccatactcaccccacagagttgctctgaggataaaatgaggtaatgcatataaaagcgcactgaccagagttggctgaaattcagcatctataattactaaacatcgttattatcaataataaaccaagtatacgttaatacttaggccctggcacacagtaggcacttaataatgggtggaagtagttatttaaccccccaccagggcctgtaatttcccccaacccgtgacacactggccccaaggctccgagtgaacacttaaatattgatgtggttactcatttattcatcactcggctctccgccgcagagtctgaggagggtgagccccgctctcgggcctcccgcgccgccgcatggccgcatcccggccccctgcgccgggagagattggaggcggcggcagctcacccgcttccaggtcgccgatgcgggaccgtcacgtggcggggcggcaatcgctccagtttcactccggcattttcccccgcaggggcggactggaggaggggagagcgcggcccggggtcaggggagcggcgggggtccccatcaccccaagtccgcgccaagaggctggccatcccaggaactgcgggccgggacccttttacggagagggctttccggagcagggacttttagaaggaagacgtgggattggcctggaggcgcagagcgggtttttcgtacctggccgcgggtgtagggctccccacaagcgaggccgggttgcttcgggcgcccccagccaggggcggggccaccgcgggaactccgcccaccctctgcagaggccgcgcaccgccccttcccgctccgggctggtctgcggctgccggggcgcgagctgcgtgcccgcatccctgtcgcaccgcctcgccggttggggcggcgggcgcggggcggggcagggggcggggcgctgacgtcgcggcgcggcccgcggccagcggcccggtgaggcggggaggcggcggccggtcggcccggcccagcccagcccgcagctgcggcggcgctcagagttggttcctgaccgccttctgccgcggccgggtttgtcaccaggtcctggggt

SEQ ID NO: 23705 - DNA, 2300 bp, Homo sapien
aaagacaaggactcgctctgtcacccagactggagtgcagtggtgcaatcatagctcacggcagcctcaacctcctgggctctagtgatcctcccaccttagcctcctaagcagctgggactacaggcgcgtgacaccacgcctggctaatttttaacattttttgtagagacaacgtccacttgttgcccaggctggtcttgaattccaggcttcaagtggttctcctgccttggcctcccaaagccccatctttttatagaataatttgtgtatgccaaggctggcattttgtcataaactctgctgtgttttcacaggacagttataatttccccctttcatgactctgactcatggctcctttttcttctcaagaatgtgctcgatttctctgaaagaagcctgctgccaggatttgcagagctgatttctgtagcacagaccattcagattctagaatggctcttggggactgagctgagggatggaaggaagcctgccctgccacctggtggtgagtgagggcacggcccccagctgctctcgggtaggtttgcccccaagtacgtggactattcgctccctgacaccgggctgcaggcttgaggggacccagggtcggtttcaagagcctcttctctggccctgccaactatctatctcccccaagtccgtggactattcgctccttgacaccaggttgcaagcttgaggagaggcagggtcagtttcaagaacctttctctgtccctgccaactatctatctatctataattatttgatagataattgtggcttgatcacggctcattgcagtctagacctccccaggttcaggtgatcctcccacgcatcaccacgcccggcaaatttttctattttttggagagacaaggtctcactacgttgcccagtctgttcttgagcccgggagctggaggctgccgtgagccgagatcgccccatgccagtatgggcgacaaagcgagaccctgtctcaaacaaaactcacaaaatcaggggacaaggaaacaaaacaaggcttgatagtcaggcctagctgtggggacaaatgccataggtctgtggtttgcagcttcttggggtcctgagagaacaggcccctcccccttttcacgacagtgtgtgcatatgcacactcacttctgtatccagtttcagaggttctcagatctgaggtcccctatggactcctccgctacccccggttgcaaggtccctaagccattgaagaatctgacagaggcacaagtccaccctgacctttggcaggactgttctgctgccagagggattaccgagaaaggaaatcttgtcctggactcttcaagtggggtgagtgagctccggggtataagctagtccttcccttcaggctgagagctagacaggataggagtaagttggccttctgctgtcccactctagggctgggtccaaagagcgctttactcagtgaagacaggccactgtgtggacagagacaacatacatagaaacatgcatcggaggccgggcgaggtggctcacgcctgtaatcccaacactttaggaggtcgaggcgggcggatcacttgaggtcaggagttcgagaccagcctggccaacatggtgaaacccctaaaaatacaaaaattagctgggcttagtggcgcacgcctgtacgcccagctactcgggaggctgaggcaggagaatgaatcacttgaacctgggaggcagaggttgcactgagccgagatcgcgccactgcacaccagcctgggcgacagagtgagactatctcaaaaaaaaaaaaccacaacaaaacatgcaacggactcaaagatacacacatcaaaactgtacgcgcacacagactctgatacagaggtacagacacaaaaaggcaccgatgtaaaagcacaaaggcaggcccagttacactcccgtcaacaaaccacggaacctaaattcagacttggtggagcccaaaacctcgcagcctcaggggcactctcgccgggggcgggaccagaagggggtgtggcctctcaggtcgaggcggggttaagggtcataaggcggaggcgcgcccaagatggcggcctccatgtgcgacgtgttctccttctgcgtgggcgtggcgggccgcgcgcgggtctccgtggaagtccgtttcgtgagcagcgccaaggtgaggtcggggcgggtcctgccgggagcctctccccagtccggccatggagacagcccggccggactccatgcccggagcccagaggcttctgtgccg

SEQ ID NO: 23706 - DNA, 2300 bp, Homo sapien
atacaaaaaaattagccgggcgtggtggtgggcgcctgtagtcccagctacttgggaggctgaggcaggagaatggcgtgaacccgggaggcggagcttgcagtgagccgagatcgggccactgcactgcaacctgggcgacagagcaagactccgtctcaaaaaaaaaaaaaagaaaaaaagaaaactgctgtcacaagtctgttagtctatcaacaaactaccaagtcactactgtgtaccaaggatggcattaaggctttagctgtctttgtttactgcccaaatcacagccatcagttagagctcccatggcttggcactgggctatacagtcctgggagtggggactccctctcggatacaaatacacccccagaaagccttcctggactagcgtcaaactcactccctcctccccaacccttgcttgcctttgtgtgtgcttatttgtgtaagttgtgggtatacgtatgtgctcacttatgtgcatagatgtatacatttatgtgcttgtgtaggtgtaaacggtttgtgcgtgtgtgcccacgtgtaggaatgtgtgctcctgtgtacatgtgaatgctcacatacatatctccagcctgtagtatccttccttagctgtcccttctggtcgcaccctaagtcacctgggtcggcgctagtgggcggggaggggcgagtggggagatctgctttgtcgtgggaaggtgaggagtcagagcttcagcctcaggctgcgcccactttatgtccttggaccaccacccacttattccggccgcccgctcccagacctgtcctgctctgaactcgcagggtccccaaggtgacccttggcccccaacccgagacgcgcgcaagctggacggccagccccgccctgcaacgcagtcccacccgttgccgctcaccgtgggccgcgacgcacgcggggagccagagcacgagacaacaccagcccgcggcgccggggaccatctccagggccgggcccggcccggcgccgcgtttcctctcgccgccccgccgcgcgtcgctcgcaggacttcagcctgacagctgctccggcctcccgcccacatacccgctctcgccgcgggctggacgacgggaacgaggctcaaggctgattggctctgacgcctgctcatgtagccacactttccgcctctgcgccttagcctacttcctattggtcgagagaagtggagccgggggctgattggcttaaactcttaacagctacaaccggccttcgcctcagccccgccccagcatactctccgggtcctcgctggcggtgggcgggccagggaggacaagcactggaggtgtgcccgtagccggacttgcttcagctgtcgatagtcgaggccgttaacccttgcggtctcggtcctgtccactccaaggccgcctcgattgacgacgattagccttctcccagctgcgcttccctcctcccagctgcgcttccctcctccccacgccttcacgggaaggcactcgtcttgcgccagggggtcttccgcccagtgccaccaacgcttgcgcgctcaccgtggataggcgctggggccgcggcctggcgcacgccatccacgaggagcctctggccagtgcaaagccagaaaacgggcattgggggcagcttcccacgctcgtcccgttgacactgactatgtaactgtgacactggacaccttgacctctcagcctcctttctgtcatcagtaaaatggccttaataggaccaacgcaatagggttgtgaggattaaatgagatcgctcacgtaaagtgctttggcaccagcctatcccacactttgcgtcccacacttttgcctttattgcattccttggtctggcgtccggggatggaggagggtggaattaagttagtaggtgatgcgggccgagcaaagaccctccgtgctctaagaagcacgaccgaaatgcggcgacccctctttaatgaacgcccctcactagagagtccccgaagcccagcctcaggtccttctagccgcaccgagtcggtggtaacgaaccatagagtagcggaagtggtccgttctcttcctctcccggcccaagcttctgggtatttctattgcgcgaggcattgtgggttgctgggcggcccggtctcggagaagaggggagagtggcgggccgctgaataagcttccaaaatgatggtgagtggcgtctcgcgcatccgtcgccatcagctgccatctggccggtggccggcgccgctcggcctgggcttgctctgtaggaccctctt

SEQ ID NO: 23707 - DNA, 2300 bp, Homo sapien
tcagggtcaaacaccacctcggaagctggccctactcaataacaacccaggagataccatcgaggcttgggacccacggaaagtatctaaagctccgagagacagagaaaagaagtgtgggaagtagggctacaaggagcactttaggtggctccaggactcacagcaactccctcgccccaaatttcaagaaaacgagacccagagttaggtagccaactagaaaagcctttcttatgtcaccagagtccgagcctgggtcttcccacctccgatacagtgtctccatctacctttcccgttctcctggctgagaggctgcaacccccagcaaccaccagggcctggtacattcagtaggcactaaagacgcgtttatttaatgactgagcgaatgagtgaatgaattaaaagtactagggaaggcgtctgcttctctgcacgctgcggtgagggtcagcgagtgaacatagtgagtccctaggcgggcacaatatgaggtccccaatgtgcctgtgccggttccaagaagcacacgtctttacagcccgcaaatctcagagcagccccagcttccaagtctagctgccgaccgcgtaaccacggccgacctgcactcgtttcacgcaagtcccgatcatgcggggctaaaaaagaggtccccgacgtgggttcgcgggcccgaagcaccctgggacttgtagtccccaaccggccagcccagagactcctctaaagccccacgcagccctcgccaacggctccagcgccgtgctcgggccgagccaggccgcggctggctggggtcgcccctaagctggggatctgggcgaggacagaggcggcaagcaaaagagggtcctacagagcaagcccaggccgagcggcgccggccaccggccagatggcagctgatggcgacggatgcgcgagacgccactcaccatcattttggaagcttattcagcggcccgccactctcccctcttctccgagaccgggccgcccagcaacccacaatgcctcgcgcaatagaaatacccagaagcttgggccgggagaggaagagaacggaccacttccgctactctatggttcgttaccaccgactcggtgcggctagaaggacctgaggctgggcttcggggactctctagtgaggggcgttcattaaagaggggtcgccgcatttcggtcgtgcttcttagagcacggagggtctttgctcggcccgcatcacctactaacttaattccaccctcctccatccccggacgccagaccaaggaatgcaataaaggcaaaagtgtgggacgcaaagtgtgggataggctggtgccaaagcactttacgtgagcgatctcatttaatcctcacaaccctattgcgttggtcctattaaggccattttactgatgacagaaaggaggctgagaggtcaaggtgtccagtgtcacagttacatagtcagtgtcaacgggacgagcgtgggaagctgcccccaatgcccgttttctggctttgcactggccagaggctcctcgtggatggcgtgcgccaggccgcggccccagcgcctatccacggtgagcgcgcaagcgttggtggcactgggcggaagaccccctggcgcaagacgagtgccttcccgtgaaggcgtggggaggagggaagcgcagctgggaggagggaagcgcagctgggagaaggctaatcgtcgtcaatcgaggcggccttggagtggacaggaccgagaccgcaagggttaacggcctcgactatcgacagctgaagcaagtccggctacgggcacacctccagtgcttgtcctccctggcccgcccaccgccagcgaggacccggagagtatgctggggcggggctgaggcgaaggccggttgtagctgttaagagtttaagccaatcagcccccggctccacttctctcgaccaataggaagtaggctaaggcgcagaggcggaaagtgtggctacatgagcaggcgtcagagccaatcagccttgagcctcgttcccgtcgtccagcccgcggcgagagcgggtatgtgggcgggaggccggagcagctgtcaggctgaagtcctgcgagcgacgcgcggcggggcggcgagaggaaacgcggcgccgggccgggcccggccctggagatggtccccggcgccgcgggctggtgttgtctcgtgctctggctccccgcgtgcgtcgcggcccacggtgagcggcaacgggtgggactgcgttgcagggcggggctggccgtccagcttgcgcgcgtctcg

SEQ ID NO: 23708 - DNA, 2300 bp, Homo sapien
acctgcctcagcctcccaaagtgctgagattacaggtgtgagccaccgtgcccagccaccttttgcttcttaaacaatgtttgtctcttgcttcttggtaccatgattattttaagtattgtattacaataagcatgacaaggactgttttattcatcacaatgccttgtacgtaacataagttctcagttcatgtgtgtaattttttaccctgaggacatttgattgtccacatcagccctctttagagaatggggctgtctggggaattaatttggtagcccaggactgtttgacatgatggatatgtaactaccattagcttctttctacttattgcaaaaacctgtgcttccagaaaaaagcttgacatccatttaaataatattcagtttaaatgggtagcgtgcctaaaaatggagtttcagggctttattccctgaacatcagaaaacgtgtatttcctgtcatcatcttccaggtgggtgatggcaccacctcagtgaccttgctggctgcagagtttctgaagcaggtgaaaccctatgtggaggaaggtttacacccccagatcatcattcgagctttccgcacagccacccagctggtatggcagtactgattaaccttctcttgggcctggacaccttcacatttctcttaggaaggggaatttcttttcaggagtgtggagggactggggaacagggtactttgggcattttctgacatctccttagtaatctcagttctactaatctgtagccatttgatgaggtgtattacttaatctctttaagcctcaggttagagtcagcctggtagactatgatgtagacatagtcttttagtaaggactaagagactcatggcatactactactacatgctatactcaagcacctcatggtgtatattgagacctagctattatttgccctctaaccttcatttgtgatctggggcaagtcatttaatctttctaggccttactttctttgctatctctaatttgagtggtgacattaaaatgaaataatatatgaggagtactttggaaaaaaataaaaagtttatatatttgtatgcatattttatatataactaatatataaagtgctagaagttgtcgtaggtgtttttagtaaaccaggaggtttggcttaatctcgtgtcacagctgtttccactcattcgttgtagcgtgttacctgcagacccagagcaaaatcttggaagcaccctgattcttcagaactgtatacccactctgcatttctgacttggaattttctgaactatagagttttacatttttctgagcagttacaagacctagaagtgttttttcagctgtagagtagaaatgcttaggatttgggagtgaacagactcaggactattgagagattgaggtccacttcagcagtttgtctttagcatgagagactcattcaacttctgttcttggcaggcagttaacaagatcaaagagattgctgtgaccgtgaagaaggcagataaagtgtaagtctgtagtgggtttttttttttttttttaaagagacggagccttgctgtattgcccaggctagtcttgaactactggctcaagtgatctcccacctgcgactcccaaagtgctgggattacaggtgtgagtcaccgtgtcaggcctttgtcagaaccttgactgacttcctgtggccaaattggatgcagaagcatgctgcaatccctctatgtgcctggggctgtttggctcctgccagacccttggctgtgtcccagcccacagagcacaaaagaagctgtcgactgtagtttaaaagctgccacatatgagatctttgactgcagtcaccatctgtcactgataatctgccctaaagatacaaaaggtgaagttggagagggctgagtttagagactggaagggaactacctccacactgtagtagaatcagataagagggatttggttttcaagacctgatgcagattctgcccttgtgtcccagggagcagaggaagctgctggaaaagtgtgccatgaccgctctgagctccaagctgatctcccagcagaaagctttctttgctaagatggtggtggatgcagtgatgatgctcgatgatttgctgcagcttaaaatgattggaatcaagaaggtacagggtggagccctcgaggtaagcctgctgtggccttcctagacagctcttgctttcatattgacccttcagacagcttcatatggcagaggggtactcattacaggaataaagagaatgcatgt

SEQ ID NO: 23709 - DNA, 2300 bp, Homo sapien
gctcgcccaaatgagatcaggtacacaaagcctgcagggtccacagtaattgttcagtaaacaccagctaaaaaccaccagctttgtttgacatatgaaaggtggttcagggaggtcagtgtatgaaagagctggtcattggagaatccaggttatgaaatcatttctcactctgtttggagttcctctaacacaccaggctcttttgctccctacattttgcctctctccacgcgacagctcctcccagtcatccagtgtgccttctgtaacaccctgggtagagtgtgtcactgctcccctgcctcaatccccactgcatgttgccctgacccctctgtcatctactttgcaataatttctttttttttttttatttagtttttgagacagagtcttgctctgttgcccaggctggagtgcagtggtgcaatctcagcttactgcaacctccacctcccaggttcaggcgatcctcctacctcagcctcccaagtagctgggactacaggcatgggccaccatgcccagctaatttttgtatttgtagtagagacgggctttcaccatgttggccagcctgatctcaaactcctgacctcaggtgatctgcccgcctcggcctcccaaagtgctgggattacaggcataagccaccgcgcccagccctactttgcaataatttctttatatttctatctcctccaccagatgggttgttctcaaggcagaatctaggaatgtccatttctgtatccctagtaccaaatgcataatagatgccagagagatgtttgttgcctgggcaaatgttgagggttgaaatgtttagggaaatggcatttggtgtgaatggaaaggaaagttggggcaatcaggaagggccttgctaaggaatttaggtttttttgcattttatctagaaagtattggaagctatttggcgggattttagattttaagaaagggattaagatcagactgttaatgttctatgccccccacaacttctgccaccaaagagactgtccactctttgagggtagagaccatgtctatgttgtcaccgctgtacccccagggcctagctcagttgttgttgacttgataaccacttgctgaatggcagagtgagtggatgtaggaatgaggggctccctatctgcagtgtggaggatgagatgcagggagactagtgctaacccagagaatgccaatggtggtctgaactgtgggttcaagagtacttaaggccgggcgcagtggctcacacctgtaatcccagcactttgggaagccgaggcagcagatcacttgaggccaggagtttgagaccagcctggccaacatggtaaaatcctgtctctactaaaagtacaaaaaaatgagccgggcatggtagtgcatgcctgtagtcctgtctactcgggaggctgaggcaggagaattgcttgaacccaggaggcagaggttgcagtgagccgaaattgcaccactgcactccagcctgggtgacagattgagaccctgtctcaaaaaaaaaaaaagagtgcttgggaatcagaatctgcaggacttggtggatgagatgagggcagaggagtcagggatgatcctggttctctgacttgacctgctgggttgttggaggaatgcttgcctgagtcagggaggggtcccacaggaggagcatgctgggttatcaagcatccagagacttccctgacggctcccccttcccattctccagccagcagcccacacgcttcagtaaccgctgcctgcagatgattggtcgctgttggccccacctgcgggccctgggggtcgggggtgccggctgtggggtgcagggcctggcatcactcggtgagtctttccttggactggggtggtgggtagtgggaagcaggcatgggtgcagtgctgccttgtgaaatcccacaggggcttggggctgcagcctgggtggtggcaggtggcagggtggtagccagggtgctggctgcaggggtgacctggggagtgtgtcagcaggatcccccttcttcctcttcctagcgagaaactgcatgcggctgcaggtcctggagcttgaccacgtgtcagagatcacccaggaggtggcagcagaggtctgccgggaaggcctgaagggactggagatgctggtgctcacggcgactcccgtcacccctaaggccctactgcacttcaacagtgagcactgggggaatgaggggcagggtacgactatcacctgccacggggccctgtcagcaggtatcctaactatcact

SEQ ID NO: 23710 - DNA, 2300 bp, Homo sapien
agctcctacaagttggtgcaaactatcagtatgcttccacatttgagtgtattcctctgtgggttgatgtgacttagtgtgtatttttgaaggttcctgcaagtatgtttgactgtgtcggtggtactgtgcctcaatggttctttgcgtgtctcacacgtaagcacatgcccaagctggaacatgatgtgactacacaaacatgaatgtgtgaggctgtgcctggggctgtgtaatgagcctctgtgtggggatatgtgacatggctggtggctctaagtgtgtgcctaggagtgttctgtgttgggatgctgggtatcgaaggacatgcacatgtgactgaacatgtctgtgtttctgtatgagagagatgtgtctggttatggcatatggatgtacatggggtacatgtgtgtggggatgtatgtatgcctggggttgtgtgggactgagtatgcctgattatttctgtggagagcagggtgtgcagtatttctgtggagagcagggtctggggccaggtgggtggggtgtgagtgtgtggctcggagtgcatgcatgcatttctgtatgtgtcatcgtgcggggctgtgtgctaggcctgttctgcaggaacccatgtgaccataagcagacaccgcaggcagctgtgccagtgtctccccgcactggccaggctctcctccagagggtgggtgggcaggcaggctgaggctctggggtaagagactgctctgggcccagggaggtggtgcagatcgaccagttcctgaaggagacggcggcgcgggaggccagcgccaagctgcggctgcagcagttcattgaggagctccttgagcgggctgaccgtgccgagcggcagctgcaggtcatcagcagcagctgtggcagcacgcccagcgccagcctgggccgtggaggtgggggcggtggtgctggacccaatgcccggggcccaggcagaatggtgagtgcccacctgccttccctcctctacctgcacacctggccccccacaacctcacctttcacatggctggacatctcccccatgatgccgcattcgccccttctttggcttttaccccaccagcagatgccaggaacaggggagcccctttgattgggcaggagtgccagtgccagcccccgaggctgtagtgagatgtgattcggtggccccagccctcgggggctatctctgcccatccctgcaaatgagagtccaggagccacaagctggggtccagggtattgtgtgggtgtggggaggggctggtaagcctgcctctctgggctgtctgtctgtccatttgtccatctttcccaactattttcccttctctctcctctcccccatctcctctccatcttttgccctgtttcccctgctattcctgctcatcctcttgcctcctccgcccctctcctttacctcctgctctgggggcccacagcgagaacaccacgtgggcccggccgtgcctaacacatatgcagtgtcacggcatggctcctctccgagcacagggtaagccttgggcccagcccaccccatgcagcccaccctcaccctggaaggatccgctggcctgtctggggcttgtgtcaccctcctgcccctaccctccctgggtcacgtatgtctgcctttccacacccagagggggcttttggaaagcagggcgggtgggttgccctcagctgatggtaggggcaggatggggagtttgggtaggcctggtgcctcttaccccttactgtgtggtccaccctgccccagggcctccagccgtgtgccagccgcatcccagagctcaggctgctatgacagtgacagtctggagctgcccaggccagaggagggggcccctgaggacagtggccctgggggcttgggcacacgggcccaggctgccaacgggggctcagagcggtcccagccccctcgcagctcaggcctgcggcgccaggccatccagaactggcagcgcagaccccgccgacacagcactgagggggaagagggtgatgtctccgacgttggctcccgaaccactgagtcagaggctgagggcccgttggatgcgccccgccccgggcctgctatggctgggccattgagcagctgccggctctcaggtaggtcccggaaggctgggcagggggacacaggtctgaggcagtgaatctcctgggctcctgcacccccctcccctttccccagacttgcccacccctcctacatagcgcccttcaagcctggggcaggaactcttgtgacagggcagggctgc

SEQ ID NO: 23711 - DNA, 2300 bp, Homo sapien
tgtgaggaatgtgtttctccatctaagttttgcttctttgggttggcttcattcccaggtgtctcctcccaaaaggagaaaggatggcaccagcagctctggccttctccatcagcttagaaacctgatcccaaagacaatgctttccctcagtcattccagaacagtcctggggctcactggctcaactttggtgctctatgtttaccccacgactgatttgccaggtctatgtcatatccccaagaccatgtggactgagaaagtggggaaggatggttccctatggtcaaagcagggtgctgttaccaggaggaggactggatgctgggctggcaaaaggaacagacatccacccatacatcctgtggaaatgccagaaggcaacacaactatgcggcaggtcaggatggagaagtagagcttacaggtgcaagtaaacctgtgtgagggaagctgactgccttcctagggggagaatagagatggagggctccagaggcagacctcagggaatgaggacgtttaggaaggcagcaagaacaggaagttgcagaacccaggggaaaatccagacaggaaagctcatggcagctgtgaagatggaggggtcaacagtatcggccatgggaccaagtaggtgaagacccttgatgacaactggcttgtctgatcagcaggtggtctgtgaccttgatcacagggcagtggaagccctattgcaggcagttaggaagaggatggcagtgaggaatgggatggagaccccacaaggtaggagaagagtgacaagaagccagagatggaggggcagcaggagttgacagtgaggagggttgggatgccagaattggtggggggatggagggaccttgtgccaaaaggggtgtggggaggatggataataaagcccttggggtaaaggcagggcagggacacttactggaagcctacctcaccttttctaggtctgagaaaaagacctaagggcctggagtagtagggataggaggatgtggtgcagaagtcgggacagaacaaacagcgacacatgcgatgtcattaggtagagtgatgtcttggtcactgcaacatggtaccaatagttccagcctgtgtgggggtgcagtctgcaaaaaatgaaaataagcatgcatgttctttccaaggatttttacactcattttaagtatacagcttgatgattgtttaaatatgtacacaactgtataaccaccactcaaagcagatagagaacattctccgcatcacataaagctgcctcctgccccttcctagtccatgtagcccccagctggggacctctatgctgacttcatcatcaattgtgtctgttcttgaactccatctctctggaattctacagcatgcactctttggtctggcttctttcatgcaacataatattggatggactcatccatgtcactgtgtaccaatagtttcttttcttattgctgggtagattccatcatgaatatgctacagtttaaccgttctaccattgatgggcacttgggtcgtttccaggttggaaccattataaataaaagtgattacgcgcctgcccctttaaaaacagattatctcattctctcgctgtctcttgcacacatacaggccctcgcacaggtgccagagcaggccagcctcctctgggaggtctccccttgcccctcaatgctgatttcctcatggctgggggatgagggctccgggctgggagccagggtgggagcagcgataccctcttcctaagactcatcgcgtctcttccagcctcctcgccccaggccgcgggcgccctgagccttcctgaccccgcagggggcctcgcccgcggtcccccatgagcgcgcccggctgaccggcggggcggccgcggtggagcccgcgtgccgcgggggcggcggggccatggcctcgctggacctgccgtaccgctgcccccgctgcggggagcacaagcgcttccggagcctgtcgtcgctgcgcgcgcacctggagtacagccacacctacgagacgctctacatcctctccaagaccaacagcatctgcgacggcgccgccgccgccgcggccgccgccgccgctgcctcggggttcccgctggctcccgagcccgccgccctgctggccgtgcccggcgcccggcgagaggtcttcgagagcacttccttccagggcaaggagcaggcggccgggccgtcgcccgcggcgccgcacctgctgcaccaccaccatcaccacgctcccctcgcccacttccccggcga

SEQ ID NO: 23712 - DNA, 2300 bp, Homo sapien
tgtgcacagtggctataatcccagcacttcaggaggctgaggcaggaggacttgagcccaggagtttgagaccagactgggcaacatagggagaccctgtctctaccaaaagaaaaaaaattaggcaggtgtggtggcatatgcctgtggtcccagctgcttgggagactgaggtgggaggattgcttgggcccggaaggtcaaggctgcagtgagccatgatcactccaccgcactccagccttcgtgacagagcaagagcctgtctaaaacaaacaaatattccaaaacaaaaacaaaaatgaagccatttaggcattcctaaatctagaaacaactgtgtggatatcaccaaactccctctctgtgtctgtctctttctctgttaaattcagatcaggcaaaattgagaaggtaatagagtttgttttctggtggccctgcctcccggtccccacctccccatcacattcatggcatcttctctcttcatcccacttggccttcagggcccaacagttctttccctctctttccatataaaatccacatgcagaaaaggggctgagaaggtggaaattacagaaatggggaaggaaggtttggatgttaacagatggatttacaagccaaagaaatgaagctctaagctcggtacttttaggaggcatctgccagcaggtggaggtatcctaaggatgggggaggcagccggagttgtccccattatacccctattaggcccctgtgggtggggagtaaaggaatgtccactgcctctataaatccctctgagtcccccaagaaggctggggctctggctctccacacctgtggctgtggccccaacatgtatacctcccagagtagtcactccagcctggcgaagaccctcaggggtcaatgcatccagtcctctgccttctagcagccctggcactgctttttctgttctaagccctgccttactctcctgctcctgcaaacaggcatacacctcccaaggtcacacacaggctccagaacctggatcccatacccagaaaaccatctgggcccctcgctgcagagagacctaaggagagagcaggcccacacagtactcgctggccgactgtgggcagtgcacacaggccccgtgtcacacacactcacatgcaaggcaatgcggaggggcgcacacattcagagacactgtgagcactgtcaccagtacaggcactggatgtgaagagacagacacatgcgtgcacacacatgcacacctccagactatcacacgtgcacaccggcacgcacagacacccgcacaggtgcccagccaggcctcaacaccaggcccctcccccagcccctcagaaaccggtagggagggttggggtttcagggcgcttcccctcccccctccctctggcccctgttctccaaggtccagagtcccagtggggttctggagcccgcccccgccccaaaacctggctcagggagcgacaggcgagaggggggaggggaagcctggtctcgaaacgttctgattttaatttcttaaattaaccccttccctgcctctggtctggcctgcccagaatccctccccgttgggcggcctcgcgggcctccggagggctgtgaaggagccggaaggggaagaagggacagtggctggggtcctccctccttccctctccgggagcagtcccgcagcgtgcccgcgactcgcccttacctcctccaccccgcggcgaggccaggcccagcggcccagggctggggacgcagaagagcccccgcgtgcccggtccagacgcagggccgccttggggcctcggatctcgttcccctccgcagccttgggtggccgccgcggctagcgcccccgcctccctctcggggcgggggcggccgaacctcccagccagtcgcagcgggaggggcgcacgaacccggcgggaggaaggatggaggaggaggaggaggaggagggggaggagggggcgcgcgggccgaggaaagcaagggaagggggagggaggcagcaccgaggtggggcggagccggcccctcctccggggcgggctctccagtgagctggggagcggcagatgcgcccagcagcggctgcgccgggaccccacgttttccgctcaaggtggtttcgatgggggaggggtcttcggcgccgccctaggggtgtagggatggctcgcgccgcgctcctcccgggtcccagtcttcccggctcccggcaccgcccagtgcattccccgccctgggcacctccagctgtggcttctgttgcc

SEQ ID NO: 23713 - DNA, 2300 bp, Homo sapien
gtaagacacactgcaagtgcatgaccctgtgagaacctttatatgatttgtggacttcaggagaagatgcatacaagtgtgtcagcatatgttttgcaggtgattgtgtgaagggacatattctgtgaaaacacttaataaggtcactgtgggatgaggagtgggcacctagtgctggagatggggctcagggtcccagcagacataaaaccaaagtctaccttctggcctgtaataggcacttaagaaatgaatactgaatgaatgaacattgagaaactgaatggatgtttggataatggacatagggtgaaaggactgagaatgtggtggggtttgggcattcttgggctctctctctctctcttgaaaaagagggtacaggggtggaagagaggctgggagctatactgcccatgatgctgagtccaccacccccaaagggctttgtttctatttcaaaaaaggagagaaggaaggaggagccctaaacctgcccaccttaccctccagcacacagagtctcaggaattgatgctcttcataaagaagaacatgctattccatgtatttatttaatccttcccccccatgtatttatttaatttggttccagaaaggagttaagtgagctataatacaaaataaaataaacattttaaaaagaatgagagaatgagacagagggaaaaccacagcagaagagagatgagactaggagagtaggcaagcttctttgctggagttggctctgatgcttctgcagccaagattcacagcctccttaaggctaggattttttttttttttctcaaaagaagcccaattatttcaagtactgattccagggagatatttcccacggattccctgtgtgttgctgggatcaacatccttagagcgaaagccatttgtatgaaggcagaaaaaatgttctgcagaagcatctcataccctgtgggtgagggaggagtgagcaggaattggccctacttttctggaagacaatttgccagttgtctatcaaaattttacatatactttggcacacaattacactcgttggaatttatctcacagacacattcacatttatatagtcaaggatgttgactccaacaacattggtataagtaaaaagttggaaactgcctacatgctcatggataggggacaaatcgactaactcaaggtcctcccttacaatggagtactatacagccttgaaaaagaatgacaagatctttatgtcaggacatggcacaatctctaagttatttcaagtgaaaaaataataataataataatattgcagaacaatgtgtatggttggatatacataaaattcttctgaaagaatacccaagaaacttaaatgtggctacctcaggagctaggaatgaaggtaggtggagaggagggacttttacttttcaatttagaatataccctgttgtgctagttgactttcctcctactgttaacaagtattacagtcctttttaatttaaattatttttcctagcacaaatttaaaaaaaaaaaacttaaaatggaaaaacacacaggcgtgagcaaaagaaatgaatggcaataatctctgtggtttactgagtgcgcctggacatttatgtgctctcagtttctctccacaggaaatgcacaggtgagaaactgacgttaagggggactgagtgtcaagctagttagtggcagagggcagattcaaacccaacacggtcctcccctgctgcccctcggcctctgcctccaggtgggaagcgcatctaccggacggtcggcccggtgaggcgcagcgccccagactggcgcatccgcggccccagcgctccacgcctggggagcgcgcgcgcacgcagcggcgcgagcctggcggcggcggcgacaacaacaacgtcacagctcgagctttccttttcgggagtccccggcacacatcctgtgtccatgtttgggcatttacgtcacggcggcagggccggggcctcccaaaatggcagtggcccggggagtcggaagcccggagccagcgccgccgcagctatataagtgggggggctgtgggctgggggagcccggcagcgctttggagaggcgaggagccgccgcccgaggccggtgcgggcgagcgagggcgccgcggctccccgactcctttcccagaggtgagtgcccgaagccaggagcccgggcgcctaggtctgtgcgctgcggggaacccctaccgccagcctccccgccacccgcgcgcccccaagcccagcgggcgaggccccggg

SEQ ID NO: 23714 - DNA, 2300 bp, Homo sapien
taagcaagattagtggtagggtaagagatgccaaggaatcagaaattaatcttgtcctgttgtcttgggtataaactgcccatttctgcagtaagcagcttctggggaagtcccaggaatcttcagtttgaggtcttccaatagtatgggatgtccggtagccaggagaaaatgatgcatgtctttttagttgtgtaatatgaatccagggatcaatgtcttctagttttactcctgggtcagttgttgatagtacctgacatttttttttcttgcattgaggctcaagggaaattgttttctaatgctttttcagaagaccaaatctctaacttcagaagctgcttaggtgggtgctttgagaatgcagcttccatctgttgttgataaagcaggagttaatcttagaagtctcctgcagcaattagtgataacagcttatattagtagcatctagtattggaagtaattcacaaatacatgaggaagcctgttattaactcagaaggagataacttatgggccttagaatggactgaccttattgccatcaaggcaaatagaagtactttgggctttggaagttagatggaagttagagaactttgaaagctattttttagaattctattagttctctttatctttcctgaaatttgtggatgcaaaaagatagcggagtttctaaaaaggtaaagctttacagttatttaatatcagtgaaatgtgtgtcctcttactggagataaacattgagatttcacattcaggaatacaaaattaataaattcttttctactattacagtaataggtctccggcaaggagaacccctaaaccccttaagaataaataaccctaatgtactcatagtccatttagaggtgttcaacagaactccaagactgggctccagttcatgttctacccttaaagttttgccaggattgggtcattgacaggtaggcaggacatacatccttggcaataaccctaaaattgccccaccaacattggttcagcatcattatcaatgtatctctactattgtgggtaataccatgaagactttttgctggactccactttaattatggctatttcctttggtaacagtgaagcatctcaagattataattattatttaaaattttaatttaaaaattttccccataggttattgggggtacaggtggtgtctggttacatggcatcttaagatactttaatttgccattcatttcgtagaggttcctgaagcggtcaggaaatctttgtttttaaagcactccaaagtcattgacgaaccaccaaaacatatgtactatcagtataaatatttgctctgttatcctttaacagctggttggtctaggccagggcaattcctacactaacagaggacctgggatggcatactgagtcagccacttactaggtaagaaactttgggcaaattaatttttttagcctcagattcttcatacatgaaatagtaatacttgtctcacagaaccgtgagcatctaatgagttattgtacaataaccaacctatcactaagtccttcacattgattatttcctttaattatcacacccatcctatgcgatggcctattatcatcgttttataaacacaaagtcacaccactttaagtggtgatgccaggattcaaactccgatctttctgatgccagtgcccagttcttaatccctctaacaacccgtgacacttttccacggttaggttcaagcgcccaccatacagcttgacactttaggagatactcaacctttaaaactttataatttgcatgtgtgattataacgggtacgtcctagagtttgatctcttctctgtgcaggggcgaaactcgaccccagccgagaactacactgtccttgcgcggggccctctgcgccccggaaggcgcccagtcccggtttattgtgagcttacagtacagttcgcaaggtcccggccggtgacggcggcgaggcggcaacgtcgcctgtagcaaacctccgccctaaggcgttcccgccgggcctcgcgcggcgtccctagcaacgcgcgcgcggtcttccggccccgcccaggcgggcggcactgcgcctaagctgggccacaaccgccagtcagggctctccccttcccctccctccccccctcctcctcctcctctgccgcccagagcgagacaccaacatggagcccgaggatctgccatggccgggcgagctggaggaggaggaggaggaggaggaggaggaggaggaggaagaggaggaggctgc

SEQ ID NO: 23715 - DNA, 2300 bp, Homo sapien
agaagactgagacaccatcagtatcctctagtttatactcatatagagagaagcccattgtcttctaccaacaggccctgccagacagtgagctaactcaagaagctctgaaagtttcagctgttcctcaaccagctgaccagaagactgggttatctactgtaacttcctctttctattcacatacagagaagcctaatatttcttaccagcaagagttgccagatagtcatctaactgaagaggctctgaaagtttcaaatgttcctggaccagctgaccagaagactggggtatcaacagtaacctctacttcctactcacacagagagaagcccattgtttcctaccagcgagagttgccgcattttactgaagcaggtttgaaaattttaagagttcctggaccagctgaccagaagactggaataaacatcctgccctctaattcctacccacagagagagcactctgtcatttcttatgagcaggagttgccagatcttactgaagtaactttgaaagcaataggggttcctgggcctgctgaccagaagactgggatacaaatagcatcctctagttcctactcaaatagagagaaggccagtatttttcatcagcaggagttgccagatgttactgaagaagctttaaatgtttttgttgttcctggacaaggtgaccggaagactgagataccaacagtacctttaagttactactcacgtagagagaagcccagtgttatctctcaacaggagttgccagacagtcatctcacagaagaggctctgaaagtttcacctgtttctataccagcagagcagaagactgggataccaataggactgtctagttcctactcacattcacataaagagaaactcaagatttcaactgtgcatataccagatgaccagaaaactgagtttccagcagctacccttagttcctactcacaaatagagaagcccaagatttcaactgtgattggaccaaatgaccagaagactccatcccagacagcttttcatagttcctattctcaaacagtaaagcccaatattttatttcaacagcagttgccagatagagatcaaagtaaaggtattctaaagatttcagctgtccctgaactaactgatgtgaatactggaaaaccagtatctctctctagttcttattttcacagagagaaatcgaatattttcagtccacaggaattgccaggtagtcatgtaactgaagatgtgctgaaggtttcaacaattcctggaccagctggccagaaaacagtattaccaacagctcttcctagttccttttcacatcgagagaaaccagatattttctatcaaaaggatttgccagatagacatctaactgaagatgctctaaagatctcaagtgctcttgggcaagctgatcaaattaccggattacaaacagttccctctggtacttactcacatggtgagaatcacaagcttgtttcagaacatgtccaaaggctaatagataatttgaattcttctgactccagtgttagctcaaataatgtgcttttaaattctcaggctgatgacagagttgtaataaataaaccagaatctgcaggttttagagatgttggctctgaagaaatccaggatgcagaaaatagtgctaaaactcttaaggaaattcggacacttttgatggaggcagaaaatatggcactgaaacgatgcaattttcctgctccccttgcccgtttcagagatattagtgatatttcatttatacaatctaagaaggtggtttgcttcaaagaaccctcttccacgggtgtatctaatggtgatttgcttcacagacagccattcacagaggaaagcccaagcagcaggtgcatacagaaggatattggcacacagacgaatttgaaatgccggagaggcattgaaaattgggagtttattagttcaactacagttagaagtcctctacaggaagcagagagcaaagtcagtatggcattagaagaaactcttaggcaatatcaagcagccaaatctgtaatgaggtctgaacctgaagggtgtagtggaaccattgggaataaaattattatccctatgatgactgtcataaaaagtgattcaagtagtgatgccagtgatggaaatggttcctgctcgtgggacagtaatttaccagagtctttggaatcagtttctgatgttcttctaaacttctttccatatgtttcacccaagacaagtataacagatagcagggaggaagagggtgtgtca

SEQ ID NO: 23716 - DNA, 2300 bp, Homo sapien
ctgtcaagaatttctaataggttgtcataattgagaagaagacatactaagcattgcagtgggtattaaattgcatatattgatgatcttctgtgttgcaattgttgacaaattatcacttttgcattgtattatctcaagtgtatgctttctctccagcctggaatatgaagttcaatttagcacatgattgtggatactccatttcagaattaaatgaagatgacaggaggaaagtagaagagatcaaggcagagttatttggtcatggaagaacaactgacttgtccaaggtataaaagaaatctggaaatgaagaaagtaaatatgaaagaatgggtgatggaattaggatctcttacttgggcatcagttgagttgctgataatatttggctaaagccttttttggttttgtttttgagacagtcttgctctgttgcccaggctgaagtgcagcagtgcaatcacaggtcactgcagccctgaactcttagactcaaggaatcctcccacctcagcctctcaggtagctgggaccacatgtgtgtaccgccctgctcggctaatttttaaatttttggcagagacagggtctctacgttgcccaggctggtcttgaacgcttggattcaagcgatcctcttgccttggcctcccaaaatgctgggattacaggcatgagccactgtgcctaggcaggcatcttaatttttcaaaagttaagatataagtattagattcttacagtctagatatgttgtttttattgattccaaattcatattttgaaaaatttatcttcttagaaaaataagaactgatttgcttgttttatcaattttttttttaagaacagagaagactaaatgtcacccttattttctcttgaaagtggtatcttgaaatccagctattttcaaatgtttattttaaatacttgagtacacagctataatagcttatgtataaatggctttcattttaatagtacatattttccttctattaactatttcatatgtagaaaagagcatatatgaatcatttatgtaaagaatagcagcaagtaaaaataattcccatatatttactatcgagcttgagaaatagaacattaccaaatactgttgaagttctttgtttctcctttcccagtcatatcttttttatttcttattttgatatataatgattttccttctcttcagtatggttttgaactctaagatggaatcaatatgatacatattcttttgagaactaggtgtttcacacagtgttagggttttgagctgcttctatgtagatgtgcagagttttcatttgttccttattactgtacagtattccagtgtgtgattacatgataatttattctttctcctgtggataaggcattttgtctgctattttgcatagtaatagggtataataatgcctatcgtagagggttttggtgtggattatgtgagataatgcctataaaatgcttagtagaacgtgtgatgtctagttagtactcagtaactggcagctattattactattattaatcctgaaagaattgatatagctatcatgcaaggatttcatggcctgattcatacaaagtttcttagaaaactattctccagtgatatagtttatttggattatctcaattttggaaaagtttgaaaagtacaaattagattggattttaggttttacgtatatgcttgtgaaaaacaaaattgacaaaataataagaataataaaatgggcaattggttgtcttagcaccatttgtatatatgctgccaaagtgagcactatcctagcatcatttgtttaaaattacatagttttctcagtgatctgtgtttccctatttttaaaaattattttcttgcgttcatatttccagatccctcagcaagcaagttgccttcctttgggtagactctggtttgtctgtgtttttcttaaaataaggtgtcctgaattagatgaaacacaatttcacttctgatctgaccagcatgaagtatattcagtaattctctttctgtcaatgtactgtgagatctttaatggtcacagcataattgggcattaaaaaaaaccatgtactgctttcaaaacttaaagctgtaggaaaaaagcaaagcaaaacaaaccaaacaaaaaccatgaactgctgccaagattcctattctcatttcttgtatctatataatacttttttaaaaatcttcttatttttgagacagagtctcactttattgcccaggctggactgcagtggcatgatcttgg

SEQ ID NO: 23717 - DNA, 2300 bp, Homo sapien
agcctccactggctggccctgggttcctgctgctgactcccagcttctggtttctgctgaagaaggctgcagggcagcacctttaggggaagccttgacttttccagatctgggctctctccagtgttttcctgaatgcccctaccagaagcctggctgtcgtctctgagcccttcctcatcctcctccctgtgtgaatcattccaactcctgccatttctgccccaaatgcacctccatacggctcatgtctcaccttcttgacttcctccctctggtgaagccactgctgtctcatgggcctctgctaacccaggcggcttctttgtgaacccagagctaggcacagcctcaagccatgcagcccactggatgcagagtttagcaggcaagcaacgcctttgagcaaataagaaaaggttgccttttcctttggccagtctcagtttcgtgccatggctcatggcttggcaaccagagggaggcccagttttagctcccaccagagcctctgggccagctgctcttgtacagtgagcacctgcatccctgtactggaggccccgctcttgcctggatgtggcatgagccttgaggggtagctgcttccattcctacctcctcagatccattgtccacctgcagccagagtgatgcttgcgtgcgcacacacacacacacacacacctcctcccctccgtgcatatcaatgtcctccccttgctcttggaatagagtccaaactacctaacctagatgacgggcccagcgtggctgatcatcaataggttagctaatctttggaagggaagtttcccttcaatagcatgtaagttggtgtggaaaagggctttttctgttaggttttgcttttgcctatcttgtatatgttgcatccttgtaattgggccccttgagatttcagcaccacaccatgttttagtgactgaaataatgaacattctgatcagaccgttgctggcttgcacatgttaaccacttgcttttggtccaatattccttgttcccacaacataatgataaactgctcatgtactgtttctttgttcagcaggaagacattccttcagggtcaggaaaagtttgcagaatgaatgaatgccttgaaggacactgtgaccagctgctgacactgagaagcctggttgcacaaggtgttatctcagactgaggaaacacagacttttcctctcaatccccctgaactcccccttcctcactctctagctgcataaaaacattctgctgctgcttctttgttgaactgaagttgagagatcttgctctcctgccttcttgctttggccaaatcgaatacaactttctctatctccaagcacccatgtgtcagtgtttgggatcagctccacgtcgggtacaagagcatgaatttgggcctccccaacatctgcagtgcaaaatatttaacaacgggtgtggcacagcctctgaccaacagccagaacacacacaagccacacacagccatgcctgtcaagccgaatgtcaaccttgctcatggctgaaatgaccccaggacacaggaagtgcatgacacacaactgttgactgaatcaatgaatgggtggagatgggggttggtgaggtgagtgcaaggaactgccaacaacagatgcttcgtggaccagggaaacctcagcgaggagaagcctagctgggaagggccttgttgccaagcatggggactcggcttctggccaatggtgactgattgcagggtgaatggtacagttctcaggctcgtcgtatatgtgtacaaggaccagggtggatcgtatatgtggacagggaccgagagtactaagtgtgccaggtggcagagagatgcacggggcctgaacaggcaagagaggtggcaggccttccagaagggcaaggaacccaggcggttccagaccctgagtctccccctccaggtcgttccctttgaccacaaagaggaatgcacactgggctccctgctgtgttacagcccagctctttgaccctagggttgatgattaccaaacattcaggagccaagcaataaggcaggcagtctactttccaggggtgagcaagccccagacggtatctcctggatgccagtgagcggctgagagctgaagctccctggacactcaaggctcttgtggtgacaggtgaggggactgggtggaaggacagtgctctgagcatgcaccttccttgggatctggaggctgggctgttttttatgcttggctcttatgccacttcagcaacctaaaaacttacaa

SEQ ID NO: 23718 - DNA, 2300 bp, Homo sapien
gctgaggtttccctggtccacgaagcatctgttgttggcagttccttgcactcacctcaccaacccccatctccacccattcattgattcagtcaacagttgtgtgtcatgcacttcctgtgtcctggggtcatttcagccatgagcaaggttgacattcggcttgacaggcatggctgtgtgtggcttgtgtgtgttctggctgttggtcagaggctgtgccacacccgttgttaaatattttgcactgcagatgttggggaggcccaaattcatgctcttgtacccgacgtggagctgatcccaaacactgacacatgggtgcttggagatagagaaagttgtattcgatttggccaaagcaagaaggcaggagagcaagatctctcaacttcagttcaacaaagaagcagcagcagaatgtttttatgcagctagagagtgaggaagggggagttcagggggattgagaggaaaagtctgtgtttcctcagtctgagataacaccttgtgcaaccaggcttctcagtgtcagcagctggtcacagtgtccttcaaggcattcattcattctgcaaacttttcctgaccctgaaggaatgtcttcctgctgaacaaagaaacagtacatgagcagtttatcattatgttgtgggaacaaggaatattggaccaaaagcaagtggttaacatgtgcaagccagcaacggtctgatcagaatgttcattatttcagtcactaaaacatggtgtggtgctgaaatctcaaggggcccaattacaaggatgcaacatatacaagataggcaaaagcaaaacctaacagaaaaagcccttttccacaccaacttacatgctattgaagggaaacttcccttccaaagattagctaacctattgatgatcagccacgctgggcccgtcatctaggttaggtagtttggactctattccaagagcaaggggaggacattgatatgcacggaggggaggaggtgtgtgtgtgtgtgtgtgtgcgcacgcaagcatcactctggctgcaggtggacaatggatctgaggaggtaggaatggaagcagctacccctcaaggctcatgccacatccaggcaagagcggggcctccagtacagggatgcaggtgctcactgtacaagagcagctggcccagaggctctggtgggagctaaaactgggcctccctctggttgccaagccatgagccatggcacgaaactgagactggccaaaggaaaaggcaaccttttcttatttgctcaaaggcgttgcttgcctgctaaactctgcatccagtgggctgcatggcttgaggctgtgcctagctctgggttcacaaagaagccgcctgggttagcagaggcccatgagacagcagtggcttcaccagagggaggaagtcaagaaggtgagacatgagccgtatggaggtgcatttggggcagaaatggcaggagttggaatgattcacacagggaggaggatgaggaagggctcagagacgacagccaggcttctggtaggggcattcaggaaaacactggagagagcccagatctggaaaagtcaaggcttcccctaaaggtgctgccctgcagccttcttcagcagaaaccagaagctgggagtcagcagcaggaacccagggccagccagtggaggctgctgagattccagatctttggtacccaacaccacctccgaggaaaagtctaaggagcatcaagtctgggcaggaagtccatggctcatctttagagtgttctcgcaacatttcagtgtcaagcaggagttggcctaggaatcaaaagaggtgagcggtggctccaaagcaccactgagtacttctagtgtgagtctaaccaatattcagtcagaaacctgccggtcacgtggagggggagaggtttgtgctccgtccctgtgtgctgtctctccctccatgctcacccgtggctgtggcttcctcaaaacacagcgacctcacttgacattcaggcgtctcttgctcccaggatttactgtgacttctgcatttttgtagctttcctgataaaagcctgggctttccttgtcggacctgaaagattcatttattcattcaacaaacagtggccgaaggcttgttatgtgctgtgcctggacttggcatgaaggcaccagatgtcagaagcgaggctgctgcccaggaggacacacctgatggggctctgggaccaggacgatggtggagacatcacatccggaataactttgttaggaaggtgaacttgacagttagg

SEQ ID NO: 23719 - DNA, 2300 bp, Homo sapien
cccttgctcttggaatagagtccaaactacctaacctagatgacgggcccagcgtggctgatcaacaatgggttggctaatcttttagggaagtttcccttcaatagcatgtaagttggtgtggaaaagggctttttctgttaggttttgcttttgcctatcttgtatatgttgcatccttgtaattgggccccttgagatttcagcaccataccatgttttagtgactgaaataatgaacattctgatcagaccgttgctggcttgcacatgttaaccacttgcttttggtccaatattccttgttcccacaacataatgataaactgctcatgcactgtttctttgttcagcaggaagacattccttcagggtcaggaaaagtttgcagaaggaatgaatgccttgaaggacactgtgaccagctgctgacactgagaagcctggttgcacaaggtgttatctcagactgaggaaacacagacttttcctctcaatccccctgaactcccccttcctcactctctagctgcataaaaacattctgctgctgcttctttgttgaactgaagttgagagatcttcctctcctgccttcttgctttggccaaatcgaatacaactttctctatctccaagcacccatgtgtcagtgtttgggatcagctccacgtcgggtacaagagcttgaatttgggcctctccaacatctgcagtgcaaaatatttaacaacgggtgtggcacagcctctgaccaacagccagaacacacacaagccacacacagccatgcctgtcagccgaatgtcaaccttgctcatggctgaaatgacccccagacatgggaagtgcatcgcacacacctgttgactgaatcaatgaatgggtggaggtgggggttggtgaggtgagtgcaaagaactgccaacaatcgatgctttgtggaccagggaaacctcagcatggagaagcctagctgggaagggccttgttgccaagtgtggggactcggcttctggccaatggtgactgagtgcagggtgaatggcacagttctcaggctcgtggtatatgtgtacagggaccaaggtggatctcagagagtatcaagtgtgccaggtggcagaaagatgcccagggcctgaacaggcaagagaggtggcaggccttccagaagggcaaggaacccaggcggttccagaccctgagtttccccctccaggccattccctttgactataaaggggaatgcacactgggctccctgctgtgttacagcccagctctttgaccctagggttgatgattaccaaacattcaggagccaagcaatgaggcaggcagcctgctttccaggggtgagcaagccccagacggtatctcctggatgccagtgagcggctgacagctgaagctccctggacactcaaggctcttgtggtgacaggtgaggggactgggtggaaggacagtgctctgagcatgcaccttccttgggatctggaggctgggctgttttttatgcttggcacttatgccacctcagcaacctaaaaacttacaataaagctggagggagcctttcctgaaacttgtgcttggtcacaggatttctgcgatgtatggtccctggagaagcaccaaagggttgggcatgtggcctgcctgaggtaggtactctctcaatgcaccaagaagctgagagagccagaaaaaggaaacagagggaagagtggtgggtagttcatctatcagggctttatagaaggtattttattcaatcttcgaaacaactctagaaggcaggttttcttctcccctgttctatagatgaagaagtggaggctcagagaggttaagtgacatgcccaaggtcacacagctagaaaggcatggagccagattccaatgcaggtctttctcatgctaccttctcccagtggcagaggcctgcttcctcatgggcaaacgcggaaagacacacccttaagcaggtctccctgttcctgcaaggctgggagccatgcaggcactcacgtggtttcctctctcttccccaggcctggcgtaaaggcgtgcagggaggcctagctctgtttcctggactcagtgacttcagacacagaagtctgtccatggctccttatcacatccgcaaataccaggagagcgaccgcaagtaggtcgtgggcttgctctcccgggggatggccgaacacgccccagccaccttccggcgattactgaagctgcctcgaaccctcatactcttacttgggggggcccttgccctactcctg

SEQ ID NO: 23720 - DNA, 2300 bp, Homo sapien
gaggatctaacatctgccacatgggagggaggtagacttaattggcctaaggtggcaaaacatcatgacaactaataagatcttggtgggctggcacctttgacctattatgttcttacctggatcactggatcctggactaggttgatgctccagacagacctgatcaacctgtttgtgatgtagtcctcctgggcctagtaaaatgtattctggctatggctcaacaatgttgtactgacattgtgtctgtgaaggtgttacatcgatctgataagacaaacttccgcctccagatactaggaggttggtgggcatatgaaacggactagctttgctaaagggtataatctgggttaagggcatagactgcaggacagttctccaggtggccttggaccaatttagttctctctcctttctcacttgtggttctctaggataactgtagaatgtgctgggaatgtagcatcctgtgatagagagagactaaccagaccagccagggccctgttccagtgtctcccagaaatagaatgtccttcatatatatatgtatatatatatatatatattttttttaattttaatttttatttatttatttttttttgagagggagtttcactcttgttgcccaggctggagtgcaatggcgcgatctcagctcatggcaacctctgcctccccagatcacgtgattctcctgcctcagtctcttgagtagctggcattacaggcatgagccaccatgcctggctaattttttattttttagtagagacggggtttctccacgttggtcaagctggtctcgaactcccgacttcaggtgatctgcctgcctcggcctcccaaagtgttgggattacaggcgtgagccaccgcacctggccgaatgttcttcatgttttagcccagtgtgtcatgcctccccacctcttccccctgcccctgccccctgcaattaggctgttgcattgccacaaagaaatacctgagactgggtaatttatatagaaacgaggttaaattggctcatgtttctgcaggctgtacaggaagcatagtaccaccatctgtttggcctctgaggaggccccagggagcttttactattggcagaaggagaagagagagcaggcacatcacatggtgagaactggaccaagagactgtgttggagggtgccacacacttctaaataaccacatcttcctggcactcactcactattgcaaagacaccaagccatgagagatccacttccatgacccaaacacctcccatcaggtcccacctccaaaaatggggacaattcaacatgagatttggcagggacatatattcaatccatccctggacccccaaatctcatgtccttctgacattgcaaaacataatcatgccttcccaatcacctaccaaaattttaacttgttccagcattaaactcaaaagtccaaagtgtcacaggagacatggcccagaaaaagaactaatcccagctccttgggaggccaaggcgggtggatcacgaggtcaggtgatccagaccatcctagctaacacggtgaaaccccgtctctactaaaaatacaaaaaattagcggggcgtggtggcgggtgcctgtagtcccagctgctcgggaggctgaggcaggagaatggcttgaaccgggacgcggaggttgcagtgagccgagattgcaccacagcactccagcctgagtaacagagcaagactctgtctcaaaaaccaaagaaatctccagcagcggaaatgtatgtagaactcattttggtcagtacttttccttgtacaggaagaaactgaggtcgcccggtgcaacgcccaacacaggttaagacaaagccgagactcaaaaccagaccccagcttccggtcccagcccatagattcttccatttccttcgccggaagtgatatacagcccctgttctccttcgcgtccgttgacgggacccaggttggggaggcggaagaatgggcgggaccatgggcggaagcacccctcctaccaggacccggaaacagatggccaccccgagccggcctatccggaaactggctcgaagaagacggggattggccatcgcttccggaagttgtgagctttgtttcggagcgggagctcttccgagacgcactgggggccggatggtgagttttccttgcgctctaacgggcaggctcgggagcgggagggtccgggcagttttagtagtgtctttgggacaacggctgcggttggtatttctcaagcggcaacgaggcc

SEQ ID NO: 23721 - DNA, 2300 bp, Homo sapien
ctgcctcagcctcccaagtaccctggactacaggtatgagccaccacgcccagctaatttctgtatttttagtagagataggattttaccatgttggccaggttgatctctaactcctgacctcaagtgacctgcccgcctcggcctcccaaagtgctggaattacaggcatgagccaccatgcccggccacaatattttacaatttaatgtcaaatttgaatgtgggctgggcgcaggggctcacgcctgtcatcccagcactttgggaggccgaagagagcagatgacttgaggtcaggagttcaagaccagcctggccaacttggtgaaaccttgtctttactaaaaatacaaaaattagccgggcatggtggcacacgcctgtagtcgcagctactcaagaggctgaggcaggagaattgcttgaacccaggaggcagaggttgcagtgagctgagatcgcgccactgcactctagcctgggtgacagagagagactccatctcaacaacaacaacaacaaataattaaatgttcctaattgtaggtttgttatgttctgctatcctgtctttttctttttccaatgaacaatttatgaatattgacacatttttaatgatgtggaaattttcagaattgtaaatgtttatgtatttaaaactggttggaaaagtactgtctcaaaaatgttaataaagctagcagtctagctttattaatattcatttattcaatagctctgacctttcttatccttggtttacccagctctgaaatggttgcaaagattactaaaaatatatgtaagttactttcataaattagaaactaagaagtaaaaattactttcaaaaatctgccattggccaggtgcggtggctcaagcctgtaatcccagcactttcggaggtcgaggagtgctgatcatgaggtcaagacatcgagaccatcctggccaacatggagaaaccctgtctctactaaaatacaaaaaattggctgggagtcgtggcatgcacctgtagtcccagctactcaggaggttgaggcagggagaattgcttgaacccgggaggcggaggttgcagtgagctgagatggcaccactgcactccagcctggtggcagagtgagactgggtctcaaaaaaaaaaaaaaaaagtctgcaatcataattacttacagtttaatctggaatttagtactctattctattttcaaagctgctatagggtatgctgtcctttgtagttccacttttagcagaattgaacgtttttctaacgggtacagatctttatgcttgagactgtgtggaaaccttggacttgagctccactctcagttattttttgtatttgctaaaacttaaatacattctgtccacctctagcatgatacctggtatgtgataggaacccaataaaagtttggctttgatgggagtgtatgtttctacattatttttggagggtaattaggtagtatctttccaaattttaagtttgtatgtgtttcattccagacattctacttctaggaatttagatatagttgtatatatgtataaggatgttcacattgcagcattgtctgtaacaagatttgaaaagaacctgaaaacaactaaaggtccattaatattgaactggctaaatacgttatggtacttttaattatgttactcataagcaagtaaattgcctatagccattaaaaatagaatctatgtatgcataaattgactgggataatcagtgtttaaggtatactgtagaatatgtacagttactccttttgtataaaaatagaggatatacatatatgtgaaagtaaatatgtatacaaaatatgcaaaatgtgaatgtaagcgctggtaaatatctagaagaacacacaaggaaccggggcgtggggcggatcgggcagagggacttccctgtgcctcactgtttgaattctgaagggtgcatacacgcccttattgacctgtgctactggcctctggctaaagagggcgctgtagccaccaaagtcctgtttacagatcaggagtctcagtaagccagcgtggctacgccatcacgaccggcggtggcacatgcgcaatagcgagacgctggagcgcggcgtaggtggctgccgagtcttttcctgtttagggtcttatcctggcattgagggcgccggactggcgcttttggccgacttggcattgggtgggcggcttcttgggacccacatgagccagtggcatcatccccgcagtggctggggccggagacgcgacttttc

SEQ ID NO: 23722 - DNA, 2300 bp, Homo sapien
aggtcacttgaggtcaggagttagagatcaacctggccaacatggtaaaatcctatctctactaaaaatacagaaattagctgggcgtggtggctcatacctgtagtccagggtacttgggaggctgaggcaggagaatggcttgaacatgggaggcggaggttgcagtgagccaagattgtgccattgcactccagcctgggcaacagagcgagactctgtatcacgaaataaataaataaataatacaatgtttttctgaaatgcatgaaaaattccaataggtgtatagtagcccaaaactacaaatgttacaaatgtctatagacatgacaagatacaaaacgtgacataaatctttcagaagctagaaaagctgtattgggcttacactttcaatttgctaaaagacacaacattggggtgagaacaaactcagttatagttgacacaagaaaatccagacctaggcggaatagggttcctagaaagtaaccagacatactaatgaataacataaatgaggtaatatgacataaaacataatggaaaaagaatattatgattattttcttcagtgtacagaagtaatggaagttctggactagctacataaaaaatattaaattctatgttctattaatacaaaataagtgtgtcgaattgtttgtcacataaaccaaaaaatccacacaaatctctttttccctgtaccctcaacttgcctgtttcctattctccactaaatgcttaaattcttcattttgcctagcccttgcacccaagcatggctgacaggatatcccaaaggcccaagattctatagtggctgtttgcaagagagaggaggctaaaagtaactgccatactggatccccttatgtgagaagaaagaaagtatcctgaatgcttctcacgtataaaagagcaggatggcagggtgtctgtgtggcccaaggagccagaggtagcaaaccatgggcaaaagaaatgtgaccaaaggctagaagagggaaggtctgcagtcagccttgtcttctacctctctggtgtttgcttctcataagcagagtccgtattccaaacatccggacactgaaaagaagactcctgctctggaagttgacaagaaggaatatccacaaatgtaaaaatgcaagatcaaggcttggcccagaaacgatgcctaaaatcaaggggttaaaaaaaggagagcagaagagagatccaagtccaacctggcccagcccaaagaaggtaggattcaaggagaagaaactaaaagagaagagccttggaccacatcctttcctacaatgggcagtcaacgaactttgccgttcaaccaagttacaaaagaaggctctttaatcccttctttggcccttaaaagcggcagcagggccgggcgccgtggctcccgcctgtaatcccagcactttgggaggcaggggaagaccgatcacgaggtcaggtgatcgagatcatcctggctaacagggtgaaaccccgtctctaccaaaaatacaaaaaattagccaggcgaagtggcaggactcaggaggctgagtcaggagaatggcatgaacctgggaggtggagcttgcagtgagccgaggtcacgccactgcactccagcctgggcgacagagccagactccatctcacaaaaaatacaataaaattaaaaagcagcagtaaattcattaatcagattcactgaaatagttttagaacaactgtaattgctcaacttaaacatccctttcctttctccccaaggatattgtgtatgtactatataattataaatgcatactattacatattatgaaatgtaacatataaaatataaatgttagttaattatattagtgaacatttatgagaaacattgagatgatctccctaacatgagagcctgggggaaagtgggactatcatgtctgtcttgcagatttcacctccccagagctcagccacttagtgctgttacacctttcctaccacctctgccagccaatcctgtcttgtggggaatctgacctccctattggctatcgcagacctttaaactgcctgctttgtgacatcattctcccaccaaaccgaccaccacctggtagcatcttggggtttcctgggcgtggcctgtaaatttgtatcatcacaaggggccagtgaccagtaaccagtgaccagtggccttcatactggacacatgcactggttggcttcagccacccagacatccgctagtatcgtctcttcttcccttctatctgcagttgatgtttctt

SEQ ID NO: 23723 - DNA, 2300 bp, Homo sapien
gggtaggtaggatattctcatcagttatgccaagaatcttttatagctttgatttcctgattgtgtatacaaaattgtttagtttttaaacttttccagttaaacaagaaatgaggaatgtaaaatttttaccttggccaagattttcttatttcaggtccctagaaagctgagtattgaactttgccccagatatcaaaaactctggtcaacatttacaaattctctccctaaaaagactagatcctgcttcctatattcacttagctattaccttaagaactgctagcaactgggcatattaactttctaatatcaggaacagcctctatgtggcgctagctatgtttacgactatgcacaccccttatatgtgtgtctcagttatagcttcttaaagtcttctcatcataatcttaaaatctaggatgtttgtaaattttctttacttgttaagctaaacattataaaaaaaagaactactttagagattgtgctgaatgggagcagatgcccctccctaccccaccagctgtacttctacctgtgcttccaccattagagtatccacctgctgggtttgtttgctgatgtatccctaacacctagaacagaacctggcacatagtagacactcagtaaacatttactgagtgagaggttgaatggatcagattttgacctgtgttgcctcctgccaggaccccatctgcactataatgcccacccaatgaccagcatctccagtgcatcaatttctttaggcccaacccatcatgtttacattctgaagagagtcagtagagagagttttgaagacacagtagagtgccctatacaattatcttcccagatttatctgcagtagatccatgagagttgatagtagacccatgcacattaatgcttgctgggggcagaaggggaggtgatatgatgcaagcaagtactttcaaccctaagtctgaaaagttgatgactacacaaaatcacttcaggtaactccaacagaaatatacacaacggaggttgggagaaatgagagatctggaggctggctaggtggaggaggcaacacctgaattagggatttaagctagaccttgaagaataggtcatgccatcacactaacaaactcacagggaggctcccaaattttgggaaagtgtcccccagagacttagacttttaaaccaaagcctaatgtttcacaaagtcttctgagacagaatgattagcaagcttgtaggacctttttgtaaagaggatgtatatggattcgtacagacacacatctacatgcagaacgtgccattctgtatttgatgcataaaaccaccttgtcccggtctcagggcaggaacagtgtcatacagatttttgtgtctccactgcttttgcatagcggctcttagagattaaacgctttttttccaaatattttataggttttttgacattaaaacgttagtctcatctgggtgcggtggcacacgccagtaatcccagtactttgggaggcagaggcaagaagatcgcttgagccctgaagttggagaccacagtgagctatgatcacaccactgcactcctgtgacagcctgggtgacaccgcaagaccctgtcttaaaaaaaaaaaaagttagacttatgttcttttctaagcaataaaattagtcttagatattgcctaatatctaagactaccaatttttgtgtagaatgtaatacaagctaaaaaatacattcgaaagactttctgtcccccaatttataaatcctggttagtttagctaagtctgcagttgtgctgggatcagcaatccctccttaaatgcaggagtattgtgagtgtgatgagggactaccccaaatcaaaataattttaaaagcaaaccttagcttgctaattggttccactttcttccttgttccttttcctttaccaagatggccgctgtgtcgttcgctcctcattggtcggattttccgcaggtgccgattctagccccacctactagctctccgttccaagtcctaaatcactgggaatgtaatagacagacgaacgggagtgggcggagcgggcgccggatgtgacgtttccggaacctccgggtgtcatccgcggggaaaggtggggaagggtcccgggaacgtggtggggcagggcctccgagcgtggttggactttgaaggggatcggccgccgtgagtgtggggcctgcagcctactctccccgagtcccctgcccggcctgcctcgctcgaggcacccgacggcttctgtctccgcggg

SEQ ID NO: 23724 - DNA, 2300 bp, Homo sapien
ttttaaaagcaaaccttagcttgctaattggttccactttcttccttgttccttttcctttaccaagatggccgctgtgtcgttcgctcctcattggtcggattttccgcaggtgccgattctagccccacctactagctctccgttccaagtcctaaatcactgggaatgtaatagacagacgaacgggagtgggcggagcgggcgccggatgtgacgtttccggaacctccgggtgtcatccgcggggaaaggtggggaagggtcccgggaacgtggtggggcagggcctccgagcgtggttggactttgaaggggatcggccgccgtgagtgtggggcctgcagcctactctccccgagtcccctgcccggcctgcctcgctcgaggcacccgacggcttctgtctccgcgggctggcgcctgaccagccaggcccagcggttccccgcctactgcatttgaaagatcccgaaaaccctggatgattgtgcctggggttggcaagttcgtcttgagtgccttcaagaagggttcctcaagcagttgtcgatagagccctccctactgtatacgccccctccgctcattcctgctacttcctttctcctcctcgtatttccccctcggtcctttacgccgcctttccccctcatttgcagatgctgcatcccctttttggaattgctcaaccaggtggtaaccggcgccgcttcctggccttgggaggtggttcctttcttaacccacaagaacctctcccaagaggtactgagatgcaacaagcatcctctgtttcagttaactttcatgggccgtggactaggtttactaattacttggggaggttttagatatgcttgcggctttctgagtccctaaggaggcctcgtgagagatggactatctctgcatccctagtagtcctcacggcttttgtgctattagtgagggtgttttagaggggaaggtttgtggaggaattgtgacccgaatattgaagagacctaaagatggaattggctgagagaagactacccctgagggaagagttgtagtagaaaagaaaaactggatagataaatgaaactgaaatgtgaggatgcctgggcggattggaatcctgactgaagcaaaagatctctgttggggagggccagttgccacagggccttgaattccaagatttattctactgtagtttgtgtattctagagcatactgattagggtttgctgtaatgcaatgtgtgtcaaatgcccagttttattttggagatgatagtggtgatatctggttggaatttggaatctgattctaacagcaactatatctagaaagactagaattactggagttttgggacaccaggggtttttgcaatgcaagttaccatcgtgcctttttgttattcagtgtttagtctatgaagatgagtaaatggttgttttcaagatttaagtctcttgccatgataatgatgaatgaatgattttatagattgactatagtggtttagtgagcagagttacaattatgagcattaattcccagaccagttcccctaactcaccttgtgctcaaatatgaaaaaggataccacagaaaatgtcagttactctcagattaagtaaaaatggtcaaccttgaagttagttaacaatcctcaagaaagttcactgagtgcactctgccaggtactggggtggaggtatgtgggtatctggaaggagaaataatagaaaataaaagatgctgttcccacttttacagtgctgtgggcggagccccctaatggcaaaggatttgattaacttgaactgaacctttggttggtccactgtggttctactccttataccacctaattatggtacaggggttgtatgttttctagtctgccagtactctcatcgttgtgatttgggcttccttgagggtctcagccttcttgtaggaaagtccttatttaataggagccacagcatttggtatgtttctcttatattttcttcttaaggtagaggtctgtgagataaactgtaaaactgctgggatgatgagggcaacggtattgatgccatctgttttttctgtctcagaacttggtcctgatgtctgaccatggagatgtgagcctcccgcccgaagaccgggtgagggctctctcccagctgggtagtgcggtagaggtgaatgaagacattccaccccgtcggtacttccgctctggagttgagattatccgaatggcatccatttactctgaggaaggcaacattgaacatgccttcatcctc

SEQ ID NO: 23725 - DNA, 2300 bp, Homo sapien
ggttttctgctgagcgtgaggaagaactttctgacaaatctgttcaaaaatagatcagtctgccttggaatgtctaagtactaggatgttgaaacaaagactacacaatcagaaaaaaaggtctggggcaccagtgcccatgttttcagttataaaggcccctgttgcatgccaaaagggagcattcttctctcaccatgtgacagtaggtatactttattatttgggtgacatcatagctaaaaaaactgtgatgaattcagtaattcttttaaattaatatatattttagggatgacactatttgttcccaagtttaggaatcaaagaatgagtctagaatgtatatacattttaaaaataaacaaaggtaaatgggcaaacactgattccatctacaggtgggactggtggtagtaatgagtcccagactcttaccacaactaccacttaaatagcagtctggcttccagactgagaaccactagcctagaatgaacattttaaataagggtttttttgtttttgtttttgtttttgtttttgtttgaaacagagtctcgctctgttgccgggctggagtgcagtggtatgatctcagctcactgcagcctctgccccccaggttcaaacaattctgctgcctcagcctctcgagtagctgggactacaggtgcgcgccgccacaccgggttaaattttttttttttttttttttttagtagggtcagggtttcaccatgttggccaggatggtcttgatctcctaacctcatgatctgcccaccttggcctcccaaagtgctgggattacaagcgtgagccaccgcacccagccaaaaagtggttttttaaaatgacttttcaggccgggcacggtggctcacgcctataatcccaatactttgggagactgaggcaggcagattacttgaggtcaggagttcaagtccaggctgaccaacatggcgaaaccccacctctactaaaaacacaaaattagccaggcatggtggctcgtgcctgtaatcccagctactgggaaagctaaggcagaagaatcgcttgaacccaggaggcgggggttgcagtgagccgagatcgtgccactgcactccagcctgggcaacagagcaagaccctatatgaagaaaaaaaaaaaaaagacttttcagaattttctaggactccacctttcttttttcctattgcagagctgcagccacgtgactgttgtggacagagcagtgaccatcacagaccttcgatgagcgtttgagtccaacaccttccaagaacaacaaaaccatatcagtgtactgtagccccttaatttaagctttctagaaagctttggaagtttttgtagatagtagaaaggggggcatcacctgagaaagagctgattttgtatttcaggtttgaaaagaaataactgaacatattttttaggcaagtcagaaagagaacatggtcacccaaaagcaactgtaactcagaaattaagttactcagaaattaagtagctcagaaattaagaaagaatggtataatgaacccccatatacccttccttctggattcaccaattgttaacatttttttcctctcagctatccttctaatttctctctaatttcaatttgtttatatttacctctgggctcaataagggcatctgtgcagaaatttggaagccatttagaaaatcttttggattttcctgtggtttatggcaatatgaatggagcttattactggggtgagggacagcttactccatttgaccagattgtttggctaacacatcccgaagaatgattttgtcaggaattattgttatttaataaatatttcaggatatttttcctctacaataaagtaacaattaacttatgtttttgtgcttcagagtgatccatttgatcaagcattgtataaacaggttaaaaaaaaggtatggttgttttggaaaggtgaaggaaaaatggaatttgagatatactgacactgatggtgtgtcccagttcacttttaattactccttgttttttatctgcctgttgccatcttccagaggtgttgtgaagtcatctctgttcttttggtgctgtctcaaatgggtcaaccattcacttcctccttatgccctccatgcttttggctgaggataatgaagcctttgtttggagtaccaggttacactccaataaatgattacatttcccagccaccccaccctaccaatttcattgtgttggctgttcttttctgactaaggcaatacctaggaaaacgct

SEQ ID NO: 23726 - DNA, 2300 bp, Homo sapien
cctggaatttagacttaggcactaaacacgcaggccagtgatcaaatgatgagtaagtgaacctcacaatgacaacagtgttccttctccacagggaacaactgcaggtcctcaaggaaagtgtttttaaatctttcctctgggctgtctcagcagaggacactcctcattcacaccatctcctgcctcaattttcagttaatgaggaagccagacctgtaccaagccattgcaccaggtgacccaaaaccacctggaactccctgtgcgtttagcagggatgcaatgcatgcttcttctattgaagcgggggtatcctgggcaccgggtggggaaagtttaagaaacacagatggctgaggcctattcactgagtttctgtttcaatagggctaggtgacacctgagaatctgcattgtgagcacattcccatatcatgctgctgctgcactctggtggtccccatgctttgggaacctctgtgttgaagacgaagcagagtcaggaaggccagtcaggaagctgcgccccactccaggccagataggactggagcctgaggcagcgcaggccagcagggattgagggaggacacagagctgaggggcatttctggtcgggggagcaccaggctgtggtgcccaggtggttgtgggagcatgagggagacacagggttctagactgactgacttctagcttgaagggccgaggggtggacttggaagttggcaacccaggaggcacagcagctttgagggtagggaagaagggttcagttttagacaggatgagtttgaagagctggagagtcatctggattgggatgtccaataggcaattgatcattttagtctggatcagggtgagggagggggaccatgagaatgtggagttgaaagtaatactgcagagctggtagctgataatgtgggaaatgaaccagctacctagggatagtacatgaattacacaaagaagagcaatcatcagccagccatggtggctcacacctgtaatcccagcactttgggagaccaaggtggagggattgcttgaatccaggagttcaagatcgagaccctgtctaattaaaaacaaaacaaacaaacaaaaagaagtccaggcgtagtggctcacacctgtaggccaaggcaggtggatcacgaggtcaggagctcgagaccagcctggccaacatggtgaaaccctgtctctactaaaaatacaaaaattagctgggcatggtggcaggtgcctgtaatctcagctactcaggaggctaaggcaggagaattgtttgaacctgggaggcggaggttgcagtgagccgagattgcaccaatgcactccagcctgggggatagggcgagactctatctcaaaaaagaaaaagaagcagctcaagaatcacaggactgtggaaaatcctacaggccaagagtcttgttaggtgtgcctcaaccctgaagcaggtccctcagtctgcagatatttagagatatttaaaggaaaaccaggaaggagccaagagagaatgaagcctaaggtgtcctgagaccctcagagaactcagcccaagggttaggagcttgtgtcaaggtgcagcaggtgagtagggcacgcaggatttctttcctgggtacggaaggcatttctcttcagctttcattggtcccaggctcgtgccagacaaggcatgattgcacccattttggggacagtgcctgggcgtcccaggcagacccaggggccgcatgcagcagggcctgaggagggaggtgtggacggaggaggcccgctgccattcttggtatggttctcactccaggagcacagctgcatctggtctcactctgggcagcttataaggcctggtgtgagttttgtttatgcaagtgcagcataaaaggaacaaatctaccagcaccggggctgttgccactgagtccttttgcatacatttttcaaatgataactcactctacccaccccccttccctacccccaaggcgatttattgaaaaaaccaccttatatggtaatattgctaacacaccgtcagctggcctttttagggactttgtttaaagaagatccgcctctggggttttatattgctctggtattcatgccaaagacacaccagccctcagtcactgggagaagaacctctcataccctcggtaagtactgtacggcttttgccacctcttcctttccggggctgcctggcctcctgggtgcgggaggtgcctccagattggcctggcttctgtgacgctggcccagatcacaca

SEQ ID NO: 23727 - DNA, 2300 bp, Homo sapien
ggagcccaccaccacactccgcttttttttttttctctctctttagtagagacagggtttcaccatgttagccaggatggtcttgatctcctgacctcgtgatccgccctcgtcagcctcccaaagtgctgggattacaggcgtgagccaccgcgccaggccacttcaccataaaatttttaaaaataatttttaggagctctgttactggtggagggtgcccaggttcttgacattttgaacaaagaattggacaaaacgtacaaagcaaggaaacaatgaagcaacaaaagcacagatttattgtacatcaaagaacactccttgcggtaggaagggcccaagcaagcagcaattacagaattttctggggtttaaataccttctagaggtttcccattggttacctggtgtacaccctatgtaaatgaagtagtggccagcgatcagtctgattggttgcaggaggggaccaatcagaggctgaagtaaagttatgaagttataccccatgcaactaaagacttggcctgccaccagcctgactgattgcccgcggggaccagtcagaggtactttcaattttttatctgccacccagaagagggattagcttctggtccttttgttacttgggctagaaagttggggttttccttttgatttagttctaggaagtcagcctaaatcggccttaggttccctgtctccagaccctattttcctgcctcgtagcttttaggagattaatgcctgcctgcagacaacttcctcatttaactttcacaacacccctgaggcagcaagatcctggcgaggcagagagcctctcaagcttttttggatgaatattttccaagtctgagtttacataggtaaagaaatgtaagcagttttttttttgttttttgttttgttttgttttgttttgttttgttttaacagaagtggctgctggagtggagatgggaatgggtaggactttagccgctccagtagccattaacgccccaccctggttatccttaaaaaattcgattaaaaaaaaagttcttaatatataaacatgacctcagccatcctatatatacatcaacataagaaaaaggtcccgtgctttttatgggaacagcttcaagacaggtatcccagcccccggcccctccccagcccccttgcaatcagatccttgtcttctaaaacctgccacacctaagagcgctgcctgaaggccggtttggcctgttgactcctggttttgactgttggtgatttaagcgattggaactggaagcaccatttgacaacattttgtaaatcattacttctgaggttgttatgacgacggggtgtggcagtccggcttcacctgtggcagcagcttaggtccctgccctcctgcagagcacacttcaccgacagcaggactcaggttttatacaagtctctactcgccattgcttacgtccaagaacccagcctaccaggtttaaacaatttccagtcacatacctgagccaccaccaccttatcctgaagggatttttgggtataatgcaaatcgattgaccgaacatttatttacttattcaagacacaaactaagagatggggtgtaactgattatctaatttgttaatttagtcaataatatgccagcattgtgcaggggaattacagggaataggaaaaagttaaatttgtgtaaatcatcagattgagtcattttcctactttaaaacttccattttcttccgatattaaaataaaaaccagacaacaagcacctggggggggggaaatcccctcttaaaattacaatttctatttttaattttgtcttcagttataaaatttattttaaagttatacaaaaatgaagtggttggattgtggaattacgtcttttaaaatgttatttgtccaatgaacaaaaaccactcgcaccgcaactccttttactatcaaattctgcaccgttgcaaaacttccttcactcaacgcttctttacaaacatcgcgatagcggagcggtctcttgggcgcaccccgccgcatgttcaaccccacccacttcctgtctgacgatctccttacgtcaacggtgcgctggagcgagtgagcagcgatacctagggcggaagtgctctcggcggaagtgatcgctgtgtgaatcgtgggtgggatggccgcgggccgcctctttctaagtcggcttcgagcacccttcagttccatggccaagagcccactcgagggcgtttcctcctccagaggcctgcacgcggggcgcgggcccc

SEQ ID NO: 23728 - DNA, 2300 bp, Homo sapien
agaacgcccttcaatttgggtttgtctgatgtttccttgtgattagattcaggttatacattttggcaggagttctatgtgagtggtgttaagtcatccgcaatgtcttacatcaagaggcacatggtgttgttttgtctcagtattggtgatgattgtaactttggtcatttgggttaaggtggtgtctgtctaccagatctctccactacagttactattgtaattatgtaattttagagatgctttgagaccgtgtatacatcctgtacctcatcatgctttcacctgctgccactgatgtctttttaaatccatcagtccttctgtgttttctcttagcattctacagtaaggaagagctttcctttcctaagggatgggtctgcaaactcaatttcacatctttgtattcacttttctcttcctctcatccttcccctttggtgtgcttttggggatatgaggtatatggtggtggctctcgtgcttggggagaggcctgaatccttctctaagcagcaacttgcttgtctttggcaggactgacctggcatggggctaaacgcatgctgtgtcagatcatcggcgtttccctcaggcctggggctgtgtgtgggaatgtggtctgttgccagctttctgtgctcagcctgggcttaagtgaggacagttttagggggagaaaagaactatgggtccccactaggaagccatggctgacccatggtccaggctgaatttgttcatcaaagctcctctttccctacccctacgaacccacacttcacacttagagcacgtgtgtacacacaggcttggttggatttctttccatcttgacaaaaaacaaaataaagtcctagtgtgactttgatcattgtgaattaaggacctttttgtgtgtctctggttttaggagagcctcatttgtgtgattgatctgaggctctaaaagtttctgagcaacattaagaatgtctcattaggatcttctctttaaaaatatcttaaagatcttctttttgtttctgctggtgaagctccctagggaaccagagacatgggaagatgaattggaggctcaagaagtaccagagagaggatttgcaagaaaagttggggtcagatgtgcacctgagtggtatgaagcagggaaatgcttttcaaatagtgtggttcatttttttcctttttcccccttctctctctctttagacaggctcagagctcagcccagttgatggacctgttccaggtcagatggactcagggccagtgtaccatggggactcacggcagctaagcgcctcaggggtgccggtcaatggtgctagagagcccgctggacccagtctgctggggactgggggtccttggcgggtagaccaaaagcccgactgggaggctgccccaggcccagctcatactgctcgcctggaagatgcccacgatctggtggccttttcggctgtggccgaagctgtgtcctcttatggggcccttagcacccggctctatgaaaccttcaaccgtgagatgagtcgtgaggctgggaacaacagcaggggaccccggccagggcctgagggctgctctgctggcagcgaagaccttgacacactgcagacggccctggccctcgcgcggcatggtatgaaaccacccaactgcaactgcgatggcccagaatgccctgactacctcgagtggctggaggggaagatcaagtctgtggtcatggaaggaggggaggagcggcccaggctcccagggcctctgcctcctggtgaggccggcctcccagcaccaagcaccaggccactcctcagctcagaggtgccccagatctctccccaagagggcctgcccctgtcccagagtgccctgagcattgccaaggaaaaaaacatcagcttgcagaccgccattgccattgaggccctcacacagctctcctctgccctcccgcagccttctcattccaccccccaggcttcttgcccccttcctgaggccttgtcacctcctgcccctttcagatctccccagtcttacctccgggctccctcatggcctgtggttcctcctgaagagcactcatcttttgctcctgatagctctgccttccctccagcaactcctagaactgagttccctgaagcctggggcactgacacccctccagcaacgccccggagctcctggcccatgcctcgcccaagccccgatcccatggctgaactggagcagttgttgggcagcgccagtgattacatccagtcagtattcaagcggcc

SEQ ID NO: 23729 - DNA, 2300 bp, Homo sapien
gttacgaagttagtgcagcgaattcctgtataccctttatatactttctcttgcttgtaaatgtcttacgtaattatggtatatttaaaatgaagaaattaacgttggtacaatactgttaactacagactttttggatttcatcagtttttccaccaatggtcctttttcagtcataggacccaatgtaggttactctattacatttaattgtcatgtcttcttagatatgaagcaaacttaccaactgtagtacagtaggtacacactgtgtgtatagtttttttgtttttagcctcctaatatccagccacatcactgttttccaaagctgctactatgtagccttttgggtctgttttctttcacttagaaaaactcatttaaaattcatccatgttgttacgtgaatggttggttcctttttacaaattgagttgagcttcacgtaaaattaaccatcttaaagtgaacaattcagtggcatttagtacattcacaatgttgtacaaccacatctccctccagttttaaaatattttcatgattccaaaaaaacaccgttacccattaagcagttactcctcattcctacccagcccccagcctctggcaacaaccaccagtttgcctttttgtttctatagatttacctattctgagtatttcatataaatggaatcatacaatgtgtgacctgttttgtatctggcttcttaacaaaatgtttttggtggggcacaacagcttatgcctgtaatcccagcactttgggaggccaaggtgagtggatcacctgaggtcaggagttcgagaccagcctggtcaacatggtgaaactctgtctctactaaaaatacaaaattagctgggtgtggtggtgcatgcctataatcccagctacttgggaggctgaggcatgagaattacttgaacctgggaggcggaggttgcagtgagccaagatcgcgccattgcactccagcctgggcaacaagagcaaaactccatctaaaaaaaaaaaaaaaaatgttttcaaggttcatccatattgtagcatgtatcagaacttcttttatttaaattgtggtaaagtatgtataacttaaatttgccattttaatcatgtttatgtgtacagtttagtggcattaattacattcacaatattgtgcaactgacaccactgtctgtttccaaaacttcatcagcctaaacagaaactctgtcccattaagcaataacccctcatttcctgctcctcccagcccctgcgaacctctcatctactttctgtctctaggaatctgcctcttctagataattcatatcagggaaatcctacagtatttgtcctttgtgtctggtttattttacttggtataatgttcttaaggttcatccttgtaatagcatgtatcaaaacttcattccttttttggctgagtaatattctgtcatgtggacatacgcattttatgtatccatccacctgctgatggatgattatgttgttttcaccttttagttgtggtgaataaatgctgctctgaacattggcatacaagtatctgtttgagcctctgtcttcagtttgattgggtatttacccaggagggcttctttcacttaacaaaatgtttttggccgggtgcggtggctcactggagggaagtagcttgctgacccctggtcttgagtgtgtatctagaaatggaattactgggtcaggcaggatgcaactgtttagctttattggataatggtaggcggaatcccaaagtgcttagatcacagctttgacaacacttggttttatcagatttttaaatttttgccaatttggtccatatgtgatggtgttttattgtgattttaatttgtatttcctgatttctaatggagttgaacaccttttcacatgttcataagccatgtgggtttcctgttttctagcatgcctattaactttcctgttggtggtttgcttttctaaattaatattgactaattgatattccaaaaatgtttactctctgtgtttctgcagaacaaatagtggagaaagatgaaggtccatattatactcacttgggatctggccccacggtcgcctctatccgggaactcatggaggagcggtgagtgatacacagatgtccaaggagaaatggatgtgctgttaatggaatacggatattaagcgcctctcatttttctttgccttgtaacagacaatatacagaaaggaaaccctgataacgggcttagggaaggtttactgtgggatcctcacttcc

SEQ ID NO: 23730 - DNA, 2300 bp, Homo sapien
tttgcttcagctcataccattctttctcttaactttcattttccttctcccctggttctgaacctgcctgccctgtgcatgaagagaagttcttccactgcggtgactttcagcgtggacagtgatcatctggggatgtcagttgattgttccactaaaggccgctgcccacagatccgctaagatgaaaggcttctcccaaggattctgcaacgctcacctctctcaccccttagtagctgccgattctgtctgccatctggttactctctgcctttaccctcaagattctgcccccagaagcagctccaccccaccctcactcctggcaatcctgtccagcctctcaacatcgagtttctgtccctccacacagcaggcagacaatcacactctggacctttctcctgtcttgcatttctgtccctaattgactagttcttcccctgctcattcattcatccagcaccaagtgcctctgagggcctgccctggggtcagctctgggatgctgccggactcattcctggcctataagaccagtggtgagagagccagtgcacagctcattttaaaggaggtgctctgagattctgtgacacaggaccctgctctgagctatcaggaaggactgaggggtagaggggtgggaccttcagcaccagcacccatgaacggccctagtgtcctccaacctgtcatccacgtctagtcagggaccagtgcccggtgcttccatcattgtaatgcctcttacttgggcatctctcctgactcgctccagaaggcactgtttcctgcaggttactttggtcccatgagcctgggttctatcacctggagtcccatctcctgtcccatacagtccacaatctttagcctggcattcaaggcctgccacactccattcccagtctgccttttcagcatgcactcagcccagccaagtgactgccgacctgcttttctgctccttcactactaactgttgagacgtgttccatcagaaacatgggctcccctggccgggcgtggtggctcatgcctgtaatcctagaattttgggaggttgaggtgggtggatcacctgaggtcaggggtttgagaccagcctggccaacatggtgaaacctcatctctactaaaaatacaaaaatttgccgagcgtggtggtgggtgcctggaatcccagctactcaggaggctggggcaggagaatcgcttgaacccgggaggtggaagttgcagtgagctgagattgtgccactgcactccagcctgggtaacagagcaaaactctgtctcaaaaaaaaaaaaaaaggaaacacaaacacaggttcccccatggtagccattggggaaggggtgttgttgccaatggtaaacaacctacagatactccttcttcaggttctttcatagaattctgactttgctcccagtgagaaggagtgcatgatgaaggatagctggctaattgagcagtgggctgtgaggtcacatcccactggggagggcgagacatgttaatcaggcctaaaggcgagggagtgtggaatttggccccaccatccagggcagtggatggcctagtggtatggatctgaggcaggctatccagcttttctggctctgtatcttaccgaattcaaccttgggcacattactgtgtgcctcagtttccttacctataaaactatcggcataatagtgtcacaacattatatggaagcaaacatctcttgaattaggtttggggcctcttgtctctggagtcaaattgagttattaacaatcatcctgtccccgccaataaaagtttattctgtgttttggggcacttacatggactcctgataccacagagcccctctgacataacccatggctgtgctggcgagggctcaggggcctgccttgcagggggaatggcaggcgggcctgcacagtggcccagctcaggggcaacagcatcttcctctgccctgaccttcctctctgttctgtggcagcttccacttcaccatcggatgtttgccactcagactgagggggagctcagagtgacccaaattctcaaagaaaagtttccacgagctacagctataaaagtcactgacatttcaggtaaggtttctctcactcttcctacggcgcttggataagattttgccctttggaaggacagagggtcaggggcttggaggagggggcttgctgctggtgagtggcttctcaagatgtgttgctgctggacaggtggagctcggctgcccccacctcatgggatggcagtcagg

SEQ ID NO: 23731 - DNA, 2300 bp, Homo sapien
ggttgtttaccattggcaacaacaccccttccccaatggctaccatgggggaacctgtgtttgtgtttcctttttttttttttttgagacagagttttgctctgttacccaggctggagtgcagtggcacaatctcagctcactgcaacttccacctcccgggttcaagcgattctcctgccccagcctcctgagtagctgggattccaggcacccaccaccacgctcggcaaatttttgtatttttagtagagatgaggtttcaccatgttggccaggctggtctcaaacccctgacctcaggtgatccacccacctcaacctcccaaaattctaggattacaggcatgagccaccacgcccggccaggggagcccatgtttctgatggaacacgtctcaacagttagtagtgaaggagcagaaaagcaggtcggcagtcacttggctgggctgagtgcatgctgaaaaggcagactgggaatggagtgtggcaggccttgaatgccaggctaaagattgtggactgtatgggacaggagatgggactccaggtgatagaacccaggctcatgggaccaaagtaacctgcaggaaacagtgccttctggagcgagtcaggagagatgcccaagtaagaggcattacaatgatggaagcaccgggcactggtccctgactagacgtggatgacaggttggaggacactagggccgttcatgggtgctggtgctgaaggtcccacccctctacccctcagtccttcctgatagctcagagcagggtcctgtgtcacagaatctcagagcacctcctttaaaatgagctgtgcactggctctctcaccactggtcttataggccaggaatgagtccggcagcatcccagagctgaccccagggcaggccctcagaggcacttggtgctggatgaatgaatgagcaggggaagaactagtcaattagggacagaaatgcaagacaggagaaaggtccagagtgtgattgtctgcctgctgtgtggagggacagaaactcgatgttgagaggctggacaggattgccaggagtgagggtggggtggagctgcttctgggggcagaatcttgagggtaaaggcagagagtaaccagatggcagacagaatcggcagctactaaggggtgagagaggtgagcgttgcagaatccttgggagaagcctttcatcttagcggatctgtgggcagcggcctttagtggaacaatcaactgacatccccagatgatcactgtccacgctgaaagtcaccgcagtggaagaacttctcttcatgcacagggcaggcaggttcagaaccaggggagaaggaaaatgaaagttaagagaaagaatggtatgagctgaagcaaaggatggttcagaaagggggagagattaggagagcgcgtgggaagtgccccctgcttgggttctgctccggtagtgtgggatttggaggaggatcaaggtcagaggcccagtcgaccttcccaaggccccggccccgctgcagtccctcgcacccacgccttgactctgggctatgactcctgtcttctgctcggtaaaccaatcctttttttttcctgtgcccgcagtattatgactgttcatgtgtctgtccgcctgacctccaacctccacccagctcgggagctcccctagagcgcgccagagcttgaaatttcgaatgccgttgtcgctgagtgaatgaatgaatgaaagaatgaatgagagaaaggaagaggagccccccattgccagtgccgcgcgcgccctccgggagccagtcctcaagccccgacagccgccggccccgcggtccctccgcagctcccgtcccggggagagcagccccgaccctgcccacgctcaccccgcggatcccgcggaggagaggcgctgccgcggccgggctccatgcagccatgcccggccgacgtgacccgccgcccgaggtcactgtatgcccgaaagacgcggagcgggggaccgagagccgccgccgtgggagaggccgccccctgccgcccggaggccgtcagcctcccggccccgccccggaggcctccggtcgcctggctccggccccaccccgccatcccctggccctggctgactcgccacccccgacactgcagcgcctgccgacctcggggccccgccctctgccttcgctcgcgccgctctccttcagtctccccagggcctgtttcatggatagggtccccttgcccgcgtgaaagtctcattcctcctcagctcagaaacactccaaggt

SEQ ID NO: 23732 - DNA, 2300 bp, Homo sapien
gctaatggtttgtatttttagtagagatggggtttcgccaatgttggccaggctgttctcgaacttctgaccttgggtgatcagtgcgcctcggcctcccaaagtctttggattacaggtgtgaaccaccttgcctggccaaaagtaccattttaaataaagaaaaggaggaattctgccaatacaaatctgtgagcttgccatgggtcacttggttacaagtgacaaacccattaaactgccttcagtgctcatttccagcattgctggtttccagctgtacaaagtcaaacatttgtctccttttatctgttttcttctttatcttgcttcatttccaaagtagttctccctgcatggttgcaaagatggttgccagcaactccagcctttctaccagcttagcaacatagaggaaaaagatcaatgtctgggaacaacagacactggggaatacaagactggggaaggaggaagggggcaagggttgaaactacctattgggtactatgctcattacctgaaggacggattcgttcatactccaaacctcagcaccatgcaatatacctctgtaacaagcctgcatatatacccccgattctaaaatagaagttgcaaaaggaagtccctctaccaattctcattggtctggctcagaccatggggccgaccctaaaccagtctctgattagccagacttgggtcctgtttccattcctaaagctggggataggtgcgcctcatctaaaccatgctgtctgaatagcaagggaatggttcaccattactaccctgcttgagaaaaaatttttttgacagtttaaattgcatcattgacagcaatgaagaaaacttagcaaatcatctctaaacattttaaaagaatgaagcagaaaatgtaagacaggctagtaattgatccaaaggagaaattctgaaggccagaacataggagtcagttaatactgtaataaataaattagacaatatccatatataacaactataggtccaatccatccaagtgcaacgctgaagggacgtattgattgcataggccagaatgttggcaaaaagctggtaaatcctgcagggtgccaccagaccgcgtgctgcaaacaaataacagctagagagaggagaggcttggttgaatttcggccttgactggtctgaagactccagaggcgggacgaatttgcggacagttctaccccatcccacatggcgtcagcttcccttccattctcatgactccatggtccatggctccaacctgggcctctgttaggctgtgtcctgtggcaccttaaactcaggcaaattaagaactgttcgtggactctgctcagcccccacctaaccctccatccaagtcattgtccaagccagaaactggagtcatctcagataccttcccactcacacctccacatgcagtcgctcgattccattcacctcccaagtgtctcagttcattcttccatccctcccgccactggtttagttaggcccctccattctcacctggaccatcgcggtagcctcggagcttctgactgtgtctctggttgcagcccctacacgctctcttccttacaggagcggagcgatctttctcaagcgcgaatcaaatccttccacgagtccccgcacctggagcgaaggccaaactcctcagcttagaagctagactgccagagtagggagtgggaatggaaaagtacatcaggagcacgaggggtattcggatgagggaaggccagtatagggcgccgagaccttggagtgtttctgagctgaggaggaatgagactttcacgcgggcaaggggaccctatccatgaaacaggccctggggagactgaaggagagcggcgcgagcgaaggcagagggcggggccccgaggtcggcaggcgctgcagtgtcgggggtggcgagtcagccagggccaggggatggcggggtggggccggagccaggcgaccggaggcctccggggcggggccgggaggctgacggcctccgggcggcagggggcggcctctcccacggcggcggctctcggtcccccgctccgcgtctttcgggcatacagtgacctcgggcggcgggtcacgtcggccgggcatggctgcatggagcccggccgcggcagcgcctctcctccgcgggatccgcggggtgagcgtgggcagggtcggggctgctctccccgggacgggagctgcggagggaccgcggggccggcggctgtcggggcttgaggactggctcccggagggcgcgcgcggca

SEQ ID NO: 23733 - DNA, 2300 bp, Homo sapien
aaaaaattaaaattattaatttatttttttcaggggaggaaaaagagtatgtaaatttgctttacataactgactgaaaaatatattcaagaaatagtaaatataatttaatacagtctcatgtgccctaacatcattaacttaatgtgacaagtgatatatgaatgaaataaaattactggaaacatgaacattgtgcagtcaggtacagggcaaactcctttacattgagcaccctgcaccaccatttgctgagctatgactgaagtctcccactattttccttttgttttcttcattccaccatggtggaatgaaggcgttgcttggctgtcacttggcattaataccacacaaaagcctgtacatgaatgttcacgacagcattattaataatagacaaaaagtggaaacaacccaaatgttcctcaacagatgaatgggtaaacagaatgtggtatattcacataatggaatattactcatccatagaaagaaataaagtttttttcttttttcttttttttttttttgttttagagacaggatctggctctgtcacccaggctggagtgaagtggcgccatcttggctcactgcagcctccatctcctggactcaaggaatcctcccgcctcagcctcccgaatagctgtgaccactggcacacaccattacgcctggctaatttttgtgtttttgtagaggcggggtttcaccatgttgcccaggctggtctcgaactcctgagctcaagtgatccgccagcctcagactcccaaagtgctgggattacaggcgtaagccacaactgtgcctggccagtaatgaagctttgatacatgctacaatatgggtgcgttttaaaacattatgctaagtgaaagaagtcagtcacaaaagaccacataatgtatgcttccattcacagtgtatatgaaatgtccagattaggtaaatccatggaaatagaaagtagagtagtggttgccaggggttgggaggagggaggtgggtaataaagagtaactgctaataggtatggggtttcttttcggggtgatgaaaatggcctaaaattatggttaggctgggcgcggtggctcacgcctgtaatcccagctttgggaggccgaggcgggtggaccacttgaggtcaggagttcaagaccgagaccagcctggccaacatggcgaaaccccgtctttactaaaaaaaaaaaaaaaaaaaaatacaaaaattagacgggtgtggtggcgcacgactgtgatcccagctactcgggaggctgaggcatgagaatcacttgaatctggaaggcagaggttgcaacgggccgagattgcaccactgcattccagcctgggttacaaagtgagactctgtcaaaaaaaaaaaaaaaattagtgctgatggttggcacactttgaaaacataaacaaagccggaggcagtggctcacacctgtgatcccagcattttgggaggtcaaaccaggaggatcccttgagctcaggagtccaagaccagcttgggcaacacagtgagacgctcgtctctgcaaaaactttgagaaaattagccgggcgtggtggcaggcacctgtggtctcagctactcgggaggctgaggcgagaggatcacttaagcccaggaagtccaggctgcagtgaactgtgaactccagtctgggcgacagagcgagacacctcagaaaaaaaaaaaaaaaagaaagaaaaaaccgaaaaagaccactagagggtacatgtttaaaggacagattttatgctatgtgaatatatttcaagtaaaaattaaattaacaattttaaaaattgcaggagtacgcagcgcttatagaggtccctgcataacctagggagcgggatcgaaacccagcagcaccaagatactctaagagcaggaccagccactgccccttccgcaggaccgccatcctcgccacgcctccgggggagggaggtcctggcttggagagcgatgattggccgagttctaggacgaggcggagcgaaagggggcgcgacaagtccctcccggcgcagcgaaaccttagctcgcgagattttgttggttccgcatttcgggtctgcgaggtggggtaggcgggcaaggcgggcgccgaggtttgcaaaggctcgcagcggccagaaacccggctccgagcggcggcggcccggcttccgctgcccgtgagctaaggacggtccgctccctctagccagctccgaatcctgatccaggcgggggccaggggcccctcgcctcccctctgagg

SEQ ID NO: 23734 - DNA, 2300 bp, Homo sapien
ggcgtgagccactgcactcagcccatttctgttgtttaaatgactcagtctgtgttattttgttatggcagccctagccaacttatacatacaaagcattatttttttctgaactattcaaaagtaagttacagacatggtcctttagtactagaagcaagtgcaatatattctcttacattactgcatgcgattagctaacactgataaaatgctattagctagttgcagactttattcatattttgccaattgtcctataatgtcatctatagcaaaagagagaaaaaaagaagcaagaaagagaaaaaaagaaagacaaaaagttttgggtccagaatccaatccagaatcaaacagcatttagctgtcatgcctaggctcctttaatggagaacagtttctcattctttgtctttcatggccttggagctgtcaagagtacaagcaatttatcttgtagaatatctctcactttgggcttgtctgatatttccttgtgaatagattaagatctactagtgtgttccaaagctttacaactgttttttttcctggacagttttaacattctaggtctgtgatctttcttctcaatgtgaaatgaggaatctgtaaccgtttttaggagactcattggtttaggaaaatcaccttattaaatttacagacttgttaagagctacgaagtgatgtgtctcctcaatggatcctatcagaaggcatatatgtgtgttcccttactgggtggtgctaactttgatcacgtggttgaagcagtaactgtcatgtttcttcactgtaaatttaccattttcctttccttcctggaggctagaagtaaaggtcaaggtgttgacaggattggtttcccctgttctttgtttgtttgttttgttttttgagacagagtctttttgttgcccaggctgaagtgcagtggcacagtctcggctccctgcaacctctgcctcccagattcaagcgattctcatgcctcagtctccccagtagctgggattacagcgtccgccacgatgctcagataattttttgtgtttttagtagagacgggggtttcaacacattggccaggctggtctcgaactcctggcctcaggtgatccgtccgccttggcctcccaaagagctggggattacagaagtgagccaccgcgccctgccctccttaagtttccttgcgggagagatactttgagactatgcaaaaagtttgcgggaaaaaatacaggaagcccagttgaatctgaattccagataagccataaataaagtataaatatgacctcccaaagtgtttatctaaaattctgatttgattgggcatcttgtgtttttatttgctagatctggcaaccctatatgtaaatatcttgctcctcatccaactttcacccagttgttttgacatctattgctgcttctgaatcagggttgcacatgcaaccctgacgtctgtctctgaatatcttttatgattttactttttttgttgttgttttgagatatggtctcactctcgtcgcccaggctggagtgcagtggcgcgccttcagctcactgcagcctcaacctcctgaactcaggtgatccttccacctcagcctccccagtagctggtactgtagtcacgcgccaccatgtactgattttggaaaatggtgattttctaactccatcattccttttacttctgttcgttggcattctatcagcttgtcttttcatccaccctttacagtgcttggcacacagtaggcgctcatataattgttcaacgaatgaatgaatgaacttttctcttgtgttgtccggccttcggtgacactagcggcgtcaggcaggagtttgacttcctcagcctatcatggcacgttgccgaggcttcagcgccttacaggacctcgctccaggctcttctggctccaatcaaaagcagggctctttcggacttcgcttacgtttaataaagaaaaccggttggccccttcggctccacctggctcaacagacagccagtggcatgcggcagggaccaatgggtggcggagggaggcggggcctgccacgaggccgcagtataaccgcgtggcccgcgcgcgcgcttccctcccggcgcagtcaccggcgcggtctatggctgcgacttctctaatgtctgctttggctgcccggctgctgcagcccgcgcacagctgctcccttcgccttcgccctttccacctcgcggcagttcggtaagagggtcacagagctcggtcagcgcggaaagctgaggg

SEQ ID NO: 23735 - DNA, 2300 bp, Homo sapien
ggaaaggcaggaatttaagttgactgggttggctaaacatgcatattcagtaggttacaggaggatctatgaatattcatgaaggtggtcctgatgcatgtgtattgaacaaacatgcatattacgcatgcccatgttcaccttgggatggagccataacatttaaatgtattacattaggcattatacgttagaaggtctttgtaggacacaaatgcgttcaagtgcacagcctctgtaaactgaccagaaccagtccatggttcatgatcttcttatcaggagggagttactaaagtcagtcttttgtccaatcaaagctatagttatggcttatggagcagggggttggttagtcagcatctgctggtagatgtgctgcaaattgttctaatattgcttgtctcaaggccagtgcttgcttagctgctagaggaaaagaaaaaccgtgtggcagttaggacacagtttattcttcaagtgtaggcgtgtataacttaacccttgcctggcctggctttaggtcttgtttacagtttggtaccttattgccataaagggtctgttctgtcagtcttattctcaattttaacataaatgctggtcagttatgtctacactgcaaaagggagatgatataaccaggtgtgtctgacctcctatcctgtcttggccaggattttggtttttaatgtatctctgggatccccttggccaagagggagtctgttcagttggtggggaggcttaggattttatttttagtttacaactctttttttttttttttttttttttttttacaactcttttgtagcataacctagcttcaataattatcaatacatgactgattgtggtgtctttcctacaatcattttaattgttattggttaatttaggttttctaatttttttaaaagtcaattttgatacttctattgtttttgtagagaagtatccatgtattagccttgtggctgagggctatagttccagaaacagattgtccagatttgtttttccatgtgggtagtcatttaagctctctgtgtctgggtttcctcatttgtaaaatgggaataataatgttatttatgtcataggattgttgataagattcaattaaatcatacatgcaaagcacttctggcacatagcaatgttaactattcttattatttaagttttaaaattaattggcatgaattttttaatggaattataatttttaaattctcaactatattttatgtccctttttcagtcctagtgttgtttacttaaaaacaaaagcatagattgcttttgttttttctttttcgtagagatagagtctcactctgtcacccaggctgtaatgcagtggcacaatcattatggctcactgcagcctcaaacttctgggcttgtatgattctcccgcctcagcctcccaagtagcttagcactacagcacaccatcacacctggcgcatatatatatgcataatatattacttttatatatattattatataagcataataaatttacttttcagaggcttttctgtgacgtagtatatgtgctctctttgtaaatgtgtcatttgtacttgaaaaagaagtgtgttctctgcttgttggaaattattcttcaatttgtttatatgtccttttttttttttttttttcttttcgtaagacagagtcttgctctgttcccccggctggtatgcagtggtgcaatctcagctcattgcaacctccacctcccgggttcaagagattctcttgcctcagccttcctagcagctgggattataggtgaatgccaccacatctggctaatttttgtatttttattagagatgcagtttcactgtattggccaggctggtctcgaactcctgacctcaggtgatccacccgcctcagcctcccaaagtgctgggattacaggtgtgagccactgcacccagttatatgtccttttgtcttagttttttatctgtattaaaatctcccattatgactgtggatttgaccatttctccttgaaatcctaccctttttaatgtatacattttgaggctgtgttccttttactttatagtcatgaaggtgaaggaggagaaggctggggtaggaaagctggaccacactaaccacaggaggagatttccggatcagaaaggtgaggtcactttgaggacttgatgcaaatctcaggaggcactgagaattctctgaatgtctttatgacagctctttcagcaggagagtctagggagcaggtcccttttcctgactcatcc

SEQ ID NO: 23736 - DNA, 2300 bp, Homo sapien
taaaaccaggaaagcctctggtgacccagcatgtgttgatctccctagtcttgcctgtctttgattccatggattattaacagaaactataatgttgggttaatgtgttggcttgggcatggcctccgaaacatgttttttacatgtctgccaccagcaggctctagatccaggaatgaggcttttccactaagggaaaactccacgtgatctaggaagaaagtgaggatatccaaccagatgataaatttcctatctgaaagagaaggtcaaccctgaaataaggaggctgaagacccttagagaagccacagaagagactggaagaagaggggtagagttgcttttttaatggggcttccagctcctacttttcttcctgtctgtaagtctctgagcttctgttccagctctgtaaggttggggacgagaatgctctccccactggactgttgagagttcaatgaggggaaatgtgtgcatataccaggccccatgctgggtgcccagagacgctgcgccttcctggcatgcttctcttccccatcgctcagcaccgcgtccctcactccctccactcccgattctcacttcctactcactggcttcttccttcccatcttcctccaaacttcccattttccactatgtctctctcaccgtatctttttcacttaaacaaaaatggaattcataaaaacagaggccaaaagtcaggataaacctggaaaaatcaccaagtacgcaaagtttttcttgcaaggtttggttttttcaaatgccttctttgttttccttgcccatatccttcttcggagagtcaggatttggggtttgcagagctgtgtggcagtggaatgtggaatgttctcctgaatctcagtcccatgaagaaaagaggcaaaagtcctgacatctttcctgaggattgtctgatttaaaagagctgattctccccaggcaaatgacttacctttgttgtgctgggacaagctgaacaggcaaggaataaacctccctagaacacactgattagattagccagtgagaaccactgaagacgcagacattagattaaaaaacagaaaaatgaatgttacttttacagtggctatgaatagacaaagactttttggtttgaaaatagttggtgaggcaatagaggaggggctatgttaatagcagagatagaaaaaacgagaggtggatggttccaactgcaaggtccaccctaaaggaattggagtcagggcccaggagccacaggccactgcactggggtaagtagagtggattttacataaataaagttacagagtggttgtaggttctggtttggagatgtgagtgaaccaactgaatagaataggcagattccccagcccaccaagagtcagatgagaattttattgctttttgctaaaggcctgtacaagacttagagcaaagataaggagtaacctgattgttgaaactaatctataagtattccaacatagcaaaggacaagtaacggaatgacgaggttttcctgtagtagtgttgcgattttgttctgctgtgtccccctactccagtttcctctgtgaggggagcgtgtagtgtgtgcatatctgtggaatgtcagacttctaaagtcaggggctgagacctatatctagttagacctctgtgcatattcttgagccatgggagtctcagtggttgatagtacttcacacttcttccagttcaataagggttacctatggtgtctcctctgagtctcctaggagtccagaaaacatgagacttgtataagaatccacacttcaactaagctttctggcccaaagaaggcattgttaccaaggatctgtttcttgaggtctttagggagtgagagggaaggaacgcatgaggaaccagagctagtccccatctctctccctagaagtgacagactgcatagctcttatgtatcaggagtcctggagatcagctggctttccttaaaaaagggtcatccagccgtgatgaaatcctgacttagaaacccagtgcccttagctttgtgggcttctgtccctgagaaatggtgttttaccctccctccaagcaggcatcccaggatttggaattcagctgtgagctcatgagctgatggatgtttccaggagtaccctgaagaccacccaggtatgctctccccacctcctttattttggatggaccagtctaaggagagtcatcttttcccacaccattggtggcactcagtgagtggcttgttgcttgactgaatgcctgcccacaccctc

SEQ ID NO: 23737 - DNA, 2300 bp, Homo sapien
gggccttgcttcctctaatcctcccactgctggagctctctgcctcctaacccatacccctactcaggttctcttatagtgagactccccattttctttacccactgccaaccccattgcatcaccccagcctaagcctgtgctgctctgccctggcttctcactggcagggctattccaaggacctctcaggactgaatagtcaaggagtgctttagagaagggacactgccaaagcccagattctctttcacagagagtttgaggagacaatggatgcactccaggctgacatcgaccagctggaggcagagaaggcagaactaaagcagcgtctgaacagccagtccaaacgcacgattgagggactccggggccctcctccttcaggcattgctactctggtctctggcattgctggtggtgagtactgtggaataggcagcactagcacagaggagattgtcttctctcctgtccttggcctcattttgacctctgccccaccccccttacccccgggtattcagccaggaacatgcttacacagtttcactctgtgccagttttcaccaagttttcccttccgctgaagatgtgtgctgagtttctctgggcaaaggagggcattactaaattgttaatgaggctcagaataatgatgacagttggtctctagtagatgtcctttctggctctgtaatctgacctttctgcccagccctatatcccagagggttgtcagccagcagcaggctgggctgactctcctggggcatccagccctgcccgatacctgctcttgattgcttctctgcttggacactgtgttttctcactgagttcatgtggcttcattttatgatgtggtcatatcttccactgctgaattatcccagtttcacttggggcttgtgttttgacctttgtctagtcactcagtatagtcagggctcctcacctagagtttttctggttaccagttctagcctccccagttacctgactcaggaggtggctgctgctgtctttgttctcctctgccctatagtttgttttgtttactctccagtttctcacttaaccttctcacctccagaagacaggctttttgccctggaattaaacccttagggcctccagactttcccagctgctcctgagtcttgtcagctgacctcacctacatagagtctttgacaaagtctctgttactgacaccccttgatcttgggaggtgaccaagtaccttcttgactttaggctcttgtggtacagacagctctgtgttctttggagagagtttccaggattactactttgtgttgtttttagcactcttgaaacaaacattagcactctttaaacaaacatagttctgaatttatgaaacttcccaccaaaaaagaaggtcttttgcctcagagcaatggggaatccttaggagcaagggagtgtgtttgcatccccaacttaagctttgctgctggtgagcactaagggtgcagacatattggggtctctggagcattctccgtgcccttcttggagatggcatctgagacagggaggcaggaacagcctcatgttccaagtactttgtacagtgcacactctctttgccactgttcttcacacattgtaccctgtcttgtggcctcactcctgtttggtgtctttctttaacacttatctgctcgtccccaaagataggtggcagagagtcttgttagagaaagtatgatgattaggaaaagggttttcctgcaggttgtgtccaggattcctctggtgtgtccccgtaacccccaaatcacctaactcctctctcctcttttcctgctcccccatgggctatcccgagcacagaagaacagcagcgaggtagagacccactctggccgggggttaccaggctggtgggagttggagctaagggagcagggtggagggggaagccaggactggagatgggtgatggggggatgaggaaaggggaagagtaggaatggagcccaattttcaaccctttccacttggggctgatgagattttttatggtccccacaggagccatccctgggcaggctccagggtctgtgccaggcccagggctggtgaaggactcaccactgctgcttcagcagatctctgccatgaggctgcacatctcccagctccagcatgagaacagcatcctcaaggtgagggagccacggggaggactgggatgggagatggagcatatttgccccattgatgatagatgacaggggcctcctagcacctcttaccactat

SEQ ID NO: 23738 - DNA, 2300 bp, Homo sapien
gtcctcacttccttactccgagccttaatgctaacttggttctccatccattttctttttcctgagtagggtgggcaggaggctacagatattgccctcctgctccgggatctggaaacttcatgcagtgacatccgccagttctgcaagaagatccgaaggcgaatgccagggacagatgctcctgggatcccagctgcactggcctttggaccacaggtttaaggctgcaactggggaagggaaggaaactgagtagaaacatgaagggtatagcacttgaagatctggatctggttaggggacaaaaatggttttggggtagctggaaactgtggtgctgaacccagggttgactcctgactctggcctggcacacaggtatctgacacgctcctagactgcaggaaacacttgacgtgggtcgtggctgtgctgcaggaggtggcagctgctgctgcccagctcattgccccactggcagagaatgaggggctacttgtggctgctctggaggaactggctttcaaagcaagcgagcaggtgggcctggatggctgggtagaaggtgtggggagagttagtgaccagtgtggggcttttacttctgcccttggctcctgcagatctatgggaccccctccagcagcccctatgagtgtctgcgccagtcatgcaacatcctcatcagtaccatgaacaagctggccacagccatgcaggagggggagtatgatgcagagcggccccccagcaaggtaggtggagatttccttggagaagttgcagaggcctgtaggagtaagacttgcagagctactgctagttgtgggaggacggggagacaggaggaaggcatctggagagcaccatcctgcctagaaggcagggttttccctgtaactggatctctctgtaaggagcacagtgatgatctcttctctccaccctcactttctcaccccctaccgaccattccttagcctccaccggttgaactgcgggctgctgcccttcgtgcagagatcacagatgctgaaggcctgggtttgaagctcgaagatcgagagacagttattaaggagttgaagaagtcactcaagattaaggtgagggtagtgtaggctcaggatctgggggccaggaaattggtaggactcaggaaagcagtgagtgttggggatcgggaccaagacggcttgggagttaaggggagaagtggggcctgcaatcaatgggagctgtggtgagccctcagggaacctactatctcatggtctagcccccagtttccagggactgtggggaggatgtcagggatctagaagttctgtccttgtccagggagaggagctaagtgaggccaatgtgcggctgagcctcctggagaagaagttggacagtgctgccaaggatgcagatgagcgcatcgagaaagtccagactcggctggaggagacccaggcactgctgcgaaagaaggagaagtcaggcactttccctggggccttgcttcctctaatcctcccactgctggagctctctgcctcctaacccatacccctactcaggttctcttatagtgagactccccattttctttacccactgccaaccccattgcatcaccccagcctaagcctgtgctgctctgccctggcttctcactggcagggctattccaaggacctctcaggactgaatagtcaaggagtgctttagagaagggacactgccaaagcccagattctctttcacagagagtttgaggagacaatggatgcactccaggctgacatcgaccagctggaggcagagaaggcagaactaaagcagcgtctgaacagccagtccaaacgcacgattgagggactccggggccctcctccttcaggcattgctactctggtctctggcattgctggtggtgagtactgtggaataggcagcactagcacagaggagattgtcttctctcctgtccttggcctcattttgacctctgccccaccccccttacccccgggtattcagccaggaacatgcttacacagtttcactctgtgccagttttcaccaagttttcccttccgctgaagatgtgtgctgagtttctctgggcaaaggagggcattactaaattgttaatgaggctcagaataatgatgacagttggtctctagtagatgtcctttctggctctgtaatctgacctttctgcccagccctatatcccagagggttgtcagccagcagcaggctgggctgactctcctggggcatccagccctgcccgatac

SEQ ID NO: 23739 - DNA, 2300 bp, Homo sapien
agcctaagaaggtggtgtgtttactatttgtgcctgggtggatgggggccatgagccccttccccagctgtcctgcatgtccctgggctgctgcatgcatgtgtgtgtgaccttgggctgggatggccagaggaaatggtggccttggctttcagagttcctttgaagggtgcaagaacatcaggctcagtgtccatacccaggtagcactcattagggatgattctctctgccccaggactccaagtcaaagattccccaatcaaaaactataagcatttgactgtaaatagcagcagtgtgaaatagatcatttactgggttacagtgtgttctcacttagcccgagcttggacgactgtggaaggatagactgggggaatggggctgaggaaggtaccaagtgagggggttttgcaggaagatgggaggtcagggaacagagcctaggaagaacagtcccaagttggaaaacctaagagccttcatgtgcctgcctgtggatgggcacagccataaatatccccacaccccacaactctgccccatcagtctgtccctgtctccttcctctggtggtgtgcctgaggcctacctcctaccccttgcagcctttcatcaaccatcattggagtggggctcaatcatgtcacgtcccctccccttcccaccatagactctttaaactcttagatcactgccatgaccacttcctcaaaccagcccctgccttgggcctctgcccaagctgtttttgacctgcatgtgcctgtctggcctgtatgtactgtgctgtatgtacaattctgtgatttccttgtcgtcagcctatctcaggccattctgacattgcatggagagctgctggattggggctgtgggagggaagaggaaaacatctccttttccagggggaaaccagctcctggttggtgatgggtcctttggagtcttgccatggtagagaccacatgctggtacttgctttggtagggaatggggatataaggaaaataatgctgtgaaggatcctgggcccatttcagagtcatagaaacttggctttgtcctttgattattgtctcctggttggggcttccatttcacctcaggccttgaatagagaagagcatgaaactatggtctgatatttatggagttctggccccagcctggtctgaccctgggctggggcctgagcaatgcccaaatccaggggctttggcagctgcctggggaaatgtgaaaaagcccagcctaggccacccatgctgcccttctgcactcacgttggaaagtgtcaatcagacagttgagtgcccccaccccggagcaccccagtcttcctctccagtagttatttttcaaagcagagggcccctgctctcacccatgtggatcagggagctggttccagagcaaaagaatatgctttgaaggggaaggcagaagaaaactcagatgtctctgcaaagtgcctagttctttttggaaaccctttagagacaggctttaacctgtctacaaccaggggatggttggagaggagcccaacagtcattagagctgctgctacccagatgcgtgttccgcagggtttcgtagtcactgtgtgtgctcctcagagctgaagcctgttgctggaggggcactctagatgtgtgtgccagatgagagactgtaagggtgttgccaggttgtataagagacagaagtggagttaatggggctgtgggtaggtgggtggcgggggcagaatgtgagtatgatgagagagactgctggagcagagaggccatgtgtccctccccagtgatgccctggccccatagaatgccatttctgggatagcccctggcccagttttttggagcacgctcttgggggtgggcaagggagggaagagaggagccaaaacctgttctttggagaaagaagcaggacaagctctgcgcatgactgtcatgaggaggaggagccagcaaagccctagatggttgctaggtgactgaggagcagtggctccacccccatggagcagaggagggtgggtgcatgacgtcaggtggagctggtgctgcggccactgaggctgccatcagcctaagctggtgaactgggccaggcaccgctccggtgcctgccggagcctggcgatccagctgcacgtctgcgggggcctctgtgtcagagcggcggccgtttgcaggctgggaagctgccgcaccgggaggctgagactgcattgttgggatttgatgcactaatctcctgtctccgccgcctttccctctgttcgg

SEQ ID NO: 23740 - DNA, 2300 bp, Homo sapien
gcgcccggctaatttttttttgtatttttagtagagacagggtttcaccttgttagccaggatggtctcgatctcctgacctcatgatccacccgcctcggcctcccaaagtgctgggattacaggcgtgagccaccgcgcccggcctccacatattttttaaaattcccataattcaaggcatgcttaggtactccctttctttctagctcacctctctcctgtctataatttcttatatttattgtgtagatgtatataccatttagtatcatgtcaggtaattctttgcagttctataatttctgtactttttacaaggtgcttttttttttttttttttgagtctcagtctgtcgccctggctggagtgcagtggtgcgaccttggctcactgcaaccttcacctcccggcttcaagcgattctcatgcctatagtctctcaagtagctaggattataggtatgcgccaccacacccagctcatttttgtatttttagtagagatagggtttcaccatgtcagccaggctggtcttgaactcctggtctcaagtgagccaccggcctcagcctctcaaagtgttgggattacaggcatgagccaccacacctggcctacaaggtacctgtatatgctttagcttttttgaacctcatgatactgacgtagatatggcagatattattttcatttcataggaaaataaacagattccaagaaattaggggactattgatacctatgtggttagtgagttgtgaggctatttttagatctgagctcttttgaattttttaaggcagtgtggcctacaggaagagcagggccttggaagcctagatatgtctgtggtaatggtgaggggtagtagaaagcacagagggctctgggtcaggttgtttccagttttggctctactcctcacagtctgtgtgtcttcagggaagttgctcagttctcaaagactcagttgccttgtcagcatcatccctggccaacctctcaatggggttattgtaatgtctatatatgatgacattgttcttagctaacttttatttagcacttattaaataccaggcggtgtcctggatgctttgtttggattatctcagctaatcctcacgatacctctctgagatatgttctttgttacttccctatgacggatgaggaaattgaggcatagagatgttaagtaactagaccaagtttatgtagctaccaagtgataaagccaggaaagtagcctgagtctagaaccagtactcaaccatggttctataaaatgtctttttttaaggtgtcctatagactgtaaagtgctccgaacatgtgaggtccaggctgcaaggatgtgcctggccctgcccacctgtgtaatggcgaatagggaaaggagggggcgacatggagattttgcagggaggagagagattatttcctagggggtctggccaggactgaagatttggaattgtgttttggggccatatttctgaatgttggctgtcattctcctgttgggctacctggcctatcttaagagggtagagcggggtaaagtcactgttctgccagtgaagtaagcccagtgcagaaaagacaggcgtccctaggcccaagggaactagatccataccatactcagtggagccataggtcagaccccaggccaaccttgttggctgtgtaggggcagggaccctggtcttttggtttctagcccatgatagatgggccagtgaatgaaagcagtgtggtaacatagtcccttggagacctctcattagaatgcataatctcattaaattaaacaattctaattataaaagtaatacatggttactgaagaatttttgtgaaatacaaaagcgtagaaaataaaccatttcattgggtctgagatgctaggaggcaaggccaagagtacaaggggcagatgactgaggtggactgggccttgtgctacaagaagaaagaagggctctctgcttttgactactgcctttagtaatccagttgagtctgatactcttgtgttttacaacctggccccttataacaaccataaagggtgaagggtgactatggcaacctttgccagccttgtgggagggggctagggtacttggcttgctttgctatgtgtgtgaagttgccttcattactgcccttctcttgctgcctcctgggcagggcctgcctcctctggctcagtgtgagattgaaatccaggccctactcacatgaatttggaccctgagtccagagtttagagaggggagggagaga

SEQ ID NO: 23741 - DNA, 2300 bp, Homo sapien
ccaggatcaggaggagaagaaagaggccagttcagagacagtaccaaaaaagccctgagaaggccttgtaatagatcaaacatgaggaaagaggcagcaggcctacatgggctctggagacagacctgaatatacctttggttctcctctgagcaagatatttaacttcctgagtcccggttacctcaactgcaaaaaggaagaaataatgttacctcacagggacattttgaagattaaataagatttaagtaaagcgtttagcacaatgtctgtgtgctcaacaaatggtagatatcatcttcattcattattttaagggaatatccacgatgacttgcgcacagtaggaactcaaatgctgcaaggataaatagatgggtcaatgaatgcatgaataagtaaatgaataaatacactcaggagttttcaagcatgagaaatgtaataattgaaacattaacagaactgaaaaaaatgggaggagaaacaacatgttaggagagagaaaatgcgtcctgttcttagggccttctctggggaaaacttaattgcatacacgaatacatgtacttcactatctccttcaaaaatgaacctgtgatgtagccaaaacagattccattctctccattccacagatgacagaactatgtctcagaagtcaaatgacttgcccaagtctcatagccaaaaaatggcagaggggcacatctgaatatctctacaggtaggtgctccttccacagcattaccgggcccaggcccatatcccataggacaatcctgggttaatgttaccccagccagggaggagacagacacctcttggatttctaatccattttcctctccaatgatattaaataccactaaaatatctagaaaaatgagaagagaggaggggaaaaatctctgtgtctgataaataataatctctgtgtctgccaatagtcttagagaaatttcaggaaattataggaaaataagattttggagaatgaaaaaggagaaagtgaggaggaaaagcctcttttccacctctaccatttctcccctgtctgaaccatttctaccttgtttttactggcaccccagcatcctttgataccttgatctcctcttgtctcaccttatcaaaccttgatcctgggctaacccaactgtctgctttccctgctttcccactcctagaggagcttgtctgaaacccaggcagtctgacagcaaggcaaaactatacatctctgaaagcactagtaaggaagagataaacgtggacctaagtccttcaggagtcagaaaggaaaaggtctgcttactgagtggtaaatggaggctgggagactggaagcttggaaagctggattccagatattcacaggaccccagaagacaacgtacacagagctttttgttcctaggtcctactcagtatctgccttgcggatttcatagataaggcctacacactcaacggacttccttcccttctccagctcctcattaccctaaaaaaacgtctacaaacccactcccactctgaatgcagctctactccatctcaaaatgtcccctttccccagaaatatccagtgacttccaggcccacctccaagggcccagacctctaaaagtcaagaagaaaagctatgctatatgcttcacttatcttcaatataggaacttctgcaagaaggcaagaggcactcagccctgcactcaagaacctcaatcctctcagtggtatcagaagtcctacttaggctgttcgaagttcctgctgattcctccccctgaatcaaccagcaagttcctggcactaggaccctgtagacagggaaccctgagcctgcgctctaaagagagagatgcaccatttcacaacttcagcaaaagccaaagcagccaacaaagccacagccctatcggctgtactgggctctgccttttgggcagctcgccggccactccccaaaagcagagcattccatcctttctctttttaaacccacgtcatcatctgatcataatggaaatcaatctcctcaaaccaccatgcaaaggcgtatccatggcaacctcaaaaggaaggacacagagatgatgcttcagtggctgcagcaggaaaaggtaagtccgtttctcttccatccacgccatcccatcactctctcctttcactcaagtcaggtatacagcttacctacaaattgtatctgtcacacaaactgagaaaacacataaggtgagttaataatcattatgttattatataaggttttagatctgcctgtctc

SEQ ID NO: 23742 - DNA, 2300 bp, Homo sapien
acaaaagtctgtacatgtttactatagacacaaccatccatttttcccctaatattttcaatccaaggatggttgaactcacagatacagagggccaactgtgttttatttatatataacctacacacattctatcatacactttagtttttttgtcagatcatcacagagggttttgtttgcttacatgtttgtttttggtacagaaaggtgaaaaagttctggagatggatagtggtgatgattgcacaacaatgtgaatgttctgagtgccactgaacttaaacatggttaaaatggtaaatttcatgttatgtatgctttacgacaattaaaaatatgtatatgcagtatcttttaaagtctttatatttactttttatttttctttaattgaaggagatggaagacatttctactaaaattatagatacatttattatttgaccaagatgtatcctagagatatgcctgctcacattggaatgtcattatgttcaaagtgattcattgcaagattgtaatactaaaagactggaaataaagtatgtaactagaagaaactggttaataaattatgtgtatccatgcaatagagtactaagcagctgaaaaatgaggaagatctctaatttattgatttagaaagattttcagaatagattaagtgaacagaacttatgccaattgtatctggcatgctacatttggcataagaaatgggaggagtaagactatatattcatatgagtttatatttgcacaaaacactgaaaagataaacaagaagacactaataagcattatctgtagcaggcaagggggatggagtcgatgggaaccagggttgaagggaggtttctctgtgtatattctaaaatagtgttctgatttttgagccatgtaaacgtattatctattcaaaataataattataaatatttagaaggtgaaatagggaaaaggggggagtaataaaggggatactcaatgcatcccttctactgcttactgccccttacagcaactttatgaatttttcagtttgttttaaatctgagattaactgaaataaatataacattacaatagttatatttccagctctttacatggattaacttaatccttctaacaacataatgagataggtaccatcatttacattctcactttaacaaataagaaaacagaggcacagagagggtaaataagtaactctagatttcacacggctagtaaattgcagttagaatttgaacccaggcgggtgcggtggctcatgtctgtaattccagccctttgggaggccgaagcgattggatcgcttgagcccaggggttcgagaccagcctgggcaacattgtgaaaccccgtctttacaaaaaaacaaaaaacaaaaaacgaaaattaaaagggcatggtggtgcgcgcctgcagacccagctactacggaggctgagaggtgggaggatggcctgagcctgagaagtcaaggccgcaatgagccatgattgtgcgtgctaccgcactccagtctagacaacagagcgagaccttgtcttaaaaacagaaaaaaaagaatttgaacctatgtctaaaattttaaaatgccattatgtaaatttgtattttacattcccatcataagcgcatgagaatgcctgtatccccatatgacaggtaacactgagtagcagcaacatttaattttctcccccaggctaatggaggagatatggtttatcgctattgttttaattagcagtttaacacttgcaaataagtcctccagcccttctgcgctttctcccctccgccgaaagagggcgctcgccacgacacgccgatttcttatggtcctaatcggcttcccaggcacagtgcgcgtgcgcttatcctgtcccaggtgtccagctttgtgcctgattgatgtaatcccggctgcggtcggtgcgcagttttcagtcagggctggactgcgggaaaagagggttcactcgacccagaacgcctctgggcctctgggccgaagggttctgggcggtcctggaagggtctggcggcgagtcgggcagcccacgagggcggggagggcggggccggccccgcagggtcttgggcgtcggtcgtcggtggggtcggagctgggcgcggagcccctcacagtgcaggtacggaggcgcgactctgccaaccgtctgctccgccggccccctacgtgttcgtgaggttgccggcggtgggctggggaccgagcccggtgtgcggggcggggactggcaggggtgggcgcttgt

SEQ ID NO: 23743 - DNA, 2300 bp, Homo sapien
tggatgctcctccctgccttccctgtgagagttgttggaggctgaggcccatagtgaggattcagggtgggaggagcactcaccactgttggccccagtcactatggctattttcccagtcagatctgtggagcagcactggaggtcccagggatgagacttctgccagagctgcacatgtagttgaagaagaccagaataaggaagacagagccagcgccccagaccaggatgctgagtgcagcccacagcaacatagcagaaacttcctgggcctgctggggaaatgctgtaggaggaagtgggtgcaggataaatctgggcagagtggagactagcaatgaggcaggtgtggagcctaagataaaatttaaggaggcactgactcttgagtttgttcaatatactgtttgagtttgagagttcctccttaacttcaaaagtgaaatttggatttgcagtctaaggtgaagtgaccaagctccagggaccagggaagcaagaaatcaagttcttcatatctcgaatcactctgtgcttatgcggggccttctccttcctcccctactgaaaggagactcgaagttctctctacagagccagacccgctggcagcccttatgtctactcctttgggggacaggggtttctctagaatgcctctgcaatggggcagctttggccctaatgcagggtctcctaagggtggcgagagggttatttcctgaaccctggttctatcttcttctaggcctgcaggataactgctccccttggggttcagtgagagggtggacacccttggaagaaactgacaagagacatcagactagttcctaaggcaactcaggtgtttatttctggctagcagagggagggaccagttactactgccagaggctcagggatcagagggaggcagcaggcttagaggagcgtgaccacactttgggggctgagttcttcattagctgtgctacggtcacctgggctttggggcacctgtctggatgggatgttgctcaacgggaggaaaggtgctaccttctttgtcctcttgttcaggcacaccagagctgagcaacacctgggtgctccggttccacatgctcacaccaggggccagcttcagggcttctggcagcaacacgggcttccacatcacctgggaagtggcttcaaggaccgggggtgtggttcgaggccatctgccaggatcctggccctccctgtctgccagctccagaccctgtggaggcacgcgggtccggccagcccacagctcgcccagcagctcggccttcccctcccaaccgctgggccacctgacactgggccacagcttggggctgcggctgcgggccacatcagggagcaccgggtgtgtggtgaggaagcggatcctggagtttgggagtggcagctttgactcgagggatggcgacgataggcctaaatttaaagtggggaacaggagtgcggggcccgagtccaagtcacggaaaggaatgcctggccggagagggaagaacgctgccggggagacacgggtgccggggccgagggcttggggttcggcccgggccttggtcttctcgccccgctggcgtccgcggtaggcttccaaggggcgtgtttgagagtctgggaccaggacctcagccagagggcgcacccagtggcacgggagcctcgcagggtccaggcgtttcacggccgccttgcggcgcatcctgtggtggtgggcgctcagccgcacatccgagtgcccggcccgctgctgctggcaggacgcggaggggcgggtggcgccgcccacagaggggtaggacaccaacacgcccgaggcgatgcagggcaccccctctgacctgagttccagccgatccccagccgcgtccagttgaggcatgcaacagtagaggtcttccaacgacaaatggaagccgagggggtgtcccctcccagttgaggcctgggggctggctaccaggtacggatccagagaagggtcggcatcgtcggcaggcgcctcctccaccgacagttggaagctcgcgctcaaggacccggccgaggagaggcctctagactggccgtccgcttcctctacaggacctccgggccctgcctcctgaaacagctctgatgtgggaggaggggccgacgtgactctcagctgcggagaaggctcccaagattccatctgctcctgggagcctcgacccatccacgaccttcctaaagggatccggtccacgcccccagggtcctggggaaatgcactcgggcagtgagat

SEQ ID NO: 23744 - DNA, 2300 bp, Homo sapien
aaaaatatattctccaacaaattctctgcggtatttttataatagcagaatattgaaaacatgtctttaaaaagagaataaataattgacatgctatatatactgaaatattatgcaatgattaaaggtaatctttttttgtttgtttgtttttgtttttgagacggaatctcgctctgtcacccaggctggagtgcagtggcaagatctcggctcactgcaacctctgcctcccaggttcaagcaattctcctgcctcagcctccggagtagctgggattacaggcgcctgccaccaggcctggctaattttttttctatttttagtagagatggggtttcgccatgttggccagactggtcttgaactggcctcaagtgatctgcccaccttgcaggcatgagccaccaacccagccattaaaggtaatctttagaaagaatttgcaatggcataaagcaaatgtttatgatgtaacgttaattgaaagaagcaggatacaaacttacacatcaattatgatctcatatatgtaaaccactatgtgttcaacaaaaggaaaacttcaaaatgataacagaggatacgtttccttcctatgctcttttctattttgtaagttctctacaatgagtttgtttccttttgtaatcacttaaaaaaaaaaaaagactagtccccaaaactcactttagagacataaaaagtttacaaacaatctcttgggagctccctcaattccccacaacagtctccctgaacctggttccttccaaaatgtacttccaaatgtgatcttcccaaacctttgcctattgccccgctaaaaccttgtctcatatctgtttcctaaaattcattatccccccaaatctgctgtttcctaagtcttgcagaactcaaaatccctgaagtctcattaaccctatccaccagtgagaacagccctgtagcaagcaccaggagtggcccatagcccaggccaagcttgactagagcagggctgactggactgagtaaagagagttgtttccttagacctcccctcccagcctcgcatctgacacccgtgatggtgaccagaagggacagagatatttttgcacaaaggctcttcaaatccgttttctttcttcttcttcttttttttttttttttttttttttttttgagacagtctctctctgtcacccaggctagagcgcagtggcgcgatctcggctcactgcaacctccgcctcccgagttcaagcaattctcctgcctctgcctcccgagtagctgggattacaggcaccgcgccaccacatccagctaattttttgtattttagtcgagacggggtctcgccatgttggcctggctggtcttgaactcctgagctcaggcaatcctcccgcctcagcctctcaaagtgctgggattacaggcatgagccattgagaccggccccgttttctttattttaaaattgattggctcttaaacaatttgactttcaagtgcagtctctgaattatttaatatatttcttcctcttgaaattctcgaaatagattttttctgttatcttccctctctaaatgctcatccatttaaatacgcaccaccatgtaagagacttactacattcattagctgtttcaaaatccacttcctgttctcgggctctacaccacccactgaccctttccctcatggcttgagtgtaacaaagcgtttgagtgggcaccgtgcaggtgtaggttttctgcccgagtaccgacgtggcttccttggtcatctaaactcccgcgcggtgggcgggagcaagtaggggcactgggcggcccagagccagcccactgttcccgacaccgaccttaacggccgaccctggctctggcgcatccccagctgaactgaagctcaccgagccttcgtgcgccatcgccaacgcggtcgcagcaacgctggtgtttctgctgcatccgggccgcgtaagccacctaacagtcgcctgggcaaccacgggctcggggtcgctcgccccgcccacagttgccccggcaaccgcgccgcccgcggcacgttccggccgctcaccccgcccaagggccgtgcgtacgtgcgtcgtctctatggtggcggcggatttggagggaccctacgaaccaggagtcaggcgagccgatctggggctgcaggtgttacctctgatctaggccgggggcttcagggatccgagccgagggagaaagccttgggggcttcatcacacttatttggctcgcgggcttggggccatcgggtggtcctg

SEQ ID NO: 23745 - DNA, 2300 bp, Homo sapien
gccggactggcggacgagcgtcgagagacagaagccgaggagaggaggctaagccgggcggcgcggggagcgcactgagcaggcaaagtcgcagggccgccagcatgttctcccgaaaccaccggagccgggtcaccgtggccaggggctccgccctggagatggagttcaaacgcggccgcttccgactcagcctcttcagcgacctgcccgaggtgagagactcgcgtccctgccttccccttccgcggctcccgggggcagccccagccacctcggcctccttccctcgcccgcgtgcacgccgaggggcggagacgcacggtctgggtacaaacccgacggagttgttgacttaaaaagtaaggtgtggacggtctgcattttcatcggatccatgctgcccattccgcggcctggttaggattatctgcctgagcctggaaaaagcccgggttggtctcaatttgtagggccccagctcgactcctaaaatgtgcctgaaccccaaaatgtcttgggcatccccgggccaagggcggtgggcagctaggcgggccccaagcgctcggactcttggcctgggctcccgcttgttccccagtcgccagccccatcccacaacctgtcgcagccatctgggccagcctctgtcatcaaccccgactttaggccggggccgctcgcttccccgaagcccaattcaaaggctcctctatgcccctgcagggcttttaactccttggggttacttcccacacgcaaaatttccgcctccttttctggggcctaagaggagtccagcccctaggctgagcgtttcccccgtccgccgtccacgcgttaacctgttggatccccacctgtaacgccctaagggctagggcggggctgaaggtgtgtggttgagcggggactgagagggcgaatagctaccccgaagactcttctgtccccaaggtcagactcacactcgcccaaggagagcccagttccaagccttcccttccgggtctggaaagggttaagtgaggtgggccttccttccgccccctctacctcccggctgggattccaggcctggcttctgccctttccctccagcctgcccagaacaaagaggctctttcacacccttgtcccggcgtcccgggccttctctgactcagaagctagtggacctggggagagggggcctttgtcgcgtccccttgcccccaagcgactgggcccgaggaacccgcgtggggccagcgtgggggagtaaggggcgaggcccgggaccagggggaggggcctgtgagctggggccgcccctgggattagcccggccttcggggacagctcggaggagctggggcggagccgcagggcctggcggccgccgagtgaagtgtgactccgtgggcctggcgtggaggcgggggcgctaggctgcagctggctcggaatcggggctggtttcctgtctggaagggaaggggcctgcagaagggagcggggacagcagcagacaggcacacccctgccttcctctctccctctcctcccttctctggaaaagcgaggtaattgtgagcccagggtggagcgggctggatgggggccctgagttggaaggggtggccctagggctgggctgctttgccaactcacccctttgtcccattccctgggctcactctcccctgaggtcctcacctgtgtggctctttttcccaactttctcaaactaagctggaacccctctcgggaagctccaacctcctgcaaaccccatgactctagaacctgcatgaggcgtcgtttccctgcccccttccagttgtgcctgcccctcactgccctctccgcacacagattccctgtccaccaggccagggatgtgggcgggggctggggagcggccagagtcggaatgaaagggcctttttcttccacagctgggagaacagctgccaccaaagcgagactggacactctgtgcctagagccccctctgcagctggcctttcctcctgggaccccacttatcctcacttcgctttctttttcttccctgcctggctcccggcagggccccggagcagcagtgggcgaggaaaatttgtcacagcagccagaggggtttaacaggagtgcagagggataagggcagcttctgccctctgcccaagagctggccacctctttaaagactgagggaacagtgggaggaggaactgtgggacagtgtggtacctatctgtcccccctctggaggggttgacaagggaaagggcaccggggggcacagagat

SEQ ID NO: 23746 - DNA, 2300 bp, Homo sapien
tgagccaccgcgcgcagctgctctttatgactgcaaatatggggcacttgccttgtgccaggcactatgctgggcattttaccctcattcttataggtaatcctcatagcaacttgaggagtggagataattacagtattcccactgaacaaatgagaaaactgaagctcagaaaggccagtgactggaccaagttaatgattgcacggttagttagtgacagagctggggtttcacgacgtgtttaagcaccgccccatcagttgtggccactaggcttaggcggatagcctcgcagaggagcctaggtggggagggggacgaagaaggaacatttgggactgtgggatgttgaaatggtctcttcggaggctgccgggattgaaactgggcaaggtcccagggcccgagtagagccagagcgtgctacgcggcgatccctgagccacggggttttcagcgcccgggaagccaggcttgccaggttggggcggctggcggggcagggcttctcggtccgtcccaagtccaggtaggcgctcgcgacccgcgcgggcagggagaacgcgctcccacagtgctcgcgaggtgcagtgcgcccctgggggctccggggccgtcgggccaggtcggcttggcgcccagggactggccggacgggctgggcctttggcgggggtggaagaggaggttgccgcgccctgcccggcccaggtgtcgtctccgggggcggggtttggagccccgcagcgggagattcccggccggactggcggacgagcgtcgagagacagaagccgaggagaggaggctaagccgggcggcgcggggagcgcactgagcaggcaaagtcgcagggccgccagcatgttctcccgaaaccaccggagccgggtcaccgtggccaggggctccgccctggagatggagttcaaacgcggccgcttccgactcagcctcttcagcgacctgcccgaggtgagagactcgcgtccctgccttccccttccgcggctcccgggggcagccccagccacctcggcctccttccctcgcccgcgtgcacgccgaggggcggagacgcacggtctgggtacaaacccgacggagttgttgacttaaaaagtaaggtgtggacggtctgcattttcatcggatccatgctgcccattccgcggcctggttaggattatctgcctgagcctggaaaaagcccgggttggtctcaatttgtagggccccagctcgactcctaaaatgtgcctgaaccccaaaatgtcttgggcatccccgggccaagggcggtgggcagctaggcgggccccaagcgctcggactcttggcctgggctcccgcttgttccccagtcgccagccccatcccacaacctgtcgcagccatctgggccagcctctgtcatcaaccccgactttaggccggggccgctcgcttccccgaagcccaattcaaaggctcctctatgcccctgcagggcttttaactccttggggttacttcccacacgcaaaatttccgcctccttttctggggcctaagaggagtccagcccctaggctgagcgtttcccccgtccgccgtccacgcgttaacctgttggatccccacctgtaacgccctaagggctagggcggggctgaaggtgtgtggttgagcggggactgagagggcgaatagctaccccgaagactcttctgtccccaaggtcagactcacactcgcccaaggagagcccagttccaagccttcccttccgggtctggaaagggttaagtgaggtgggccttccttccgccccctctacctcccggctgggattccaggcctggcttctgccctttccctccagcctgcccagaacaaagaggctctttcacacccttgtcccggcgtcccgggccttctctgactcagaagctagtggacctggggagagggggcctttgtcgcgtccccttgcccccaagcgactgggcccgaggaacccgcgtggggccagcgtgggggagtaaggggcgaggcccgggaccagggggaggggcctgtgagctggggccgcccctgggattagcccggccttcggggacagctcggaggagctggggcggagccgcagggcctggcggccgccgagtgaagtgtgactccgtgggcctggcgtggaggcgggggcgctaggctgcagctggctcggaatcggggctggtttcctgtctggaagggaaggggcctgcagaagggagcggggacagcagcagacaggcacacccctgccttcctct

SEQ ID NO: 23747 - DNA, 2300 bp, Homo sapien
cgcccaggctggagtgcagtggcacgatctcggctcagtgcaagctccgcctcccaggttcagggcattctcctgcctcagcctcctgagtagctgggactacaggcgcccgccaccatgcccggctaatttttttgtatatttagtagagacgggttttcaccgtgttagccaggatggtttcgatctcctgacctcgtgatctgccccccttggtctcccaaagtgctgggattacaggcgtgagccaccgcgcctagcgggaaccctgtttttatggaagcagggagtggtaagtccagccgggcaagtccagccatccagcaaagcagctgattatatctatatctatctatatctatatctatatctatatctatatctatatctatatctatatctatatctatatctatctatatctatatctatctatagatagataatattggccaggcgtgggccacgcctgaaatcccagcactttgggagaccaaggcgggtgtatcgcctgaggtcaagagtttgagaccagccttaccaacatggtgtaaccccatctctactaaaaatacaaaaattagccagatatggtggcagacgcctgtaatcccagctactccggaggctgaggcaggagaatcgattgaacccaggaggcagaggttgcagtgagtcgagatcatgccattgcactccagcctgggtgacagagtgagactctgtcttaaaaaaaaaaaattaaaataaataaataaataaataaataaaaataaaaaattatacatatttgtaatgctttttaagagatggggtcccactatgttgcccaggctggacttgaactttcgggctcaagcaatcctcccaccttagcctcccgagtagctgggactacaggtgtgcaccaccatgccaggccaatttgtgtgtgtgtgtgcgtgtgtgtgtgtgttttgttgagacagggtttcatgttgcccaggctggtctccaactcctgagctcaagagcgatcagtcccccttggcctcccaaagtgctaggattacaggcttgagccactgcacccagccatcttttttttagacgtagtttcgctcttgtttccaagggtggagtgcaatggtggggtctcagctcaccacaacctctgcttcccgggtttaagcgattctcctgcctcagcctctcaagtagttgggattaccggcatgtgccaccatggccggctaaattttgtatttttagtagagatggggtttctccatgttggtcaggctggtctcgaactcccaacctcaggtgatccaccctcctaggcctcccaaagtgctgcgattacaggcgtgagccaccgcgcgcagctgctctttatgactgcaaatatggggcacttgccttgtgccaggcactatgctgggcattttaccctcattcttataggtaatcctcatagcaacttgaggagtggagataattacagtattcccactgaacaaatgagaaaactgaagctcagaaaggccagtgactggaccaagttaatgattgcacggttagttagtgacagagctggggtttcacgacgtgtttaagcaccgccccatcagttgtggccactaggcttaggcggatagcctcgcagaggagcctaggtggggagggggacgaagaaggaacatttgggactgtgggatgttgaaatggtctcttcggaggctgccgggattgaaactgggcaaggtcccagggcccgagtagagccagagcgtgctacgcggcgatccctgagccacggggttttcagcgcccgggaagccaggcttgccaggttggggcggctggcggggcagggcttctcggtccgtcccaagtccaggtaggcgctcgcgacccgcgcgggcagggagaacgcgctcccacagtgctcgcgaggtgcagtgcgcccctgggggctccggggccgtcgggccaggtcggcttggcgcccagggactggccggacgggctgggcctttggcgggggtggaagaggaggttgccgcgccctgcccggcccaggtgtcgtctccgggggcggggtttggagccccgcagcgggagattcccggccggactggcggacgagcgtcgagagacagaagccgaggagaggaggctaagccgggcggcgcggggagcgcactgagcaggcaaagtcgcagggccgccagcatgttctcccgaaaccaccggagccgggtcaccgtggccaggggctccgccctggagatggagttcaaacgcggccgcttccg

SEQ ID NO: 23748 - DNA, 2300 bp, Homo sapien
tacccagctgatcacagccttagtcccttgatactttctgcctttcctgaccttctcaaccctgtctggcccctctgcctggctgtgcaggacaggtgctcacttggttctgttcctggttcttttcctcttatctacttactctttctgggtgtctcatctactcccatcacttgggggcctccagtattacgctgatgacatccccactcacactttcatccttggtttctcctctcagctattccacctccacccaggcattcccacaggcacttcaaagtcgccttgggcaaaactaaataattcccttcttaacttgcttctcttcctatgttatcttccttactgaaaataccaccttcccgctaaatacttaggctagaaacctatgagtcagttattattatttgcttactgaagcatctactatgtgcctgtgcctgtgcctgctgccaccctaagtatcatgagttcttgatttcctttattccttgaaagagccctcatagcggtggatcctactgtattccatcttatagagctggattctcaggttcagagagcttaaataattttaggcccaaggttgcatagctaataaatggtgaaactgggatttgataataggcttgtctgactccaaaatcccttttcataatcacatactacatgacttaatcctggattccccaatataattgctcattgattcttgataattttatcactgaaatgtaagagacttttcactgctgttaccttgctcagacactcatatatatttagatatatgtatataggtgttattttctaattataaacgtgatatatattggctgtaagaaaatacattacatacctaaatagtgaaagttcctcaaccccaacttctacagttaaccaacattaacaggtatacattcctcaattttttctatgtatttgctagtatattatgcttttaaaaatcagatcacataatcttgaaatttacttttttttttttttcttttttttgagacggagtcccgctctgtcgaccaggctggagtgcagtggcgcgatctcggctcactgcgacctccacctcccgggttcaagcgattctcctgcctcagcctcccgagtagctgggactacaggcgcgtgccatcacgccggctaatttttttttttttttttgtatttttagtagagacggggtttcatcgtattagccaggatgggaaatttacttttcttatttcgtgtatcagcacatacaaacctacctgtttttatgtcttttttaaaatgaggtaaaatatacacgttttatacaaaattcaaaaggcacaagagggtataatcataaaaaaataggtcgccatccacccttgttctctagatgctcatcagcaaatgactcttaccaatttcctagatagccttctggggcgcctcatttcttttccaagctgcttaacatcccactgtatggatacaccaattcatcaggacacttagattgtttaaattctgtgtcaatctcattaattacttacaactcaacttttcttagcaatatggtgttccgcattgtacagctgcaccgtaattcatttattcatttccctacttatgaaaattgaagtttaaatacctaaactgcatctgctcttagggcactcgtgctgtttaaccatttcggccattttgtcatcaatatagtttatgtattcctccacccaactgtgagttcctcaaggacaggggcggtgttcatattcatctttgcatcctcttagactagcttcccgcacttggtctagtgtatacattcaccaaacttgtgttcaataattgactcatccgcgctgagttctgaaagctagcgtggggaggcggagccaggggaaagccctgcccatttgggctgtcccgacctcagagggaccggaacgttcgttggaaggatcctcgtttctcagggacgattttggacgcgaagcgtgccccgcacaaggatggttgccatgaaccggaagtaactggttgttttgctggctccagtttttccgcggggcggaaaaggcgtgtctgcgtgtgtcccaaccatttctagtcccctttcctcgcaggacctcatgagtaagctgtggcggcgtgggagcacctctggggctatggaggcccctgagccgggtaagcgcgaatagatcaagcaatttaggtcgtgttagaaaagaagtcccgttcttgctcctcggagagtccagggtacttcggccacaggtggcaaggagaaaggcggtgct

SEQ ID NO: 23749 - DNA, 2300 bp, Homo sapien
ggcattggggatatcgatagtagagaaaagacaaagtttctgttctcctggagctagtattctagtgtgtgtgttggggggctgggaagtaaataagtaaataatttcaaaaagctatatggtttatgacaaaaagaaaagggtgatgaaatagaaagtggcgtaaacaaacagatagaaatgatggaagagagacattagggtagttagagaaggcttctttgaagagataacatttgcaataccagaagagcttttgagcagagaccagcaggcgcacagaccttgagactggaacatgtctagcaaaggagaagaaaaagtggacaagccactgaagggctgtacgcagagaagtgacatacttggtttacatttcaatagattactttggcatctttgtagagaatgaatcttcgtggagacaagagatagaagtatggagaacaactaggaagctgttgaagtaatcagctgagaggcagtggttgctttaaccaagacgaaagtggtggagatggagaaaatcagatgaattatggctatattttggaagtagatacttgtggggaggggaatggagagaaaatatatcaaggctaagcctgggattttggcttgagcagttatccacctgatactctctattgagataagattaaaaataacaacagacctctgggaaagctggtacagttttggtgcacaggtcaggcaggtaacattactgatgcttctccccttgagagataaggacctaaagctaaatgtcaggagatctgggaggaggcagtatttatgaagaggaacctatggaaggtgtcctggagagggtgctcattaattaatatcccgcctccgaaggcctgcactgctcaagaccctgccttccatgtcccttctttcccctcccccgatctggccgacctcgcctctccatcttcctccattttcagacagcaccccgtctctgtctctccctagcgagctctgctccagaaggcgcggagtcaaccttcccctatgctgccgctgcctgtagctgagggctgcccacctcccgccctcacagaggagatgctgctgaagcgcgaggagcgggcgcggaagcggcggctccaggcggcgcggcgggcagaagagcacaagaaccagactatcgagcgcctcaccaagactgcggcgaccagtgggcggggaggccgggggggcgcacggggcgagcggcggggagggcgggctgcggctccggcccccatggtgcgctactgcagcggagcacagggttccaccctttccttcccacctggcgtccccgcccccacggcagtgtctcagcggccatccccctcaggcccgccgccgcgctgctctgtccccggctgtccccatccgcgccgctacgcttgctcccgcacaggccaggcactctgtagtcttcagtgctaccgcatcaacctgcagatgcggctgggggggcccgagggtcctggatccccccttttggctacgtaaggcccttaacccggactctgcgccccgtcccatgcccgctcttgagtatcttccccaccctattaaattacatccggtgcttcggcttgtacagaactgggggagtgggatgttgtgggcagaccagtctccggtatacacgtattttgcccctgtcggagcttgcgtcgatgcctggggcttggaaaccaccgcaaaaaaccaggctgcaaaccagcggaccgacttttgggactccgcctcttccagccgggattacctggcgtgcttcggcctttggcgtcattccgaaaacataccgcaagccaatcagcggcaaccttgctcttcggggcggctgttcgttggttgatatgccagagcctgttctgttgtctgtattggctattgccgctgtcagtcagggccgtgggtcgaaccttcacctactctttgtctgtacaagctcttgttgtctgggtgagcggcggaggcgctgctgtggattggtcacagggagaaacctctgatctgttcctattggcccgtccgtcaagggacgatgatgattggtagggcagagcaatctgagtcctagttggtggagttctgcccggatggaagctccggccgcggagtgatggtggcctcagcgaagatgggccgggcagggaccatggcggtggcagcagaggtggcaggggcggggcggctggcggtagaggaggctgtggtcctcagggggctgtaggtggaggtatggctcgggccagcagcgggaacggcagcgaggaggcctggggggc

SEQ ID NO: 23750 - DNA, 2300 bp, Homo sapien
gtgctatcttcaaaggaccgtttttcccctccccctttaaaaaagaaagctaggaggaggcagtatagtgttgtaatgagccagactgcttggggttgagatcctagctttgtttttatgtagctgtatgactttagacaaattatttaatctatcagtgcttatttcatttgtaaaatgaaaataatagtacttttctcataggactgttaaggagattaaatgaattaatatctgtaaagtacctaaaacattgctgggagtgtagtaactgctgttatctaagaggccttatttattcttttttttttttttttttttttttgagacaagagtttcgctcttgttgcccaggctggagtgcaatggcacaatcttggctcactgcaatctctgcctcccgggttcaagtgattctcctgcctcagtgtcacgagtagctgggattacaggcatgcaccaccatgcccagataattttgtattttttagtagagacggggtttctccatgtcggtcaggctggtctcgaactcccagcctcaggtgatccgcccgcctttgcctcccaaagtgctgggactacaggcttgagccactgcgcctgccctaagaggccttattctaaagtcaaaagaacaacctggatttgagttccccagctccataattaactggctgttattttgggtcagtcttaactactctcctcatctgtaaaaatgggggtggtctggccaggcgcggtggctcacgcctgtaatcccagcactttgggaggccgaggtgggtggatcacctgaggtcaggagttcgagaccagcctggcaaacctggtgaaactccatctctactaaaaatacaaaaattagctgggcgtggtggtgggcacctgtaatcccagctactcgtgaggctgaggcaggagaatcacttgaaccctggaggcagaggttgcagtgagccgagatcatgccattgcactccagcctggtgacagagcgagactccgtctcaaaaaaaaaaaaaaaaaaaaaatgggtatggttcaacatgcattgagtgctggcattgtgcttctagactgtgaacttgaggttggggccattttctctgagtccccagcaccttgcataatgcgatatagggtgtacaataaacatgtgttgaatttataaatatttagcatctgccttatgcctataattgattagtactgtgatacaaagatgaaaaatgaaacaggtatgtaataagtgctacaataaggatgtcgacaaatgcaacggtagcaagaaagacaaaaacaggactaaccattgggtttggtcagatgatttcataagcaaaaagtctaccactagtggagagtggggccaccagtcagattatagtgaaatataagtggtcgtgttgcataaagcatcagtctctctctctctctctctctctccctccgtccctccctccctccctccatctctctctctctctctctttctttttttttgaaacagtttcactcttgttgcccaagctggagtgcaatggcgcaatatcggctcactgcaacctccgcctcccaggttcaagcaattctcctgcctcagcctcccgaatagctgggattacaggcacccaccaccacacccggctaatttttgtatttttagtagagatggggtttcaccaagttgaccaggctggtctccaactcctcatgtctggtgatccacctgcctcggcctcccaaagtgctgggattacagatgtgcgcctcggtgcctggccacatcagtcttttttttttttttttgagacgaagtctcgctctgtcgcccaggctggagtgcagtggcacaatctcggctcactgcaacctccgcctcccgggttcaaacgattctcatgcctcagcccaacgttagattggtttttccgagcctgtgaactccatggggtcgccagataaacgcaatcccggtggaccaacgcccaggacagacgctacgtaccaaccctgtgtcaagccgcaggcagcggttccggactctgggacttaacctaacgtggcggggcgggacttccggcgggaggcggaggcggaggcgcaggcgctggctggcaggtgtcgctaaccggacggtggtcgccagggcgagaggcgggagccggagaggtgaggcaggacccgggctccactgccgcctctccgagctcttgtgacgcggacctcagtgccaggatggctcggggcgagcggcggcgccgcgcagtgccggcagagggagtgcggacagc

SEQ ID NO: 23751 - DNA, 2300 bp, Homo sapien
tcgctcactgctttgtgtgtcccaaaccctattctcaccattaatctggcttcagtatatccccagcagccacctaccttccactcctgccttaccaggtgcttgtcaggaggtccagaccacgaaattgcccagcagctgcctcaatagcctggagagcttggagcccccgctccagcctggaacatctccagcccagacaggtcagctgcaaagcacactaggaggaaggggacctagcccggagggctacctggtgggaaatcagcaggcctggcttgccctcaggcaacaccagcgaccccgttggcacctgccgtttttttcctgcctgggaaccagtcctgaatcctaaggagcctgggaccaggagccagaaagttaagagctccccatctctagctggaaaatccagacatttggaattgcatattaaggaagcccagaactggaagcttggaggaaagcatactggagaataagctacaaagagcctgggcttaagaatccaagattaggggctgggcgaggtggctcacgcctgtaatccagcactttgggagaccgaggcaggcggatcatgaggtcaggagatcaagaccatcctggctaacacggtgaaaccctgtttccactaaaaatacaaaaaattagccgggcgtggtggcgggtgcctgtagtcccagctactcgggaggctgaggcaggagaatggtgtgaacctgggaggcggagcttgcagtgagctgagatccagccacagcactccagcctgggtgacagagcaagactctgtctcaaaaaaaaaaaaaaaaaaaatccaagattaggcagggcatggtggctcacacctataatcccagcactttgggaggctgaggcaggcggatcacctgaggtcgggagttccagaccagcctgaccaacatggagaaaccccgtctctactaaaaatacaaaattagccaggtgtggtggcgcatgcctgtaatcccagctactcaggaggctgaggcaggagaatcgcttgaacctaggaggcgaaggttgcggagagccgagattgtgccattgcactccagcctgggcaacaagggcaaaacttcgtctcaaaaaaaaaaaaaaaaaaaaaaaaaatccaagatcactccagcacctggaatccagagtaaagagcaagaccatagcctggaacctgaaggtcagacccttgggaggttcaggcctagttctccatcactgaagatatctcagggataaagagttgagtgctcggccaggtgagggggctcacgcctgctcacgcctgtaatcccagcactttgggaggcctagaggggcggatcacgaggtccgatcaagaccatcctggctaacgcggtgaaaccccgcctctactaaaaatacaaaaaattagccgggcgtggtggcacgcgcctgtagtcccagctactcaggaggctgaggcatgagaatcgcttgaacccgggaggcagagattgcagtgagccgagatcgcgccactgcactcctgcctgggcaacaagagcaaaacttcgtctcaaaaaaagaaaactggctagaatgcacttcaacttaagtcctgggagctacgctaattcatggagaaccacagaggtttaataggcatttctatacctggatcagccccaaggacagtattaccctgtactgcccttcctattactattttcagtcatttactaatattgggctgtagtactttcacgtttaagctttggctattcagagctcactacgtttaatcttcagttacctgaatggtgtttaccttctggtgtggatcatcccggcttgtgttagtgctctctctttggaagaagccaggatttaagatcgagttagcctagatgtggcccagcagggtacagaaggggaaaggctgcagaaaacgggcgtattttcgtgcaaagaggtttttgcgccatttatttatggttttcaccgtcgtatgagaggactattcatgataggctgtatttgctgacagcctactttgggctcccccatgcgttgtgccgaaaccacctctttctttcctgccttcctccgcctgggctaggaagcccagagctgcggttcgcaggcctgctaagcagccggcggccggaagtctatcccgcagaagcgcagccattcacggcctcacgcaatgcgacacttccgcctgcacgagttcttccggggcggaggtcaccatggcagctgccttggctcggcttggtctgcggcctgtcaaacaggttcgggttcagttc

SEQ ID NO: 23752 - DNA, 2300 bp, Homo sapien
ctgctgtctacttaaactcaacatgccccagagcaggctcatcatgagtactgcacacagtgacggtcatagagccctgaggaaggaaggctatagtgggcatgtggttaaagaacgctccatacatggcctatggctggagatggtggctgggaagcctcagaggagtggctggggttactggaagtgggcagtttgtagatccttgtgggggtagcagagaggtggccttaccagagcagaggttccttttgtgggtatgttcactggggttgggtgtggggtagggtagtaagcaatttggcatcaaattgtggagggcatgaacaccagccccaacaatttgcgctttacctcataagtgagggggtgacattttaagagcagaagggtgtaatcccagcatttcgggaggccgagatgggtggataacttgaggtcaggagtttgtgaccagcctggccaacatggtaaaaccccatctctactaaaaatacaaaaattagccaggcatggtgacgggtgcctgtaatcccagctgctcagaggctgaggcatgagaatcggttgaacccaggaggcagaggttgcagtgatctgagattgcgcaactgcactccagcctgggcaataagagcgaaacttggtctcaaaaaaaaaaaaagaggcattgtgagttttcttcctgtttggactataagatcccagtgggtgggggagagactgtcacacactctgcaccttgtattccctcagtgttgagtacagaggctcctaacaaaagtccgttgacaaaagggcaatttccttgacataaataagggaggagaagggggcttgcatttactggagaagagaggaagattttggatttagacaggttgtcagatgtgccaggagccatatgggctccactccatgtctggccgcccccaggtctatcctgtcttcaggctccctggcatctaccatttctttacagagcagctgccattaaccacatttactggggttcctctccctcaagatgggctgtagagcagaaaccagctttattgctgtgttctctccctccaaaaacaacctatcaaaccaaagaaacaaacccagcatataggccttttcttgctttatgggttatattgctctggagtgggctgtgaagaataataatatataataatgcctttcaatgtaaggacattccaaaacttcctgagtctcagaacattcaaatagtcattgcttctggtttacatacagttcttgtcttccttttgtaggtgataaccaaaagatcattgtaggctgggtgtagtggcttagtggctcacatctgtaatcccagcactttggcaggcagaggcaggccgatcacctgagatcaggagtttgagaccagcctgaccaacatggcaaaaccttgtctttactaaaaatacaaaaattagctgggtgtggtggtgcactcctgtagtcccacctacttgggagcctgaggcaggagaatcacttgaacccgggaggcagaggttgcagtgagccgagatcacgccactgcactccagtctgggcgacacagcaagactctgcctcaaaaataaaaggtcgttgtaattcccctttcttccctcaatttctgcccattgcagatcatacaatccctctttctggcatatgctctgtgtgtgtgtgtgtgtgtgtgtgtgtgtgtgtgtgtgtgtgtgtgtgtgtgtgtgtgttgcgggggtgggggcagggtatgtctttctttttccttaaagctcttgtatagtaaaattaacctcaaggattttccatcttttgaaccaagctggggagagcaaggtaatcctagggcaattgttcataatttgggtccagacctcttggaaaacccaatgacaactatggcattgctcctcaaaaaatggccaggcatacacaactatgcaacaattctggggttttatggatgtcaagttggacatagagctccttagatatagaggatcatcataatttgacaagccccttttactttctccctatccctacagctcctgcctgaagagtcactaagtgtcttttctcaagaatgtcataaacaagccatgcaaggtttcaagctctacatgccacggggtcggtactggcggcttcgtctctgtcctggtaactcctcatcccagcttctccttccagagttccaagggggtaatagtgtctcagcccttccaaattccggttcccctccactgtctccatccttgtcctcagcttctgtacccttccctcct

SEQ ID NO: 23753 - DNA, 2300 bp, Homo sapien
tcaggagcaggaaggaagctgggtcccatgctgccaagtactgctgagctctgcccaggaaccagagcaaggtggtctgaagggtacagagacctagggcgacaggcgcaggatctggggatttgagcagcagagtgagtatcttaggggtcatggagtacctttgggaagaggcagatttcagaacagagtgaaagaaaagagatatcctcaactgctctgtgtccccagccccagcccctcgtctcacctgcaggctggcagaaaatccgtcgtaacctgggctctcgaagggcatccaagagaggaggaaagagctgctgcaaaagttcagcagtgccagaggatgtgggaaggctgctctgacccccaagagctgatcccaaggcctggcagaaacctgaggatgagagagtatagtgtggtggggaagcggtaacctgggacttatgtcacccccagtgccccttccttctcaccttggtcccagctccagataagcgactgatgaagtagtctgtgacacaaagatgccagctccttctcacactcctgaggcagggatgctagtgggagaaatgactctggggcctgaaaacaaggtctcactttccacaacccctgcccactcaatgatgaggcaagaaggcatgcttcctccaagactcgggactggggtggaaagcaagactttgccttgaaagctcagaagctatagtctgaacccaggggtgttctttctaaagggcctgcttttgccttcaggatggcaggtcagtgagttggccaaggggaaggaagagaccccagccttcccaaacgcccacccaagcccatcactcaccctgacccagtgcctgactcagctgttgcgctgttgccctggggtccctccagggtcccagatttaggtccagactctgagcacaggctgcccacagcagggtccagtattggctccacaaggccccagcccctccgagccctagtccacagctggctgaacccgccacgcccccgaccaggcccagcagccctggtagcagatccccctcctcttggcaccgcctgcggagctggtccctcaacgccgatccttggagcgcctcgtccagccgacttgccacctggcaaccccgctcccccgtcaagaggcggagcacacgggacgtggggaaaggacgtgcggcccctgggacgtggctcaaggcttttctctgtagtgtgtggtaggcgggaagtgcaaagagcagctcggcgagttgggacgacaggcccgggctggcgggctcccggccgagagcgcgaagctgcatctcgatgacagcctccaggcactgggcggctagtccgatggggcgcgctagcagcagcggctcgagagtctccccagggccgattcgcagaaccgccccttgggaagggtgcagctgcaggtcgcggcaccactggggcaaggggctagggccgccggatggcgagccaggactcagggtcttcatgagtcgcacagccgactgtaggtggtaggcgcagtctcgggcctggaggagctgctcccgctcgcgatgcagccgcagcaacaccgcccggagacgctgcagcgcgggagggatcgggccgccacctgcgggcccccgcctccaggccgcagcatcagcctcgtagtcctcgctcacatccgccggcgtcggccaccacggcgtccctccagaagttccgctcggccagcagtgaacctcccagcgaagaccgcccgttcgacttctctcccactgctcctccccagtgcccccgggttgcgccctcagcgggggcacgataacgagtggaggcaggctacctgagcgagacgcctgggccatggggcggcgggtccagaacgaacctaacgattcccacttccctgcacggaccaacgcccgccgcagctcggacttcgccccatcgcaagagccgttttctccagtccgggagtcgcggggaccttcatggactctctcgtgctccgtaatgggaggcttctgcccctaacaaacatggccgcccactctgtcccaccccgccctttggctggtatcaaatactagactacctttcatttccgggtcactgtagatgcgatggcgccgattccaaagactgtggggcggatcaagctaggtgagcggtatgacaagaccagtgggggtctaggagggcagaggcagcccctcttgggtccacctgtggtctgaacgtttcgagtaggattttatgcagagggcggagagtcgagggtagagtggggaggactctag

SEQ ID NO: 23754 - DNA, 2300 bp, Homo sapien
agagatggcgccactgcactccagcctgggcgacagtgtgagactctgtctcaaaaaaaaaaaaaaaaaaaagtaaattttagtgactaactaaatgtttgaggtaaaagaaagggatataaaatgattatcagatttccagattaaacaactagatgaaagtttgtgttattaaccaaaattgggattagaagaaaagcaaccaatttacaaacatgataaattaatttaacaaaagttaattaaattaacttttgggtttgagtttgagattctagggagtatagcgcctcaatgcttccaaatctgatcctgtccctccttcgaaaaccctgctgtctaccgggcatggtggctcacacctgcaatcccagcactctgggaggccaaggcgggcggatcacgaggtcaagagatcgagaccatgctggccaacatggtgaaacccagtctctactaaaaatacaaaaattagctgggactggtggcatgtgcctgtagtcccagctactcaggaggctgaggcagaagaattgcttgaaccagagaggcggaggttgcagtgagccaagatcacaccactgcactccagcctgggcgacagagtgagactccatcttaaaaaaaaacaaaaaacaaaaaaactctgttgcctacttgagaacatccaaacccctgtgctaagtcaaagcctttcaagccatctgctgccttctctcccaccccatcttttactgttccaaccagattctctactctggtctcactttggtaaagttctctcaacttttccttgttttactgtctttgctcacactgtcccctccatctataaaaagatattttttcattttttttttgaaatggagtctccctctgttgcccaggctggagtgcagtggtgtgatcttggctcactgcaacctctgcctcccgggttcaagcgattctcctgcctcagtaaccccagtgactgggattacaggcgcacaccaccacgcccagctagtttttcgtatttttggtagagatggcgtttcaccatgttggccaggctggtctcgaactcccgacctcaagtgatccgcccccctaggcctcccaaagtgctgagattacaggtgtgagccactgggcccagcttttttttttttttagacagagtctcaccgttccccaggctggagtgcagtggcacgatcatggttcactgaaaccttgacctcccgcgctcaagagatcccccacccaccacgcgggctaaattttttaaaaacatttttgtagagatggggtctcactatgttgcccaggctggtctctaactcctgggctcaagcaatcctcccgtctcagcctcccaaagtgttgagattacaggcacaagccaccgcgcccggcctccatcttttcccaaggaactcgtacccactccctaatcctcaactcagagacccttgtctgctcaattctacccacttcgagcatctgttacatcaggatcatcctcctgatcccctgcccctcacttgcctaagatcctcaagggcatggccggagactacaactccccaaagcctccagagccccgtctggcgcccatccgtcgcgggtttctgcacagctgacttcaaagaggcgtgaccaaaatgagcaggactgggggaaactgagggtcgcttttacctcttcgccgtaatcctctggaccgaattccttgcaaagtttgggtgcagcagcgacctccagtgggcagctgggccgtagagagcagtctacaggaaaggaaggcggagcctcgtcagcgggctcgggacagatgggctagagtcctccccactctaccctcgactctccgccctctgcataaaatcctactcgaaacgttcagaccacaggtggacccaagaggggctgcctctgccctcctagacccccactggtcttgtcataccgctcacctagcttgatccgccccacagtctttggaatcggcgccatcgcatctacagtgacccggaaatgaaaggtagtctagtatttgataccagccaaagggcggggtgggacagagtgggcggccatgtttgttaggggcagaagcctcccattacggagcacgagagagtccatgaaggtccccgcgactcccggactggagaaaacggctcttgcgatggggcgaagtccgagctgcggcgggcgttggtccgtgcagggaagtgggaatcgttaggttcgttctggacccgccgccccatggcccaggcgtctcgctcaggtagcctgcctccactcgt

SEQ ID NO: 23755 - DNA, 2300 bp, Homo sapien
cactcaccctcctacccctctctgtggatccgatttcgccccagctcgagttccagtactgagaaaagtccccttctgtggccccacgatcccctggactagtccctggccgctttgacgaccttagaggggcctctgctgtcctgggcctcctccctttgctactctccacttccatctcctcccccaaactcatgtttaggagctgtccaatcccagtacctgagcccagctgcagaggggagaactaggcgggagagatggaaggggctgtgaggcacaggcccatcagcagagctccacactcctcacagacacacgtaagtaattgagagcagaggtagagacagacacaaaagccacatagaggatgcatgagtgaaggttgcagcatctgcttggtgatatgcctgggatgcagtggggcagttcctgctgcctccagagagctgctttattgcacattaagtgaaaccactaggatggtttccagggctgaggcctgtagcccgaagatctctccaggccctcccctgcccctcaccattaataaccatttaacaacgtcctgaggcagctcagctttccaccatggcctggctctgctctttgatccagcagtggcccatcagcctttaagtgtgttgctcagctttccaggagggcattatgtgaatgttgcgggtgggggaggggggttgttggagtgagccctttaccaagaagaccctatcaaggtgccttcccatctttgtcaaggagtctttggcccaggtgccttggatctcctaagccctgtttagggaaccccaattgcatgcagcagttgccccagggaatagacaggtggacactgcacagatggtgggagatgcaggggtctacaaggaaagtgacataatggacagtccaggagggactggcctggtttttcctgacactgttttaaaaagctagaagcacatcagtttctgacttccctgggcagcaaagcagcaagctcctcaggagtggcagggcttccctgctctaaggtgtgaatcctccagctgtttggggtggaatgtaggaacaaaacccataccctgctgggcctcaactgctgaggccccactgtccctgagctgccttcttcctacaaaggagggctgtgggtgcttacccaggtatgagcccagaaccagaataagtgtggcagataaaaagggcccagattaaataggaatgagtataccaggcctcacagttagtacctgggttgtcaggaatgtcccaagatccagctgggtccgtgaagtctgcccttcaagtctctcttctatggggagtgacccctctctggtcagggcaccttgctccccttggcagtttctgagcctctgcaggctggggaaaccatacatacctgaactatgggagcttaataaaaagaagataaagacagacaaaatcgactgattttgccagtcctcactgacaaagacccctcctgggcagttgcaccagctgggagttccctgggtcttctctcctgcggcccgggtctcccggcagcttctctgtgtgttctgatttcgtcaggtggggcagcctcgggtccattcacctgtgcttgcttcttcgtggcatccccactattcccagttgcagtcgctccgccaggccaggtcctcccaagtgttgcgcccccgacccatgcagcactaatcacttccagccgtcaggaccagaaacaacgtttctcaggggtggggtggggaagagggagccaggttaggagactgaggtcctagctgggatcagagatcccagcacagtcagccctgatagccttcctcagaactttgcaaatccccagccgctggggccagagaaggcaattttatcgtctactagtttatgagccggagcggcggctaggcggggagtcggcggcatacagcgtctggaggtatggcccggcctgactgtgcacggtgcagcgccccgcagcgcggagcagccccgtggccctgctctggtgggtagtttggtcggcttctgctctccgcgcctgccccagcctgtagaaataccctccccggacatctaggagctccagatccaccgcggcccggggtggagaggtgggggcgcaggaggaggggcacacgggactcgggcccagagccgggggcgggtccgaggctgggggcccggattgggagccgagcactggggcccaggcgtttgcggagcctagcgcaacggacagccggaccgccccagcccggccgaccatgaactcgggacgcgagccc

SEQ ID NO: 23756 - DNA, 2300 bp, Homo sapien
agacttcacggacccagctggatcttgggacattcctgacaacccaggtactaactgtgaggcctggtatactcattcctatttaatctgggccctttttatctgccacacttattctggttctgggctcatacctgggtaagcacccacagccctcctttgtaggaagaaggcagctcagggacagtggggcctcagcagttgaggcccagcagggtatgggttttgttcctacattccaccccaaacagctggaggattcacaccttagagcagggaagccctgccactcctgaggagcttgctgctttgctgcccagggaagtcagaaactgatgtgcttctagctttttaaaacagtgtcaggaaaaaccaggccagtccctcctggactgtccattatgtcactttccttgtagacccctgcatctcccaccatctgtgcagtgtccacctgtctattccctggggcaactgctgcatgcaattggggttccctaaacagggcttaggagatccaaggcacctgggccaaagactccttgacaaagatgggaaggcaccttgatagggtcttcttggtaaagggctcactccaacaacccccctcccccacccgcaacattcacataatgccctcctggaaagctgagcaacacacttaaaggctgatgggccactgctggatcaaagagcagagccaggccatggtggaaagctgagctgcctcaggacgttgttaaatggttattaatggtgaggggcaggggagggcctggagagatcttcgggctacaggcctcagccctggaaaccatcctagtggtttcacttaatgtgcaataaagcagctctctggaggcagcaggaactgccccactgcatcccaggcatatcaccaagcagatgctgcaaccttcactcatgcatcctctatgtggcttttgtgtctgtctctacctctgctctcaattacttacgtgtgtctgtgaggagtgtggagctctgctgatgggcctgtgcctcacagccccttccatctctcccgcctagttctcccctctgcagctgggctcaggtactgggattggacagctcctaaacatgagtttgggggaggagatggaagtggagagtagcaaagggaggaggcccaggacagcagaggcccctctaaggtcgtcaaagcggccagggactagtccaggggatcgtggggccacagaaggggacttttctcagtactggaactcgagctggggcgaaatcggatccacagagaggggtaggagggtgagtgattaatgaggaagattaagagattaaaacttgttctgggttggggaggggacactcactcggctgtcctataggttaccccccaccccagcttggaagcacagaagctcctgggtgctcgcctcttcccacccgcgggtagaaccctccctgttcacgatccttctcaagagatgcacggaggccagccttcaccgctggccccgcggggccaacggttttccttttcaggcagtctcttgtgtttcccaccttctcagattcctttgattgtccattcagacatttcggggccctgcgctccctccccttgtagagatccccacattccaaattcgctgtcttgggaaggcaccccattcccgcttaaggatgcttcctcacacctcccctttcagatttcccattctcacccctcagccctacccccaccttatcttgcacccacacaccccatcggcgggttcctccaccccgggccgcccccgctcgaccccgttccccactggtggcacggaggcctgctcaataaacgacctttagtctcggattgccggcccggacattccactgaattctgtgaatgtgtagcagggttggaggaccctcggaataacccccttggggaggtggacaaggacaatctcagcgaagagcttgctcccctcctccccacccttaggaaacgtccgtgaaccggagtgagagggcagtgggagttcagggagcaaagtccaggcggaggagcgtgaggcggggcttccgtccgtcccgcacacttctgggattgttttctctttcagaaagcgctactgcggagtgaaccggtccttatatcttagtttcgtgactttgggggcggcaggcctgtgagttgttttccgccctggacgctgttttgcaaagatctctgcgcgcccaccgccaccctcccgggcgtgcgggccgggaagcagccagcggtgggaaactccgacgccctcctcgacacttttctcccc

SEQ ID NO: 23757 - DNA, 2300 bp, Homo sapien
cagctcctttttgacaatgaagttctccctgatcacatgacaatgaagcagatatggctctcccgctggttcggcaaggtaagccaggccaccctccctgggatcacacccccttcagactccccccaaccatcctacagtcctcaggggaagggtgggctgaggggccctttgaataatataagaacattccccactgactactacttcctcattctctccttagccatcccctttgcttttacaatacagtgtgaaagagaagaggaggtaggggccaagcccccaccccatcccactccccttccctccccagatatttatgtgaaatgaactgcagctttattttttgaaataaaaacttttaaaaagcacctctcttctgccttattcttcctgcctcacactcatgctgtgtcctgccttcttcaaaaatcctctgagtttcattgtgaagaagggcctgtcctctatggccatgggccctcaatgtcttgccaaaggagaagggtagaggatccctatatgtgtgaaaccaggcctcccacaccactctttttggtgatgggaaggtttcctggaggggagctctcagctgtctttgtatgctgcagcatacagtgcgggtgcgggcctcttaggaggtttcctaattcagcggtggtgagaaggctagagttggacagtggctgctgcaggattgaacaagtgtgattttttaaagaaaaatccaaagaattgcattatagttttataacttgggggatggggacaaaaaggagggagaagtctaaaaaacaaatggagtggggccacaggaattgtcagaaatggaggcttaggctgtccatacaggattcagcaagtacttggggactgcgactagaagaagccagggtggggaataagtagctgaggaggagagggagctgatgtggaggagagcaagggcaacttcaaggaacaaaagggaagctgcaaggcaccagctccattaattcagcaaacattccttgtctgtatgccatgccagggtccttgttctatggttctctcagtggggtagctagaaacttgcccaacagacaggaacagacagaagccaaagcaaagaattcctgaaggtagccggcctgctgccaaacctgggacaaactgtatggaggcgcagcgtgtgtagccagaacccgagttaaaacctaggtcccaccctggccggtctgactccacggcttctaggggttggttgtgcgaagctgttgagggctgaaggcgctaaccatcaaagatggaggtcgggtggcagaagatggggtgggaggcagagagtgagtacagcgaaggcggcctcaactggataagaaaactccagacttgcgggaaaggcctgagctcgcattggacgctctggggtgccacagtcggacactgtttccgggagacctccgcctctccgcgcggatgaagaggctgcagacgccgaagaagagctcgagtgcgtggggcactgatggggatcggggtgggcacacagcagacggcctgggtacgcttctttcctgacatggtctccaaggttagcaaagcttccaaacgtttccaggcctccagcctggaatgcctctccccccgctccccgacctcttccaggaacaccccagctcagggctccccactccccttcctgcgaattgaagctctgtgggctttgcggtccgggcgggcgagtacctggcggccggggctgttctccaggagtttctgcgcgaaaagtttcctaggagtgacgggatggcgtgggctcaggggagagtagaaacgctcccgggggctttgcagggaccgagcagctgcgggagctggggagcagtctgactgggactccctggaaggccctgccattggggctgggcggcagctcggcgtcgaaaaagccgggtctgaagattaatgtgccgaggccggagaccctgaggaccaagtcacgggacttgcccttggtgactcacgccttgaggccgagcagcgcggaaggcgctcaggccggatctggggtggggcccagccgagccttggtcttgtctgtcagcagcggcagctgcactgcgtctcccaaggtggctgaagctggccagctgcgggctccgcgccgctcgtcccgggtctatgggtccattccccacgcccacccggaccccggggtcactcgggtctccgtctgtgccagggagggagaatcacgcccagggtcctctctggcttcgcgcgactgagaacgcgcccggacgcggcgcggcgct

SEQ ID NO: 23758 - DNA, 2300 bp, Homo sapien
cttggattcattcatgtattcatccagaaaagttttattgaacaccaactatgcacctggcactggagctatatctgtgaacacaacagaggaaaaaaaatccttgccactgagaagcttatagtctagtggaaaaggcagatgaaaaactaggaaatatgttttctagaaaatattttctgaaaataactagaaaatataatatatattagaaatgtatattaaataataataaatgatagaatgctaataagtgctaaccagaaaaaaaagagcaaggaagtgaaagggtgggtgagttgttattcatctagagtgattacagcagcctcatgagtaaagacctgaaagaaggagggagccattttggatacctaagcatttcaagttggggacacagtggaaggatatcctggtgtatctgaagagactatgcaggcccttgcacaccactctgagactttgactttcattctgattgaaaagggaagctctcaacaggttttaaacgtaaaaaaggaacaacctaatttttcaactttatttttaatagctttcttgaagtataatggacatataaactgcaaatatttgaagtgtacaatttgataagttttgacatatgtatatacccatgataccatcatcaccataaaaataataaacatatccacatctcaaaaattgtcctttgtcctttgtgtttcatgttttatcagaatcactagctctgagaaacagcactcaactgtgatgttgagaacaggcgaagggggactcaaggaaaacagtcaagaggccactacagaggacagatgatagtggctcggaccagggaagtaggtaaacaggggctgtaacgaataattgattaatcactaatctcataacttcttgctgcatattcacttcaattcactctgaagagaaatgaacaaaaatgtcgctttcacaggataacctcccttcaaaaaagtccgctagctcccaattgccctcaggctaaaaatcgcaactctttatggccctgctttttctattaccactctcaaatctacatcttgaccttcctgtcctctggtcattcccctccacgtcctttctatttcaccacacttccaccccctcccccaagtctaaattgtgcccaaagtcccactttctccagaaagccttttttgaggtctccattggaatctctcccttctcgtatctccagttgcatttgatgttaatacctcatagcaaatttatccctttttaagtacccagagccggcggtgtagagctctcgagcgagcaccccgcgtagtccccaagtgcgggactgggcctatgctactacaggcgctcgctgcctaagcctgtctgtgtgtggcagtgtcctagtcgtcctcccctcctccttcggcatctgctctgcattagtctgtcccaggcctccgcaggcgccgatgattaaatcatcatcattaaccagggcctgccccccccatccccggcagcaggggggagaatgggggaataagatcactaccaagtccctgggggtctctcactccccatcccccggcaccctctccgagactctgcaaagcccaagaaactccctccgtgaagccgggagaagacccgccatctggacgaagctccgctacgcggacgccgacagggcggcattacgaggagaggacccaggaggggcttcttcagcagggtcgtcgtcacagaagaccgacgaccctgagcgggtagcgggcacagactgccaggcctttgggggtaggagggggcagtctttcgcaggctccgaaagttagtcttgaggtcgcgtagggcctattatgatgatttctacaggaggttgaagagataagacccttccctgtgctcccccccccccactccttaattacggattgagcaggggaggggccggtggggctcaggtgagcacacagggagaaagggacgtgggcggggccttacagagggtgagcgaatccgaaaagacctagaacctcgttgctgggagacaagtcccgccctgcaggcggcaccggaagtggccggctgggatcagcctttaagatggcgtctcctcaggggggccagattgcgatcgcgatgaggcttcggaaccagctccagtcagtgtacaagatggacccgctacggaacgaggtgcaagggcggcagggttactgctgtggtcggccagcggtgcgaattggggcgggctaaaggacgggcggtggctggccgggcgcccagtgcgcctgcgcagagacagagtgccc

SEQ ID NO: 23759 - DNA, 2300 bp, Homo sapien
gtgcaagctgccttcattatagtaaccctttctcagagagctccagtgttcagtatccctcctccaggacttccctggcatgttttactttgttggtcatcaattattttttgaagtgtcccttctttttgcttctgtaatatcttattccacatctttggactttcgtagtcactgcttatgtttttcctccactgattttccttcttccactgaagactgtgaggattcttcagagctcagacttaagctttcttttttcttttcttttttttttttttttaagacatgggatctcactctgtcgctcaggctggagtgcagtagcattatcacggttcactgctgcctcaacctcccaggctcgagcaatcttcctaactcagcctcccaagtagctgggactacaggtatgcgccaccatgccaggctaatttttgtactttttgtagtgacggagtcccaccatgttgcccaggctggtctccaactcctgggctcaagtatccacctgcctcagcctcccaaagtgctggaattacaggcattagccactgcaccaggccttaagctttctttatctcttcatctgctcaagtttcacccattccaaaagtcccaactctcatatccagccagataactctgagacctccatcccttgttctgacactccagccccaccgctcactctcctagccttctgacaagctccccctgcttccctgcagccaccttaagtccagcaggctggaggacatgcttccctccaaagctcttcattcaccctcttacccaggcctaccaagccaggttcctggctacttcctcctattatactttcctttgaactgtttcagatacagcccttcctttccattgccattgctaaaaccctaatcgaggctgtcatcaccaccacttggattcattcatgtattcatccagaaaagttttattgaacaccaactatgcacctggcactggagctatatctgtgaacacaacagaggaaaaaaaatccttgccactgagaagcttatagtctagtggaaaaggcagatgaaaaactaggaaatatgttttctagaaaatattttctgaaaataactagaaaatataatatatattagaaatgtatattaaataataataaatgatagaatgctaataagtgctaaccagaaaaaaaagagcaaggaagtgaaagggtgggtgagttgttattcatctagagtgattacagcagcctcatgagtaaagacctgaaagaaggagggagccattttggatacctaagcatttcaagttggggacacagtggaaggatatcctggtgtatctgaagagactatgcaggcccttgcacaccactctgagactttgactttcattctgattgaaaagggaagctctcaacaggttttaaacgtaaaaaaggaacaacctaatttttcaactttatttttaatagctttcttgaagtataatggacatataaactgcaaatatttgaagtgtacaatttgataagttttgacatatgtatatacccatgataccatcatcaccataaaaataataaacatatccacatctcaaaaattgtcctttgtcctttgtgtttcatgttttatcagaatcactagctctgagaaacagcactcaactgtgatgttgagaacaggcgaagggggactcaaggaaaacagtcaagaggccactacagaggacagatgatagtggctcggaccagggaagtaggtaaacaggggctgtaacgaataattgattaatcactaatctcataacttcttgctgcatattcacttcaattcactctgaagagaaatgaacaaaaatgtcgctttcacaggataacctcccttcaaaaaagtccgctagctcccaattgccctcaggctaaaaatcgcaactctttatggccctgctttttctattaccactctcaaatctacatcttgaccttcctgtcctctggtcattcccctccacgtcctttctatttcaccacacttccaccccctcccccaagtctaaattgtgcccaaagtcccactttctccagaaagccttttttgaggtctccattggaatctctcccttctcgtatctccagttgcatttgatgttaatacctcatagcaaatttatccctttttaagtacccagagccggcggtgtagagctctcgagcgagcaccccgcgtagtccccaagtgcgggactgggcctatgctactacaggcgctcgctgcctaagcctgtctgtgtgtggc

SEQ ID NO: 23760 - DNA, 2300 bp, Homo sapien
ttgaagtggggcactaaaatattttaaaaactctccagaacacttgtatgaactactgagtttgtgaccattctccttaaaggattagttggacagtccctgggtggcagtaccatctgtgctgaactcaaacggcaggggtgtacgggtctgcatgatgttgcctttttttcatttgttgattcactcactgattcattcaaggaggatttatttaggttggctggagacacactggttaccctgcccccctgcccccagactcaaccttcagagcagagaatgggactagcaaactcctaacctgcacaccagccctcttcagagattatatttctttgctgtctccctaggtttcctgctcccatctggaggaatccagcccttggtaccaaggaagttttttttgttgttgtttgtttgtttgttttttttgagatggagtcttgctctgtttccccagactggaatgcagtggtgatctccgctcactgaaacctctgcctccctggttcaagtgattctcctgcctcagcctccccagtagctgagattacaggcacctgccaacatgcccagctaatttttttgtatttttaatagagacggggtttcaccatgttggccaggctggtcttgaactcctgacatcaggtgatccgtcccctcttggcattccaaagtggtgggattacaggcatgagccactgctcccggcctgaagatttggactaaacaggttcatgcttccttgtagccctctctactgctgagaaaagtgcatgggtttctgtaaagagacgggaggtgataatgtctgtcttctccatcaagatgaaaatacatctgctaaattggtaggagcccccaccctctttcagaacgggctgttagcagggctgaggaggggctggacaaattggatagtagagtggtcaaggtgggggaggttgacacttttttttttttttcagacagagtcttgctgtgttgcccaggctggagtgcagtggcgcgatctcggctcactgcaagctccacctcccgggttcatgccattctcctgcctcagcctcccaagtagctgggactacaggcacccgccaccacgcccagctaatttttgtatttttagtagagatgggtttcaccgtgttagccaggatggtctcaatctcctgacctcgtgatccacccgcctcggcctcccaaagtgctggtattacaggcgtgagccaccgcgcctggcaggttgacacatattaatgcccactattcctcccactgccctctgtcccatttatggttcacctcctctagatataaggcttcagagaacactgaagggctggtggacagagctcacccttctttctcttctttatctttctgcccagatgcccaaatatcattcctggttcccaggggagaaaagaccccttcaccctgccccaggcgccaggctgccagcccatctgctggggagaaaggagggggcagagtctttcccaggggatcctggagaatcagtttgaagatcagtgctcccagggagatccagctagtagacttacaaagcatttcggttcacacgggaaccagcaggatggagctgaacagcggggtgggctcgggacgagggtagagggctggcacagcagggtaaggtcctttggccaccacgtgtcagaggtaggctgagctgctcgttggtgcccacccgccaccgccaccgcaggatggtagaagcgcccccctctctgagcccagtctcaccggctcagaggcgccagggcccccccgggggccggggcgggccggggaaggtaatgtaattccggcccagctaacccgattaccgcggcctgcaccgggcagggcggcggcgggggcgggtctaaggctcaggggcccgcccgcgggggtcccatccccgggaaggacgcagagttcacgcactcccggctcctggattcatggccagaggtcacaaggtcaccaagcggcttaggtctttccccacctcccttctctgacagctccaggccattttttgagtttgggtggggtaaaatgtttatgggaaacaaggcggccaggatccaaccaaggcctcagtgaggtcccacgtgtcccccgtggcgagatttcgccctcccgccgttgaggaggaagagtgtgagaacagacttcctaggcacagaatggaggggcagagtcctgcattgaggactccctgcacttggggtccgggggtaagtgccagccccaagaacccgccggcctgatttggcccgggt

SEQ ID NO: 23761 - DNA, 2300 bp, Homo sapien
gcagggctgaggaggggctggacaaattggatagtagagtggtcaaggtgggggaggttgacacttttttttttttttcagacagagtcttgctgtgttgcccaggctggagtgcagtggcgcgatctcggctcactgcaagctccacctcccgggttcatgccattctcctgcctcagcctcccaagtagctgggactacaggcacccgccaccacgcccagctaatttttgtatttttagtagagatgggtttcaccgtgttagccaggatggtctcaatctcctgacctcgtgatccacccgcctcggcctcccaaagtgctggtattacaggcgtgagccaccgcgcctggcaggttgacacatattaatgcccactattcctcccactgccctctgtcccatttatggttcacctcctctagatataaggcttcagagaacactgaagggctggtggacagagctcacccttctttctcttctttatctttctgcccagatgcccaaatatcattcctggttcccaggggagaaaagaccccttcaccctgccccaggcgccaggctgccagcccatctgctggggagaaaggagggggcagagtctttcccaggggatcctggagaatcagtttgaagatcagtgctcccagggagatccagctagtagacttacaaagcatttcggttcacacgggaaccagcaggatggagctgaacagcggggtgggctcgggacgagggtagagggctggcacagcagggtaaggtcctttggccaccacgtgtcagaggtaggctgagctgctcgttggtgcccacccgccaccgccaccgcaggatggtagaagcgcccccctctctgagcccagtctcaccggctcagaggcgccagggcccccccgggggccggggcgggccggggaaggtaatgtaattccggcccagctaacccgattaccgcggcctgcaccgggcagggcggcggcgggggcgggtctaaggctcaggggcccgcccgcgggggtcccatccccgggaaggacgcagagttcacgcactcccggctcctggattcatggccagaggtcacaaggtcaccaagcggcttaggtctttccccacctcccttctctgacagctccaggccattttttgagtttgggtggggtaaaatgtttatgggaaacaaggcggccaggatccaaccaaggcctcagtgaggtcccacgtgtcccccgtggcgagatttcgccctcccgccgttgaggaggaagagtgtgagaacagacttcctaggcacagaatggaggggcagagtcctgcattgaggactccctgcacttggggtccgggggtaagtgccagccccaagaacccgccggcctgatttggcccgggttgagccatggtccgttttacacggattttggaaaatcgaaattctaggaaacacaggacaccaattaccggtgcgcatgaacagggctggggggacctacaggagaggccagaaggcgcaccacgatcgccagcccaaagcggccgttccccgcccttagcccctgccgtccccttcccacacctgttctcttcctgggcctgcagctcaccgggcgccgttccccagccgcttcttacgcagccgggaaaccacaacgagatttggtcttcgagagcatttaggcggggaccacaacgaatccgggagttggccagaaggatccatcgagaggcgaagagtgggggctgggggaggaggcacctgcggaggaagccggtgaggcggaggcagcccaaaggcggaggccgcccaaaggcggaggccagcaaggatggaggcgcggtgagcatctccgctgactcagcggcccatgctcgggcccctcccgcgctgagcctggctcctaacaccctggccccctgtccccctccccgcacatctccgccagccagccttccccctgcgcttggcgcaaacaggcgtcccttcccctttaactgctgggccccgcccctgccctacccccagcccccactacccacccgggccgatccgtcagtcactgccccagccggagctggccaaccctctccacccgggacttgggcagcggcgccggcagcccagcgtctatttgcgcttaagagccagcaaggaagctccaggggccccagctggccgtgctcccccgggatgcaagtccctgcgctgacgcccggcagcggctggcacgggcgcggctgctccgggtgcacagggatgctgctgtttcggggaccccggcgccctgc

SEQ ID NO: 23762 - DNA, 2300 bp, Homo sapien
ttctcttcccgctactatgagctgctgaagcagcgccaagccttgcccatctgggctgctcgctttaccttcttggagcagttggagagtaaccccactggagtggtgctggtgtctggggagcctggttctggcaagagcacccaggtgtggtgggggttgtgggggcaggcagattctgggagtggacaaagggaggacaaagggaggacaaagggaaagtggcctttccctgggcaaggggggactgggctgcgtggggtcatgaggaaggtgaacgaagagagatgggatgggttaggttggccctggaggctggtgaaagaccaggggactccccaaataaggaaagattaaagtggccatagttccctgagcacttctgactgaagtcctacatcttcctcactggctctccttccctacttctatcccagatccctcagtggtgtgcagagtttgcgctggccagagggttccagaaaggacaggttactgttactcagccctaccctcttgcagcccggagcctggctctgcgggttgctgatgagatggacctgaccctgggtcatgaggttggatacagcatcccccaggaggactgcacggggcccaacaccctgctcaggtgggggcctctgcaggccttacccgaatataattccccttattcagtagaaacaaacccattcctctggcatctcaccataccctcccttagcccaactcactcttttttattttatttattttggagaaagggtctcactctgtcacccaggctggagtgcagtggtgcaatcacaactcactgcagcctcaacctcccgggctcaagtgatcctcccacctcagcctcccaagtaactgggaatacaggcgcgcacctccacgcctggctaatttttatattttttgccatgttgcccaggctggtctcaaactcctgggctcaagtgatccacccacctcggtctcccaaagtgtaaggactacaggcatgagccaccgtgcctggccccaactcactctaaattgtgtgtggtgcaatggctaaaataagcccttgaatcccagccaggggcctcagacattcagcctcaccctcatcagaaaaatttcacttcccagctggcgtataccttgtgaacaaagtgttctcagcggggttgtggggtgacagttatgggtccataggctcaggaagtcacagcatatttttctgaccttcaatatcaaaatatacgtcccttggggagaagattccctgagcttgtggggctggtcagtgtccacactgattcctctgcccactaccaatgtcaacaggttctgctgggacaggctgcttctgcaggaggtggcctcgacccgaggcactggagcctggggcgtgctggtactagatgaggctcaggagcggtcggtggcatcagattcactccaggggctactgcaagatgccaggctggaaaaacttccgggggacctcagagtggttgtggttactgacccagcccttgaacctaagctccgagctttctggggcaatcctcctattgtgcatatacccagagagcctggtgagagaccttcccccatctactgggacaccatcccacctgatcgggtggaagctgcctgccaagcagtgcttgaattgtgtcggaaggagcttccaggagatgtgctagtgttcctgcccagtgaggaggtaaaaaacaaaacaaaacaaaaaaaacagcctgcaaaatgagcctgcaaaaggaggtactcatcatcatcttccagtcctgaggaatgggaatgggagcaatgcctcttaggaacagtagagttgcagtatttactctccgttggggtcccagagaaaaacttgaggatttcagggtaaagaggtttaccactcacttttttattccctttaatgcagagatttgtgattcagtgaacccctgaaattataaaaccttcaactttatgagtaatttgcattttctcagagtgaagggccataactttcaacagtctttcaaagggatctgtgaccccaaaaaacgtgagaactgccctaatgccccacccacccttcttctcaggaaatttccctgtgctgtgaatccttgtccagggaggtagagtccttgcttctccaagggcttccaccacgagtactgccccttcacccagactgtggacgagccgttcaggctgtgtatgaggacatggatgcccgaaaggttgtggtcactcactggctggctgacttctccttctccctcccttccatccaacat

SEQ ID NO: 23763 - DNA, 2300 bp, Homo sapien
ggtcagatccaagtgttggggtgagttgggggcaggctatgtactcccttatccctgacctttcttttttgatcctgagaccctagcatagtgcctctcttgcaaagtaggcattcgatgcgtgtttaatgatgatgactccgcaagccctctgacattgtgatcacctcagtttcccagctctggcccggtgacccctcagccaacagccctaacatttgccaagtcttcctgggcccggcaggagagcctgcaggagcgcaagcaagcactatatgaatacgcaagaaggtgagggggttagaggacaattaataggatgtggcaaattggagaatggaattatggagctactacggcaaagcctgaataatatctctccctatgtcccacaggagattcacagagagacgagcccaggaggctgactgagctcaaaggaacaggatggcacccagagccgcaggacggagactgggggcagccctcacccaactcacaacaggctggatgggtgggtggtaaaaagggaaggatgaggctcccccaatgtcacattaaattcatggttttcattcaaggcatctgttgtctctctcggtctcaaaagccctgtgagtgggttccttattccttggctgcgggggatgggggtgagagtcttctcgtacatttgaagggggtagtcagactgcaactgtctaaaatcacctcctcatgccaagtgatgagtgataaattaaggaagtgtaactgaactgaagacccagcttgggtgatcagcccaggttttggaggaagctgctgcaaaactacaagtcccagcatgcctttcacaagcacactacacatcatctatagagttcacacatgctcagtgtggtagctggagcctgttttccataggttcctgactaggttaaataaggtggagcaaatagccccaccccaaaagcaggcttcaggatttgaagtttgagcccatccctgaggtagagccggaatttacctttgtacttcacacggtcagggttggtggtgactacgtgggtctggagctgactgccgtcctgacacgtcctagagctgcaagcaggtttgaatccaggatccctgtgactctgctgttcctctccccaccccctatattctttatccttttcccttcaggactttcccacaggttactaggtctcacataatttctactgcccttgaggacccctgcctaagtaagatttctactacctgccaacggggtaatagtctcaggtagatttctactacctgactatagggactgtcgactaactctcagtagccctttatcaaaatacctagcactgtttcctggcaggaaatgctgggaagggtgggccccagagcatgatcaactgaaggtagaggttaaggatcagggctgaggtgggaagatggtgtcggtcaccaaatatgaccttactggctgctctgccttctgcaggtcctgccagagagccaccatgacctctcagcctctcaggctagcagaagagtatggcccaagtcctggggagtctgaactggctgtgaacccctttgatgggcttcccttctcttcccgctactatgagctgctgaagcagcgccaagccttgcccatctgggctgctcgctttaccttcttggagcagttggagagtaaccccactggagtggtgctggtgtctggggagcctggttctggcaagagcacccaggtgtggtgggggttgtgggggcaggcagattctgggagtggacaaagggaggacaaagggaggacaaagggaaagtggcctttccctgggcaaggggggactgggctgcgtggggtcatgaggaaggtgaacgaagagagatgggatgggttaggttggccctggaggctggtgaaagaccaggggactccccaaataaggaaagattaaagtggccatagttccctgagcacttctgactgaagtcctacatcttcctcactggctctccttccctacttctatcccagatccctcagtggtgtgcagagtttgcgctggccagagggttccagaaaggacaggttactgttactcagccctaccctcttgcagcccggagcctggctctgcgggttgctgatgagatggacctgaccctgggtcatgaggttggatacagcatcccccaggaggactgcacggggcccaacaccctgctcaggtgggggcctctgcaggccttacccgaatataattccccttattcagtagaaacaaacccattcctctggcatctca

SEQ ID NO: 23764 - DNA, 2300 bp, Homo sapien
gaaggggaaatttcccatccctggccctggcttaggcctcatctcatgccctcccctcagacggtgtcagatgcctcctgggtctcagaactgctgtggtcacttttcgtccctttcacggtgtatcaagtaaggtattaactgtcctcacattttggtcgctggggagaggctcacctcaaggtcaaggaattagtggcctctgccctgtccatttgtagatctttatatcaaggttctaccacagaggcaacacaaagtatttacagtatttactattttcccacccaccatgcaaagaggtaccaaagtggggaatggtgacagcctctaccctgggtgcccacaacatagccctggattgtttctttgcaggtggcttcgtcctgttcatcgccaactaggggaagcgaatgaggagtttgcactccgtgtacaacaggtggtcgggtgcacagacagggtggaggcggggtccctgcttaggaggagagggaggaaagcttgagatcttgacacttccagtcttccaattctccctagctggtggccaaggaattgggccagacagggacacggctcactccagctgacaaagcagagcacatgaagcgacaaagacaccccagattgcgcccccagtcaggtatgtggtctctatacattacagcttttggggtttttttttttcggcctactgtgattcctcccctatttctgtgctagttagcctctccttctagttctctacttaccagaatttcttttttctttttttcctttttccacagcccagtcttctttccctccctcccctggtccttctcctgatgtgcaactggcaactctggctcagagagtcaaggaagttttgccccatgtgccattgggtgtcatccagagagacctgggtatgggaaagggtggccccacactgggagatgggcacagggaggaaaagtgggttgtgaaggaagaaagtaagtagggagtggactcccttctcttttctccccagccaagactggctgtgtagacttgactatcactaatctgcttgagggggccgtagctttcatgcctgaagacatcaccaagggaactcagtccctacccacagcctctgcctccaaggtgagacccaggaaatggtcagatccaagtgttggggtgagttgggggcaggctatgtactcccttatccctgacctttcttttttgatcctgagaccctagcatagtgcctctcttgcaaagtaggcattcgatgcgtgtttaatgatgatgactccgcaagccctctgacattgtgatcacctcagtttcccagctctggcccggtgacccctcagccaacagccctaacatttgccaagtcttcctgggcccggcaggagagcctgcaggagcgcaagcaagcactatatgaatacgcaagaaggtgagggggttagaggacaattaataggatgtggcaaattggagaatggaattatggagctactacggcaaagcctgaataatatctctccctatgtcccacaggagattcacagagagacgagcccaggaggctgactgagctcaaaggaacaggatggcacccagagccgcaggacggagactgggggcagccctcacccaactcacaacaggctggatgggtgggtggtaaaaagggaaggatgaggctcccccaatgtcacattaaattcatggttttcattcaaggcatctgttgtctctctcggtctcaaaagccctgtgagtgggttccttattccttggctgcgggggatgggggtgagagtcttctcgtacatttgaagggggtagtcagactgcaactgtctaaaatcacctcctcatgccaagtgatgagtgataaattaaggaagtgtaactgaactgaagacccagcttgggtgatcagcccaggttttggaggaagctgctgcaaaactacaagtcccagcatgcctttcacaagcacactacacatcatctatagagttcacacatgctcagtgtggtagctggagcctgttttccataggttcctgactaggttaaataaggtggagcaaatagccccaccccaaaagcaggcttcaggatttgaagtttgagcccatccctgaggtagagccggaatttacctttgtacttcacacggtcagggttggtggtgactacgtgggtctggagctgactgccgtcctgacacgtcctagagctgcaagcaggtttgaatccaggatccctgtgactctgctgttcctctccccaccccctatatt

SEQ ID NO: 23765 - DNA, 2300 bp, Homo sapien
gaaagctacggccccctcaagcagattagtgatagtcaagtctacacagccagtcttggctggggagaaaagagaagggagtccactccctacttactttcttccttcacaacccacttttcctccctgtgcccatctcccagtgtggggccaccctttcccatacccaggtctctctggatgacacccaatggcacatggggcaaaacttccttgactctctgagccagagttgccagttgcacatcaggagaaggaccaggggagggagggaaagaagactgggctgtggaaaaaggaaaaaaagaaaaaagaaattctggtaagtagagaactagaaggagaggctaactagcacagaaataggggaggaatcacagtaggccgaaaaaaaaaaaccccaaaagctgtaatgtatagagaccacatacctgactgggggcgcaatctggggtgtctttgtcgcttcatgtgctctgctttgtcagctggagtgagccgtgtccctgtctggcccaattccttggccaccagctagggagaattggaagactggaagtgtcaagatctcaagctttcctccctctcctcctaagcagggaccccgcctccaccctgtctgtgcacccgaccacctgttgtacacggagtgcaaactcctcattcgcttcccctagttggcgatgaacaggacgaagccacctgcaaagaaacaatccagggctatgttgtgggcacccagggtagaggctgtcaccattccccactttggtacctctttgcatggtgggtgggaaaatagtaaatactgtaaatactttgtgttgcctctgtggtagaaccttgatataaagatctacaaatggacagggcagaggccactaattccttgaccttgaggtgagcctctccccagcgaccaaaatgtgaggacagttaataccttacttgatacaccgtgaaagggacgaaaagtgaccacagcagttctgagacccaggaggcatctgacaccgtctgaggggagggcatgagatgaggcctaagccagggccagggatgggaaatttccccttcaagccccagagattccctgttcaacacacactcaccacagagaccaggggtctctgaacttgcagggtaagaggttgtaccacatcttggatagaaaatggccaggaactagaagaggaaggagaaagtaggatgggaatccagccagcctagtcagcagctcacacctgccttataacaggcaactgtcaaactctacaagcacataattgaagaatgaagggattcaggagaaagaacttaaagtggacagaaaggaaatgaactggagatgatggggtctaagggccgaagaaagttgtaaaaactcaagggcccacaagcttgaccacctacccagctggcgccccatacctgtgctaaacccacctgaagcgcaggagcccctcccggccattggtggcctcttcctcagggaatagcagcagaggagtggggggaagcctcgtggaagcacagaatctcttgagtgactccaccaactccccccgcccattcatctccatgaagccccgagaccagcacacaaagctggggggactattgagtagaggctgggaaccaggagaagagaaagcaagaagaaaaatattgaggaaaatgaaaaaaaaaactgacatgttgggtagaggatcggggttaggggtaaggctcagtatcctccatggggaacgcgagtggggacaggggggccttcagctgggccccagggaaccgccccgtggcgctctcggcctcgctctcactcacggtgctacaggtggtaagcaaattgactatgttgtggtcgaaaggtgtcacatggttggaaatgaggaccctgacactgtgatcccggagtccggagtcctcctgccgggccacgagccctagcaccgcacacatggtccgcactacgaatctggggacacaggaggtggtgactgtgtggcctcgggccagacccagctctgacactccccgaacgcccgcgtcggaacctgcgaaggacgctgtctggcagcgcgcagctgaccaggaagacgtggatcccgagaaagaggcgcaggacgaggaggcagaacccgactggcgcgtagagcagcagcacgagcagtaggaagcagtcacccggaagcctgggggcgagaggcgaagtggtcaggcgccgaaggccgagagcacgcggggatcggtctcttcccgccgggtctcttaccggtgcgagtcaaagagccgctccg

SEQ ID NO: 23766 - DNA, 2300 bp, Homo sapien
ctttcctccctctcctcctaagcagggaccccgcctccaccctgtctgtgcacccgaccacctgttgtacacggagtgcaaactcctcattcgcttcccctagttggcgatgaacaggacgaagccacctgcaaagaaacaatccagggctatgttgtgggcacccagggtagaggctgtcaccattccccactttggtacctctttgcatggtgggtgggaaaatagtaaatactgtaaatactttgtgttgcctctgtggtagaaccttgatataaagatctacaaatggacagggcagaggccactaattccttgaccttgaggtgagcctctccccagcgaccaaaatgtgaggacagttaataccttacttgatacaccgtgaaagggacgaaaagtgaccacagcagttctgagacccaggaggcatctgacaccgtctgaggggagggcatgagatgaggcctaagccagggccagggatgggaaatttccccttcaagccccagagattccctgttcaacacacactcaccacagagaccaggggtctctgaacttgcagggtaagaggttgtaccacatcttggatagaaaatggccaggaactagaagaggaaggagaaagtaggatgggaatccagccagcctagtcagcagctcacacctgccttataacaggcaactgtcaaactctacaagcacataattgaagaatgaagggattcaggagaaagaacttaaagtggacagaaaggaaatgaactggagatgatggggtctaagggccgaagaaagttgtaaaaactcaagggcccacaagcttgaccacctacccagctggcgccccatacctgtgctaaacccacctgaagcgcaggagcccctcccggccattggtggcctcttcctcagggaatagcagcagaggagtggggggaagcctcgtggaagcacagaatctcttgagtgactccaccaactccccccgcccattcatctccatgaagccccgagaccagcacacaaagctggggggactattgagtagaggctgggaaccaggagaagagaaagcaagaagaaaaatattgaggaaaatgaaaaaaaaaactgacatgttgggtagaggatcggggttaggggtaaggctcagtatcctccatggggaacgcgagtggggacaggggggccttcagctgggccccagggaaccgccccgtggcgctctcggcctcgctctcactcacggtgctacaggtggtaagcaaattgactatgttgtggtcgaaaggtgtcacatggttggaaatgaggaccctgacactgtgatcccggagtccggagtcctcctgccgggccacgagccctagcaccgcacacatggtccgcactacgaatctggggacacaggaggtggtgactgtgtggcctcgggccagacccagctctgacactccccgaacgcccgcgtcggaacctgcgaaggacgctgtctggcagcgcgcagctgaccaggaagacgtggatcccgagaaagaggcgcaggacgaggaggcagaacccgactggcgcgtagagcagcagcacgagcagtaggaagcagtcacccggaagcctgggggcgagaggcgaagtggtcaggcgccgaaggccgagagcacgcggggatcggtctcttcccgccgggtctcttaccggtgcgagtcaaagagccgctccggccccggccctgagggaagctccataactgctgcttcaggagcgcccggccgtcgccgccgccgccattttcgcgcccggccgcaggggctcttgggaaggcggagtctttgggcatccgcccggggtgaggggacccgaagtcctgaggcgcgccggaagggctagcggtcccagcataccccgcggccccttgggccgtctcacaactcgcgtccggcggagaccacaattcccggcattcgtggggcagggaggagtcggcctcccggaatcctggtcccggcgtgcacttctgaaggacttcaggtaccggcgtgccccgcgtcctactgtccgcctgctcgcgtcctgggtgccgcctctgagtagggcgggcgaggaggcagccaaggcggagctgatggctgcgccgagggcggggcggggtgcaggctggagccttcgggcatggcgggctttggggggcattcgctgggggaggagaccccgtttgacccctgacctccgggccctgctgacgtcaggaacttctgacccccgggcccgagtgacttatgggacccccagtctct

SEQ ID NO: 23767 - DNA, 2300 bp, Homo sapien
ggaatctgtgacagagggacaaatgagccccacccagctacatccttccttccctgccctcttctcccagtagaccaccctccaggaagtcccactgaatgcccttcccctatttccaccacattaaaggaacccgtttccccataaggcaggctcactcttcttttccccacgatgcagaaactctcgaagacgatcagaagggatggcaaaggagattccagctgtgaccttcatggtgttcactccaatcacctccccatcctgcagggatacagcccccagttccctagcctaaacaaatagtaggggatgggggcacccgaacaaaagtaccagcaagtgttggggagatctggttggatattgagagatagccaacaaagaactgctcagaaacttgaccaaacatccttgaattaggggaaacctacccttcccacactgacctggggcagggattcttggaaggaaggatgtctcactcaccaggttaaccaggggacctccagagtttccaaactgtaggacaaggagaaaacatgaaagagatctggggattctaagtctgggggcataccaggatgtaggtactttctccaaattctcttctttctcagcccatgaataagtggccacatttttgcagcctaagctctatataggctcatccaccatatatcagttggtgcttgtaccacacagcctctcccccctcccccatcatttgtcatttctctcctatcaggacgcacatcaatagctgcatcagtttgaatgtattccacattggtttgggggagtcccaggtctctggctggacgctgagcagagctaacaatgccggatgtgatcgtgttctgcagtgcaaagggacttcccatggcaacaacaaactccccttgccggacatcagctgagcgtcccagaggcagcgtggggagaggctcctaagggagaatgggtaaaagagacctgtcatctgaagatgcgagcaaataagcagctccaaccagacctggcctaccccagcccccaccttagtctgaatcctcagcgttgcgatgtctgccacgggatccacagctgtgaccacggcctcatacgtgtcgccgcttagcagtctcacacggactctgcgccgatcagccaccacatgggcgttggtgacaatgagcccatcggcagccaccacgaatcctgagccgttcgagatagggacctcgcggcccaagaaagggtgcctgaaatggagggaaagcacagataagaggaggctctgacccctcctacccgcccgccctccagcctgtggcttcagtgcctcccggtctacccccaccattaccggtccaggatctcgatatagaccacggcaggtgctgtcttctccaccacatctgcgatgaagttgtactgactccggggagaagcgggcggcgggctagggacggcggcgaggacggccggaggaccccgacccccgccccacaacaacaacagcactgcccccccagcgcccagcgccaccgccagccacgcgcgcgaacgggttccagagttctctgaggcctcccgggtcctggtatctggggtcaccgcagtcagttgtgcccggggacccggggtcccagacgtcaggcatgctcggggttcagtgaccccaacagacaaccgggcccagagactgggggtcccataagtcactcgggcccgggggtcagaagttcctgacgtcagcagggcccggaggtcaggggtcaaacggggtctcctcccccagcgaatgccccccaaagcccgccatgcccgaaggctccagcctgcaccccgccccgccctcggcgcagccatcagctccgccttggctgcctcctcgcccgccctactcagaggcggcacccaggacgcgagcaggcggacagtaggacgcggggcacgccggtacctgaagtccttcagaagtgcacgccgggaccaggattccgggaggccgactcctccctgccccacgaatgccgggaattgtggtctccgccggacgcgagttgtgagacggcccaaggggccgcggggtatgctgggaccgctagcccttccggcgcgcctcaggacttcgggtcccctcaccccgggcggatgcccaaagactccgccttcccaagagcccctgcggccgggcgcgaaaatggcggcggcggcgacggccgggcgctcctgaagcagcagttatggagcttccctcagggccggggccggagcggctctttgactcgcaccggtaagagacccggcgggaa

SEQ ID NO: 23768 - DNA, 2300 bp, Homo sapien
atggctttgggacactgttacgttgaaattgcagaagcatggactgcctttttaaagacttacacagcacaggtcctgggatgtctttgccattttgttgttcacatccatctcctttctctggtcatttattccctcaaactttgacctgtcctgcatttatacatcttcattcttgcatatgccagtcccagtttttcttgcgtctacctgctggtctgttcttgctgcatctgcccctcctaatctgtcctgcagagtctctggcctctgcggagctatggagatgggagacttccttagtcctttgcatcctgactcattcagttattccagtctcagcatcacagaaggacttgctcgccctggcttttcaggcttcctgtgtcagccactccctcctggccatttcttccaactggaaagtcctggtttccccttccctgaggccttagcctcagcctcctttagggccagcagcctgaaaccacttggaacagtttcttccaggcaagtcgagactagccatccttctcttaaggttgttctactgcaggaggtccccaaggcccctcctatctgggtagttgaggctccctcagcctggaaactcagcaatccccatgtatctcccgagggaaacatggaagggggaagaagaggagataaatggtcacaaaagggtggggggcatggtggaggcatgaagtgggaggatgtttgtggggccaagaggcaggagcattgttttaccctactgcacctcactcctgtccccctaggctgctagcccaacggcagcaacactcctttggtctgcatggggtggcgtgcgtgggcacggaggcccacctctccctctgttccctggagttctatcgtgccaatgacaccgccaggtgccctggggggggccctgcagtggtgagctgtgtgccaggccctgtctacgcggcatccagtggccagaagaagcaacaacagtcgaagcctcagggggaggtgtgtgagacagtgattatgacctttcccaccccaggtggagaacccctagcctggcaaccccagactaagcacagccctgacctttgaggacagagaggagccttccagggggtgggccacagacctgataccacccactcccttccaccaaagtctcactcatctcccaggtctgcttagccctccgtgcagatgttgccatttgcctctgttgggcacttctctcttctataggcccgtgtccgtctaaagggcggcgcccaccctggagagggccgggtagaagtcctgaaggccagcacatggggcacagtctgtgaccgcaagtgggacctgcatgcagccagcgtggtgtgtcgggagctgggcttcgggagtgctcgagaagctctgagtggcgctcgcatggggcagggtgaggtggcatggaggtgggagggagagggaaggaggtacatgctcctggggggcatattccttcggaaggttaggtgtcccctgggcagacaatatatgcttaattacaacttcctgatctttgccatctggccctaggcatgggtgctatccacctgagtgaagttcgctgctctggacaggagctctccctctggaagtgcccccacaagaacatcacagctgaggattgttcacatagccaggatgccggggtccggtgcaacctaccttacactggggcagagaccagggtcagtcatcctctctaccttggttgaggtctctttcatcctatccaggtctggtctccaatctacagtccaatggcccccagcccattgccccaggcccctgccctcctgcagctcccacctgacccatcacttgctagcccattatgtgcctgagtcacgcttcagccacatctgttagagactcccactacctcaccccaaagctttctccagcgcttccattctgtgtcactacagatccgactcagtgggggccgcagccaacatgaggggcgagtcgaggtgcaaatagggggacctgggccccttcgctggggcctcatctgtggggatgactgggggaccctggaggccatggtggcctgtaggcaactgggtctgggctacgccaaccacggcctgcaggtgagtgggaaggaaaggggagccgaggctgttgtctcaaagcctgtgttttgggcagagggctgaggaatgagtcccttggcccaagatgctggatcctgggccttacagaaacatctgcatatgtccccaggagacctggtactgggactctgggaatataacagaggtggtgat

SEQ ID NO: 23769 - DNA, 2300 bp, Homo sapien
ggctggtctcgaactcctgacctcaggtgatccgcgcctcgacctcccaaagtgctgggattacaggtgtgagccaccgtgcccggccttagttaatttattttttgagacagggtcttgctctgccacccaggcagtgtagtggcatgatcacagctcactgcagccttgacttcctgggctcaagcaatcttcccacctcagcctcccaagtagctgggactacaggcacgcaccaccatgttcagctaattttatttttaaaaaattatctgtagagacagggtctcattatgttgcccaggctggtctcgaattcttgggctcaaataatgcttccaccgtggcctcccaaagtcctgggattataggcatgagccacgggtagtgtctacaacagtacctggcacatagtaagatctcagtaaataaatattgggtgagtggatctctacacctttgttcacgctatcttcttcactggaaatgtctaaattctacgcatctttcagaacatggggtttaaattagggaaggtaagcagcacagagaaggaaatgcagccccaagatggatgaaagtaaagaggcacagcacgtttgttttaaagtggtttgagtgtccaggccagataaagtaccgaaagtcctcagtactgaaagacatttcagatgagcctcagagccaaggcaaagaaagtgtgagcaggtatagaaaagactggagactggataatatcctgactttcaaaagaaaaaaaaaaaaggagaaaaaggattcctcaattcctcaatctacacataagtaatattctagaataaattattaaatagaagtttgtaagcatttaggaaaaaataaggtgattcttagagacctaaaaggatttcagtaaaaatagactcaaactactatgattttcttttttgacaggattactaaattggaaggctggagaatggctgtgaacatagcatatctggattttatcaaaaactaacagaatctcccatgatttcattacagataagaaatatatagatagataaggtgaaatgttggttacatcattgaagtgttctgtttcttcccagttggtggaaggaacatattttacagctgatgattagaagcttgatgaaaatctacaggaacattttgcaagaagagttagactttggttttaaacatttccacaacaacttttagccatttggatgaagccagaaggcaaagctgccatgtctgttcagcagaggaggctgaggggaaatgacagatggaaagtcacatcaggactcaagataatctcatgggatcatcatggcttttttatggcttctaaattatgtatcaaaacaaatgtaataggtaaacgtcacctatacctgggttggaaaaggctgctctatcagtaggaagcatagggaagacctgaactggttttaagtgatgacaagttcagtataagcagtgggaagctgccgcagtaggaagacagtgtaatccgagcacgcttcagtcggggttgaggatttctacagtagctggcggcatcagaccccatctgaagtagtgtgcccgcggaaacctatccggacatcaagaggcctttcagcaatactgatctagggaaccactgaagaaagggaggatttttggctcgcaaaatagattacagtgagagggtgtaaagatttccaaataaatgcctggctgtcaatggcagtttctcaaaaagatcaaagtagatgttccagggaagggagacgttaagcacaggcagtttccagggtgatgcgtttccctggaagccggactggaccccagggctccagcgcaggtggagaggttgggcctcgccaaaagagatcctgggaaacttccaggacttccaggagccccgagggctcgagcgttcacatacgcgccccgccccggggcggcccgggcagagagactggcgcggtctctcctggcgcccttcggccatcgcgcgccgccgtccccgggcccccggaccctgggcgcccagcctgcgcgggacacacccaggcgccgcctcccaggggcggccgcgtccttactgaactcggaaatcgctggccggcagcgccagcgctggaatcgcccccgcgcctgggagtggcctcgcgaggccggcgcgcgccccggggccgaggaatccgcctgcccgcccaggcgtcggccacgagagagcgggagcctcgctggtccccatttcaggtactcccttggggcacctttcgtggtcccacaagatttcccaactctccagc

SEQ ID NO: 23770 - DNA, 2300 bp, Homo sapien
cttttgcagcagaaaagaacttagacatcatctagtcattttgcatacagggcatctgaggctcagagaaagcactgactagcctaaggtcacacagctctgggaagtaactatgttgcttggtttgtcatccatggatttactcaatgctggctgttcttggtgtcgtgtgtccctatggctgtgccatcctcgtgttccctttccctgcactttggccacacataggaaatatctaggatatgcctggatcattgctcacctgttccagggccatatttggcactgtgggtccagcctgtggcctctgtgaagcccagctcccggcagaggatgtgggcagcctgcagcgtgaagtcatcatcgcagatggtgccccattcaccagctcgctgtatctccacgcggccctcgtagggcttcctggggaagccagccagccggaaccgaagcccctggctcccggccttcttctcagggcccgtggaaggggacggagaccccaagcacgaactgcacagcaggcacagcagcagcccccaggggctccactgccagacactgacaggtcgcatggcagggaaggcctgggtgccccagagacaaagtgtgcgtgagagaaacagattgagtggggcccagagtcagaaagagagggagaagtcacgaaagaaaaacagacactgagtaagacagagacagcgagagacaacaggagagaaagagccccagggaccaagagacagggagagaaacacattaaataagggctgaggcacaggtcatagaggcacagcctgagagacccagagataagagacaactatgagagatcgagagtcagagaagggtcaataaaaagagatagagactgagcaagagacacgtagagagagaggaagacccagacagacaggatgtgagaggaagggagactgtgggaatgagagagagaaaaccagaaagacacagaggagagagacaacggatagaaagtgataggcaaagaactaagcactcagtataggggaaccaagcacaccgcgggtgagaaggagagggattgacaagagccaaggggcggacgtgggagggatccagatgaccccatttactcagagggaggacagacagctgtactgattgtgcagagaggcacgtaaggggccctaggcggccctgggatcacagatcccctgaatgggagcccagagtcctaacccagcagattcccaggcagggaaggctggcaccaaagctcgcctggagaacctgctgcacgccctccccaacacgcaggctctcagatgccctgcagggtcaagaggcccaggagggccaggcctcaaggctgggcgggggatggggtagggttgtcccagcctcctgccaacaccaccatccctgtcaccgggcaacgggaggccaggcgctatggctcctcagccaaggccttctctgcctagggctgagaacagcccctctacagcaagcccccgtcaacatgcttcccccaacccaaacaatcaatccaacaaggcagctttgttctgggttggggacccaggggcagcgcctcccggaggagccccctcccttagggcgctcctggcggccctgttcgaacacccgtagcccccgcctccggtatgtgcctcctccgtgtactctgtctcacttgccctttgacaagaatcaaactctcagttgggtggcttcccctcgactccatcccacaccacccgttttccctggtccctccacatcctctccatcccctactcattccctctgcggttagcgtgactccccctaccttggccgagcaggaccctaagggctgggagaagagtgctggtcctggagatcagtcctaggacttccaaaaaaaaaaaaaaatgctcggccaggggagactggacccccctctctcccccttctccgttcgtccctcccacatccccctgagccctcccacattccgccttctccttccattcctcccggccagttccctcctctcctcctctgggtcctccctccccgtggagctggccactgccgcgccccctccccctccctggccctcccggctcgttcaatgaagctttctcttcccgcggcatggaggccaggcctctgcggtcagggagctgacatgcaagcggcggccgggcggcggggcggccccggtggtggcgggaagcggttcaaccccagccctccctccgagtcccgggccagcggagtctaaacagcccggctcgggcggggctgggggcgggcccggccagggtaaa

SEQ ID NO: 23771 - DNA, 2300 bp, Homo sapien
actgacaggtcgcatggcagggaaggcctgggtgccccagagacaaagtgtgcgtgagagaaacagattgagtggggcccagagtcagaaagagagggagaagtcacgaaagaaaaacagacactgagtaagacagagacagcgagagacaacaggagagaaagagccccagggaccaagagacagggagagaaacacattaaataagggctgaggcacaggtcatagaggcacagcctgagagacccagagataagagacaactatgagagatcgagagtcagagaagggtcaataaaaagagatagagactgagcaagagacacgtagagagagaggaagacccagacagacaggatgtgagaggaagggagactgtgggaatgagagagagaaaaccagaaagacacagaggagagagacaacggatagaaagtgataggcaaagaactaagcactcagtataggggaaccaagcacaccgcgggtgagaaggagagggattgacaagagccaaggggcggacgtgggagggatccagatgaccccatttactcagagggaggacagacagctgtactgattgtgcagagaggcacgtaaggggccctaggcggccctgggatcacagatcccctgaatgggagcccagagtcctaacccagcagattcccaggcagggaaggctggcaccaaagctcgcctggagaacctgctgcacgccctccccaacacgcaggctctcagatgccctgcagggtcaagaggcccaggagggccaggcctcaaggctgggcgggggatggggtagggttgtcccagcctcctgccaacaccaccatccctgtcaccgggcaacgggaggccaggcgctatggctcctcagccaaggccttctctgcctagggctgagaacagcccctctacagcaagcccccgtcaacatgcttcccccaacccaaacaatcaatccaacaaggcagctttgttctgggttggggacccaggggcagcgcctcccggaggagccccctcccttagggcgctcctggcggccctgttcgaacacccgtagcccccgcctccggtatgtgcctcctccgtgtactctgtctcacttgccctttgacaagaatcaaactctcagttgggtggcttcccctcgactccatcccacaccacccgttttccctggtccctccacatcctctccatcccctactcattccctctgcggttagcgtgactccccctaccttggccgagcaggaccctaagggctgggagaagagtgctggtcctggagatcagtcctaggacttccaaaaaaaaaaaaaaatgctcggccaggggagactggacccccctctctcccccttctccgttcgtccctcccacatccccctgagccctcccacattccgccttctccttccattcctcccggccagttccctcctctcctcctctgggtcctccctccccgtggagctggccactgccgcgccccctccccctccctggccctcccggctcgttcaatgaagctttctcttcccgcggcatggaggccaggcctctgcggtcagggagctgacatgcaagcggcggccgggcggcggggcggccccggtggtggcgggaagcggttcaaccccagccctccctccgagtcccgggccagcggagtctaaacagcccggctcgggcggggctgggggcgggcccggccagggtaaataaagccccggaggcccgtgtgggtctctccggtgcccggggcgctttcggggtgatgtcatggctttcactctgacgtcaccttgggcatatgacgtcacgcgcagccaccacgcccagaggccagggccctcgcgccaaaaccgaggactttcggtggagccactggcgcgcccccacgacggcgggtaggggcctggggtgctgcagctcccggctaatccgggggtctccaccattccttctcgctcctctccctcaccccaccgcgacccccccagcggctgccggcgggggccggggaggggcggaaactcctccagggaacccggccccgcctcccgccccgcctcccgccgcagggccaggaagcgcggaaggaaccgccgggggccatggacggagcagtgatggaagggccgctttttttgcagagtcagcgctttgggaccaaggtagtctggcgcatggatgccgaaccttatccgggctagtagtgggtgagagagcccagaaacagggagaggtgggcagcgggctggagagcggcgccgggagtt

SEQ ID NO: 23772 - DNA, 2300 bp, Homo sapien
gcaacagagtgtagggccaggacaggagtggctccagtatctgactctgggcccccacggtcaggagagtcagcctttcagcctccaccctcagcacgtaggagccatgcaggccacagcgctcggcggcctcagtcctctgcaccgttacccagaattgggatcctggaaggcatacacgattagacagctgcgggggagggacgggggcagcagtggggacccagaggactcatgagcatagtgtccaagcactcactcggaagccagatctcagggccttcctacttcttacttccccatgggcccctgggtatccacccacttcccaaaggccctcggccctcctcctcttcactccatccctgcccgggcttctgaggcgtctaccttcccaggtagggctgtacaaggagttctccagcatctccagggcagaaagcttaggtgggttatcggtaggcgccagagtccagctgcctttctgtagtagagagcatcgagaaacccgtaatttcctcagcggggagcgggggtcggtctgaggcagccccatttctctgcctctgtaactgcccccaccccgcatcgccgcagctcctcaccggaaaggcgtttcggcacagcgtctgcacccaggctgcactggacggcgcgtcggccgccagcaggtgcgagcgctgagcagtgtccaggcggaaggcagtggcgccgggctcagggggggtctccacggtgacgggggccacactcacacactcagccagacggatcactttgcagtccaggcggcgcgagctccctcggccacccccagagctcgaccccttatggtcaaagaactcgagccgcgctacgccgtggggactggccgggtagagcacggcccaggtcttcctccacctctagggagagagagagagtgctcgagagggagtggcgtgcgcaggcggcccgggtcccgacggggaaggaggttgcggcgcaagtcgatttgggatctggggcttccaaacggggttgggggcgaagtttcccaaggacgatgccactccgtctccccaggaccagaacccctagactacagacgcttcccgggagtgtgcaaagcaacttcacgggaaagtcacaggctctccaactcccggcgccgctctccagcccgctgcccacctctccctgtttctgggctctctcacccactactagcccggataaggttcggcatccatgcgccagactaccttggtcccaaagcgctgactctgcaaaaaaagcggcccttccatcactgctccgtccatggcccccggcggttccttccgcgcttcctggccctgcggcgggaggcggggcgggaggcggggccgggttccctggaggagtttccgcccctccccggcccccgccggcagccgctgggggggtcgcggtggggtgagggagaggagcgagaaggaatggtggagacccccggattagccgggagctgcagcaccccaggcccctacccgccgtcgtgggggcgcgccagtggctccaccgaaagtcctcggttttggcgcgagggccctggcctctgggcgtggtggctgcgcgtgacgtcatatgcccaaggtgacgtcagagtgaaagccatgacatcaccccgaaagcgccccgggcaccggagagacccacacgggcctccggggctttatttaccctggccgggcccgcccccagccccgcccgagccgggctgtttagactccgctggcccgggactcggagggagggctggggttgaaccgcttcccgccaccaccggggccgccccgccgcccggccgccgcttgcatgtcagctccctgaccgcagaggcctggcctccatgccgcgggaagagaaagcttcattgaacgagccgggagggccagggagggggagggggcgcggcagtggccagctccacggggagggaggacccagaggaggagaggagggaactggccgggaggaatggaaggagaaggcggaatgtgggagggctcagggggatgtgggagggacgaacggagaagggggagagaggggggtccagtctcccctggccgagcatttttttttttttttggaagtcctaggactgatctccaggaccagcactcttctcccagcccttagggtcctgctcggccaaggtagggggagtcacgctaaccgcagagggaatgagtaggggatggagaggatgtggagggaccagggaaaacgggtggtgtgggatggagtcgaggggaagccacccaactgagagt

SEQ ID NO: 23773 - DNA, 2300 bp, Homo sapien
ggaatccagatgtttaggcacagctggaatgaggtctggggaaattaggcctcttctagggtggatgtgacccacctgagattttaaacacaataaagattatgctggcattattattttaaaaattgatgtattgccacacatgtagatttctggagtatggctcactacaaaaaatgaaagaaaacaaaacaaaaaacccaagctttcctcctctagactctttggggtatgcatctcagatgttcactctgactccttcttacaaggttctctatctgatgccagctgcttctttgcctagggcccttcaccccgtctttaggtgcttcccttagaaaggcgttcctctgacagagcacacagtgagttacacatgagtttcttttcttgttcttaggtatggtgtctgccacatctgcatctgggctctgggtgggagaagcacacctggttctagattcaagcccagctaaaacagctttcccagctttgggacactctgctgagaccacagtttgggtatttcttaacccaggctgcagtaagaatcacatggggaacttataaaaaataccagtgtctcagggtggggaacatcatacaccggggcctgtcatggggtgggggtttgggggagggatagcattaggagaaatacctcatgtaaatgacgagttaatgggtgcagcaaaccaacatggcacatgtatacatatgtaacaaacctgcacattgtgcacatgcaccccaaaacttaaagtataataaaataccagtgtctgggcttcacccccagagaccctgattcagttggtctggggtagggcccagacatcagtatctttttcaagtttcctagatcggggtccccaacccctgtggcctgttaggaactggatcagcaggaggtgagcagcaggtgagcaagcattaccatctgagctccgcctcctgtcagatcggctatgtcattagattctcatagaagcccaaaccctattgtgaactacacatgcaagggatctaggttgtgcactccttatgagaatctaactaatgcctgatgatctgaggtggaacagtaccatcccccaccaccccatggaaaaattgtcttttatgaaaccagtcgctaatgccaaaatgattgaggattgctgccctagatgattcttactgcaaccagaattgaaaacctctgccagatgaacacagctgtccagtcctaaagcctcaggaccggaaatggagaagtcaggcacagaggaaataagaggaagctggagtcctaggcaaagtccctcctactgacttcctgtgctctgggacatgtcaggctgagggccgtctcacccagaatgaatgtcttattcacaatgtctaatgtgataagacctaatgtctaggtcttattcacagggcccaggagggccagctggatctaacatctgttctgccactctatttttttctatgttgttttttacctcatattgcagttagtacagtcatttcacaagtcactagcatcaactaccagccttctcagaagtactcaacatttgtatattcacaagtttgttatcactattcaagccaggtatacgttttattgaagaactttgtaatatcaaggatttaagcttgtgtaacagatcatcatacactatggcatatgcagttacctactggagcagaagcttaatgcagaagagtaaaatacctagatgagtaactcctacctagcctaagcattcctcagaactgttgtctgatgccactgtgatgctccaaggcccagaaggtcctaaattcatgtttctttggggaattaaaaaataagctatttcaggaacttattcctttccccccactctgaatgtccctgaacgagcccacagagaaacagtagcagtcatctgactgcctgacttctgctttactgctcttccttcatctgacctgcactgttgccaaagcttagccacaaggaagcagcagaagcaagatttccttctgtgattgccaaagggcctctgcatattttggcattagctacctcctccacagaggatacatgttcctcagactggatcacaagccagatgtctcactatgagacaactgctcagccagcccagaagtaaaacaagtaaagatcatgtcagactcttgaagataagttaacttttatgtagagcgatagagatactatagcttccagacctgttctccctttccaaaccagtcaggctttcctctttccactctcctgcctcctcctatcccttgcttgc

SEQ ID NO: 23774 - DNA, 2300 bp, Homo sapien
agtcgtggcagtagatttctaaggcagcagctgatgcccttggtcagttacactccttgtagtttaaagtctgcaaggtgctttctcatgaccattatagtttatcaccctcagaaaacaattcttatgtcatagtccccatttctggtacagttctttgcatatttttaataaatgctatagagggtacggaaagaaattaatagtaggtaggagcaatgggtggtatggtttggagtgaggctagtgctcaagtttgaatgcgtcccccaaagttcatttgctggaaacttagtacccaatggaatagtgttcagaggtggggcctaacaagaggtgattaggccataagggctctgcccccataaatgaattaatgtcattatcttggaaatgagttagttattgagagagtgggtttgttgtaaaagtgagttcagctccctattgctgtcttgctcttttgtaccccttgcccttctgccttctgccatgggatgacacagaaaaaatgccctcactagatgtgggattctcaaccttggaattcctaccctccagaatttaagaatacatttcctttatttacaagttagttgttctgtggtattctggtatagcaacacaaaggggagtaagacaggtaatgctggggttgagcctagtaaggtaggtggggtcagttataatggaccctctaaccgaaaaggaaacataagccatttttaagacaaagaatgatatgatcaaaatatttttacaaggacaattctaacatcagtggaaacgataatctggagattagagacagaaaggctaatttggactatatggggggaaagagctgttgagaagctaccctttaaactgaaacacaggaactctattgaatatcagattatagtgtttaaaaaaggacataggttaaatagttctgttcttacctgaggaacagttgataggagcaaaatggtttagtgggactagaatacaagcaggcaactcttttcctgttgaaacatctaacctatcctgtgccactcattgaaatattgccccaccccacctccaacctgcatctagacaatgaactgagaaaataacaataataataataaagaaaacaaggaaaactgcttgtacatttctagcttggaactagcattatctttccctctcctgtggactaattcagagaattcctttttaaccagagttgaagacccagaccaaccaactgttaaggaccaggacgctcctaccccatctggagttcgtcaaagggactatgggaatcaacctcaagtaagcgagaatgagtatgaagagagcgacagaccctcttggaatacaggagtttgaaaagacttaaaagaactttgtgaaggcagctataacttccatgagggcagtgaccattgtctgtacatccactgtactccaatcctagcacaatgcgtggcacataacgtgcccaccacagatgtttagtgaacaaaatagcgactggctgaaggaaatgatgtggaagggaaaagttaaaaccaagaaaacggtcggtgggggagctactggcatgtttcatgggaaggggtagaaaaagaaaaatgtcaggtttagcacagcatttccaacaaatagacaaaattctacctaagggacaaagaaggactgttctcagggtatctagggacttggagaccgttttcctgaagcgccacctgaagcgcaccctgaggcagccaggccccgccttgcccgcagtgagcctcccgcccagccgcgccggcctgaggggggcgcctccgaacgcgcgggcgcacgctgagagccgggaggaccaggtgagggggcctccgtcttccgaagacaggtacggttctccacgcctcggggagggagggcagcccgagagcagccggcaccacttcgcaggctgggctgggcgtgggccgagctcgggccagtcctcaggcaggtgttggttgcgctggccgtggcgggtgccggcgcaagactgacgccgagagaggctccgaaatcgctgtcggagtcatccctccgcatactgttctgggcggccaggcctgcgcggagtctgggcccggagcttcctccgcggggcccccaggcccgagggccgggctgctgatccgccaggcacggtaggcgccatgccgagggaccacggaggcttcagggagccacgagaattttttttcttctggttttgctttgtttttgagacggagtttcacccttgttgcccaagctggagtgcaatggcgtgatctcggctc

SEQ ID NO: 23775 - DNA, 2300 bp, Homo sapien
tttttgctcttgttgcccaggctggaatgcagtggtgcaatcttggctcaccgcaacctctgcctcccgggttcaagtgtttctcctgcctcagccttccgagtagctgggattacaggcatgcaccaccatgcccggctaattttggatttttagtagagatggggtttctccatgttggtcaggctggtctcgaactcctgacctcaggtgatccacccgcctcggcctcccaaagtgctgggattacaggcgtgaaccacggagcccagtcgtggcagtagatttctaaggcagcagctgatgcccttggtcagttacactccttgtagtttaaagtctgcaaggtgctttctcatgaccattatagtttatcaccctcagaaaacaattcttatgtcatagtccccatttctggtacagttctttgcatatttttaataaatgctatagagggtacggaaagaaattaatagtaggtaggagcaatgggtggtatggtttggagtgaggctagtgctcaagtttgaatgcgtcccccaaagttcatttgctggaaacttagtacccaatggaatagtgttcagaggtggggcctaacaagaggtgattaggccataagggctctgcccccataaatgaattaatgtcattatcttggaaatgagttagttattgagagagtgggtttgttgtaaaagtgagttcagctccctattgctgtcttgctcttttgtaccccttgcccttctgccttctgccatgggatgacacagaaaaaatgccctcactagatgtgggattctcaaccttggaattcctaccctccagaatttaagaatacatttcctttatttacaagttagttgttctgtggtattctggtatagcaacacaaaggggagtaagacaggtaatgctggggttgagcctagtaaggtaggtggggtcagttataatggaccctctaaccgaaaaggaaacataagccatttttaagacaaagaatgatatgatcaaaatatttttacaaggacaattctaacatcagtggaaacgataatctggagattagagacagaaaggctaatttggactatatggggggaaagagctgttgagaagctaccctttaaactgaaacacaggaactctattgaatatcagattatagtgtttaaaaaaggacataggttaaatagttctgttcttacctgaggaacagttgataggagcaaaatggtttagtgggactagaatacaagcaggcaactcttttcctgttgaaacatctaacctatcctgtgccactcattgaaatattgccccaccccacctccaacctgcatctagacaatgaactgagaaaataacaataataataataaagaaaacaaggaaaactgcttgtacatttctagcttggaactagcattatctttccctctcctgtggactaattcagagaattcctttttaaccagagttgaagacccagaccaaccaactgttaaggaccaggacgctcctaccccatctggagttcgtcaaagggactatgggaatcaacctcaagtaagcgagaatgagtatgaagagagcgacagaccctcttggaatacaggagtttgaaaagacttaaaagaactttgtgaaggcagctataacttccatgagggcagtgaccattgtctgtacatccactgtactccaatcctagcacaatgcgtggcacataacgtgcccaccacagatgtttagtgaacaaaatagcgactggctgaaggaaatgatgtggaagggaaaagttaaaaccaagaaaacggtcggtgggggagctactggcatgtttcatgggaaggggtagaaaaagaaaaatgtcaggtttagcacagcatttccaacaaatagacaaaattctacctaagggacaaagaaggactgttctcagggtatctagggacttggagaccgttttcctgaagcgccacctgaagcgcaccctgaggcagccaggccccgccttgcccgcagtgagcctcccgcccagccgcgccggcctgaggggggcgcctccgaacgcgcgggcgcacgctgagagccgggaggaccaggtgagggggcctccgtcttccgaagacaggtacggttctccacgcctcggggagggagggcagcccgagagcagccggcaccacttcgcaggctgggctgggcgtgggccgagctcgggccagtcctcaggcaggtgttggttgcgctggccgtggcgggtgccggcgcaagactgacgccgagag

SEQ ID NO: 23776 - DNA, 2300 bp, Homo sapien
tgctaggattacaggcatgagccaccatgcccagccaacggaccatgtcttaatcttatctctagtacttagtaaaatgcctggcacatattaggcccttaataactgttgaaagaacaaactagaactagtacttgcactttagaaagattatcctgatggcagtctggaaggggagggactggaggctaggtttttgttttttaaatgaaattatcacacagtccaggtgaatgatgatgatgtcctgaactatgatgataatggaaagaaaaggatggatttaagttactttttagtcagatttataaggacatagtgatttcttacatatgggcatggtagctagtctccaagaaaggaggctgaaatccttgtattcccagtgaaatccctgtaccacctggtgaagtccccttccacagtgcatcagggctgccctgtgtgacaagtagaatatggccgagagattgtgtgttacttctgaggctaggtcacaaatatatcatttgctcttttgccttgttcttttggatcacttgctctgaggaagtcaccccattttgtgaagacattcaagcagccccatggagaaattcatgtggagaacaaccttcacttactgccaacagccactaccaatttggcaggcatggaagtccgccatcttggaagtggatcctccagccccaggcaagccttcagtggactgctgccccgtttgatatctggactgtaatcttgtgagagactggaagccagaccacctagctaaactactcctaaatttctgacgcagagagattgtgagagataataaaagtttattccaaatgtctgattttccctccaggctaagcaattcgaattcagggaccatgtcttttgtttgtttgttttaagccaccaaattctgaggttaatttgttacatttgttttgcagcctaaataactaatacaatgggggtgaaagaggagaaagcaaagactacctactaagtgcagactaagtgcttgaagaaggagctaggggccgggcgcggtggctcacgcctgtaatcccagcactttgggaggccgagacgggcggatcacgaggtcaggagatcgagaccatcctggctgacacggtgaaaccccgtctctactaaaaatacaaaaattagccgggcatggtggcgcgcgcctgtagtcccagctacttgggaggctgaggcaggagaatggcgtgaacccgggaggcggagcttgcagtgagtcgagatcgcgccactgcgctccagcctgggcgacagagcgaaactccgtctcaaaaaaaaaaaaaaaaaaaaaaaaagaaggagctagggttgggatggaggagatagtgagttatcctcaggacctatgcttgccttgtttataggatatccaagtggatatgcccataggcagtctttgttcctcgccctcaaaggcctaccaaccctagaagaatcagttcaaatgtcacctcttctgtgaggccttcctgatttcctctggcaaaacctggcccttctgcacacttattgcacgttattatagcaaacgtgcattgcttcgtattgcaattatctatttgcagttatttgcttacatttggaagccccattacagtgtgaactccctagggcaagggccgtgatttttagtattttctgtataatcgtgtgtgtgtgtgtgtgtgtgtgtgtgcgtgtgtgtgtgcgcgcgcgcgttacactgtgcctgcccagcacataggcagccgtccttaaatgcttgcaaagtattaattttgagaaacttggtgcgtgtatccacgtcctcttattagtaagttttccttattagtacagctatgggcgtttgagtttttggagtggccggagcaaactcgccactcgaggtccctgagtggcagccccagcgcacttccgaggcagaactcccaccttcacctgggtctagctccgcctctgcctgggttaggcctctcctcccctcagccccgccttcactcaatcccgattggctggaggaagaaggaggcccgaccattggcccctttctgagggggcggagccgggcggtgtttcatccctcagcctcaggctgagccggaccgagccgagaggacccgagtggggccgaggccagtagccccggggccctgagcagaggccgtagcttgcgccgcacccgcggccaggcggagccaaagatgccggcctctgctgcgcggccccgcccgggtcccgggcagcctacagcctcgcccttcccgctactgctgctg

SEQ ID NO: 23777 - DNA, 2300 bp, Homo sapien
atatataaaactataaactctatgtgtgtgtgtattgttacacaacatgtgaacagtagtcatctctaagattcttctatgaattcattcaataaatgtttattgcatgtctgccatgcgtcaggcaccattttaggcactgcaaacttgaaggaatgacagacacagaccctgctgtcttttagcttatcatctattgaggagaggaagaacatagcgaaaataaataggaaatcaactagggccaagtgatagtgacttggggaactatttgagataaactggtcaaggaaagcctgatgaggtagaaggtggggacttgactctggaggtgggggctaagactcgggaccagactctagattagagttccagatttaacacctagaagtcactgcccctttccatggcaatgactcaacaacccgttaccaacctttttctagaaatttctgtataacctgccccttaatttgcatgttaactaaaagtgggtagaaatatgagtgcagagctgcctctgagctgctactctgggcacacggccttatggggtagccctgctctgcaaagaccagtgcctctgctcctgatgtacactgccacttcaatataagctgctgtctaatgccacctgcttgcccttgaatttttttttttttttgaaatggagtctctttctgttgcccaggctggagtgcagtggcgcgatctcggctcactgcaagctccgcctcccgggttcacgccattctcctgcctcagcctcccgagtagctgggactacaggagcccgccaccacgcctaattttttgtattttttttttttttagtagagatggggtttcaccgtgttagctaggatggtctcgatctcctgacctcgtgatccgtccacctcagcctcccaaagtgctgggattacaggtgtgagccaccgcgcccggcatcccttgaattctttactgggtgaagccaaaaatcttcccaggctaagtccaaattttggggcctgcctgccctgcatcatgaggaggtatctgagtggaacgtcaatgaggaggaagaatgagttggagacaggcctggagaagaatattctagatagaaggaaaaggaagagcaaagacccttgggtgagaaagagtttgtatttttgaggaaagcatgctagtgtgaatgccaagcagtattctgtgggaagatctcaggaggtgtctaagggcatggagataagtggtcagatgcacggtctgttttataggtggaattaactgcttgctgatggattgactggctgtgagggtgagtggcaagaaggaatcgaagacgagttagggtggatggcgatgccatttgctgagacaactgggaaagaaaaagatttgggaaaaaaagttgagttcagctttggacatgttaagtgtgatatgctagtcacttcagtggagatgacaaatggcaagctggagaaataagcctgcaactccaggagaggacctcgctgtagatttactatggtgagtcatcagcatgcatatgatataacagtcatggggctaggaagttagtttctcctcagggagtttgaaactgtaactagttcagagaagagggtggagggcagccccgaataccccagcatttaccaatagagcaaacagggactcaggagcctggggagtgaggttagccagaaaccctcagagtggagcactggtgctcttactgagagaggaaggtgtgtccagatggaggatgtgattaactgtcctcaacatccctgagagaaggagtaagacaagggcagggaagagaagagaatgcaagatttggcaacatgtaggtcattatgatgactatgacaaaagcagtttgagctcaattctgtgtggagtatagggaaggagggttgaggacgtgcatttagaagggtacatagttctcaagaagttttgctgagcacatctgtaatcccagctatttgggacgctgaagtgggaggactgcttgagcccaggagttcaagaccagcctgggcaacatatcgagtccctgctttaaaaaaaaaaaaaaggaagttttgctgagaggctagatggattatgatttttgtttatttttcctgtttatccatatattatttttcaacaatgagtattgattacttatataataattttaaggctgtacacattgcagacagcaccccactgtttgaaaaactcctcctcagtagaacatggcagaccttcatcttccttccctgaaccttttccaaccttaggcttgccattct

SEQ ID NO: 23778 - DNA, 2300 bp, Homo sapien
tgcaactccaggagaggacctcgctgtagatttactatggtgagtcatcagcatgcatatgatataacagtcatggggctaggaagttagtttctcctcagggagtttgaaactgtaactagttcagagaagagggtggagggcagccccgaataccccagcatttaccaatagagcaaacagggactcaggagcctggggagtgaggttagccagaaaccctcagagtggagcactggtgctcttactgagagaggaaggtgtgtccagatggaggatgtgattaactgtcctcaacatccctgagagaaggagtaagacaagggcagggaagagaagagaatgcaagatttggcaacatgtaggtcattatgatgactatgacaaaagcagtttgagctcaattctgtgtggagtatagggaaggagggttgaggacgtgcatttagaagggtacatagttctcaagaagttttgctgagcacatctgtaatcccagctatttgggacgctgaagtgggaggactgcttgagcccaggagttcaagaccagcctgggcaacatatcgagtccctgctttaaaaaaaaaaaaaaggaagttttgctgagaggctagatggattatgatttttgtttatttttcctgtttatccatatattatttttcaacaatgagtattgattacttatataataattttaaggctgtacacattgcagacagcaccccactgtttgaaaaactcctcctcagtagaacatggcagaccttcatcttccttccctgaaccttttccaaccttaggcttgccattctccaccagtgctaatgtcatgtctcttgaaatctgtattgaagtcagtatttcattcttgccagtttccactgtgtgtttaaatttggagtctggtgtctagcattagctggggttggagcttccactcctctcagcattggtaagcctcctcacccaccccatcccatgtccaagatcacccagttacacacttaccatctacccagttcattcacatcatcagtcccagagctgcagagatgctctttttctacctcctacttctctggctcttagagaggcagcatgggataatggggcaagcgaatagggccttaaagtagagggacaagggttctcttccctatctgccacttattagctatgtgacctcgtgtaagtctcttttctttttgagacagggtctccctctgtcacctaggctggagtacagtggtatgatcatagctcactgcagcctcgaactcctgggctcaagctatccttccaccttagccttctgagcagcagggactacaggcacatgccaccatgtccggctgatttatttatttttatttgggaagatgggggtctcactatgtcgcccaggctggtcatgaactcctggtctcaagcaaccctccaaccttggactcccaaagtgctgggattacaggtgtgagccctggccttgcctcaatttcctcatctgtaaaacggggttagtgaaactcacatcctatcagtggttttgaggatgggccgactcttgtattgcctgctctagtacaatcagcagctaaggcggctcactttccggccgtgctacaataggtaagaactaggatgctttagacgtgtgactgggcagtgggagcccctcacatgatcccgagatgccagacagtgtctctccgcacagggcgtgtgctggtccagaggcccgtttttccagtcgccccacaccccgggtccgcgatcacgctccccccacccatagccgagcctgacgcggcggtggctcatgcgcctttccgtcccagcctttagccacggaccacacgtcccatctcaggcgccccgcccctcccccgccccccgcccccggcgcgcctccccaggctgccggctccggtgtctgagcggccgcgcccgcgagccgtgagcgatgattggctgcgccacggcggcgggcggtccgtgggcgcacacaccctccccgcgcagccaatgggcgtgcgcacgtcactgatccggaggcccgcgggccggcagcccctcaataagccacattgttgcatgaaactccggcgcaggagtcccgggctgccgctggcaacatcgtgtcacccagctaagaaaatccgcgggcccgagccacgcgcctgtgaatcggagaggtcccactgcccgagtggagccgggctgagattcttctcaagttgagcctcagtgatcctgtggccgaagttagcgccttgacgtgggacaaccggaca

SEQ ID NO: 23779 - DNA, 2300 bp, Homo sapien
catcatcagtcccagagctgcagagatgctctttttctacctcctacttctctggctcttagagaggcagcatgggataatggggcaagcgaatagggccttaaagtagagggacaagggttctcttccctatctgccacttattagctatgtgacctcgtgtaagtctcttttctttttgagacagggtctccctctgtcacctaggctggagtacagtggtatgatcatagctcactgcagcctcgaactcctgggctcaagctatccttccaccttagccttctgagcagcagggactacaggcacatgccaccatgtccggctgatttatttatttttatttgggaagatgggggtctcactatgtcgcccaggctggtcatgaactcctggtctcaagcaaccctccaaccttggactcccaaagtgctgggattacaggtgtgagccctggccttgcctcaatttcctcatctgtaaaacggggttagtgaaactcacatcctatcagtggttttgaggatgggccgactcttgtattgcctgctctagtacaatcagcagctaaggcggctcactttccggccgtgctacaataggtaagaactaggatgctttagacgtgtgactgggcagtgggagcccctcacatgatcccgagatgccagacagtgtctctccgcacagggcgtgtgctggtccagaggcccgtttttccagtcgccccacaccccgggtccgcgatcacgctccccccacccatagccgagcctgacgcggcggtggctcatgcgcctttccgtcccagcctttagccacggaccacacgtcccatctcaggcgccccgcccctcccccgccccccgcccccggcgcgcctccccaggctgccggctccggtgtctgagcggccgcgcccgcgagccgtgagcgatgattggctgcgccacggcggcgggcggtccgtgggcgcacacaccctccccgcgcagccaatgggcgtgcgcacgtcactgatccggaggcccgcgggccggcagcccctcaataagccacattgttgcatgaaactccggcgcaggagtcccgggctgccgctggcaacatcgtgtcacccagctaagaaaatccgcgggcccgagccacgcgcctgtgaatcggagaggtcccactgcccgagtggagccgggctgagattcttctcaagttgagcctcagtgatcctgtggccgaagttagcgccttgacgtgggacaaccggacacgtcgccaggagagaactgaggcgccttctagcagttgtgacgccaaaatcacgtctccggagacccgcgccctccgccagccgggcgcaccctcgccggtagccttctttgtgcgccgtccggactcccagctcccggcccggcagccgagccccagcacaaagcagtcggaccgcgccgcccgcctcccctctcgcgtctccgcctcggtttcccaactctgcgccgtcgggccgcggcaggatgattgcctcgcatctgcttgcctacttcttcacggagctcaaccatgaccaagtgcagaaggtaagtcagcgcgggcggggcggcaggctgggctctggcaaagtggtctggcctccatcagtctcttcctcgaccctgcggggacccgcttcctccctactccgggcctgggagcggaaaaagtttgggcagccgggacactcctgggcgccaggagccacgtccgctaagcacagccggcgagtgcgcgcgggcggggagccgaggtcgcgctccgccgggcgccctccctccctgagctccggcacgcgctcacgctctctcccccagtccctttttccctgttactggaggggcgggtcaccccgcaggtagtcagggattgctgcgcccacgtgggagggagcccccttctgcagcgcgagttccggcgagagcacgtggagagaatcgtggctgcgggaggctgctccgctgccgcgtggggccgccgggggccgtccgcgctcgcggaccgcgtgtaggagacgagcggttcccttctccttccccgcggccctgcgggggtgggctcgaggagaagctgacccgggaaggagtaggaaaggggcagaggaactccgcccgccgcgccccctccccggaactgtggcgcccggaactgaggctcggcgaggggcgtcccccattaacccccgcccctccaaatcagcctcgggaccgcccagcctcgtgtcctcaggatctgcctctgagtaaggggaggactttggttgttactttctg

SEQ ID NO: 23780 - DNA, 2300 bp, Homo sapien
gctctaaagccaaatgcatggcttcgattcccagctcgtacagaaaagctggagaccttgggcaagttacccctgggcctcagttaaacagggatgctaataacaatcagtcttcacctcatggggctgatttgaatgttaataagctgacatacctaagagcttagaacagtgccaggtacacagtaggtgctctgcagtcgctcctgagttccaattggcaaaagtgaggaaataaccctgattctcatctctaatgccccaaaacactgggcttgtccatcaggagacgacaagtgacctcgttgggcaggtgaacccaagccttccacgtcctcagactacaacccagaatatgtaagattatcttatcacaaggggatttcagaagggtccaaatcaaaaggtcttttcaaaagactctaaagttatactaaattttcattcttctctcttaattcttctttccaatggcagctcagaaagatggttccaagatactctgagtctctgctttctatgtaactgccactggaatcaaacagcttcgctcacctaagctgggagtcaaatcccaggttctgacaattactgagttaaaggcctgattcaattctgcccctattggtagtttagaggaaatacacccaagggtcttcagggacacttctcaaactgacaggtggctgcaagggtagagaaaacctacaggaatgacagttgcacactgcagcgcttaataatcgcaactccataaagtggacaagcctactgttattattgcatttcacaaagagaaacgggctgtccaaagaggctcagggtgctatggttaataaaccacaagacagagattacaactcatttccagataccctggttaattcccgttccactctgggggaagagagatgacccccattccaagattgagagtggtataactccaacggggttccaaccctggtgccctcctctggattgaggaagagtaaatttatgcaaggattcaaatgtcctggggtaatacccaaaggagaactccctgagattaatgacgctccactgtgtattttaggacttgccaagagatgatagccttccccaagagttcttagaagttgagaagttaccaagatcctgccagctcaaatcaaaggcacgtttttaagtaaactgaatcaaggtgcagagccacatcccaggaattagagaataacagccatttacaaacagtaaaacccaagtaaatcaaccgcctctgctcgctcctccagacttgaggctgggtaacttctgcttttcttggaggttcacgcgccatcactacattaatatgcctcctatgccctcgggaccgccagaatgggaatatgagcaggttgtcgcacagaacggtaatggcaagacattttcccaaaaatgtgttcccatcagatattgaaattccaagtatgtaactgagcaacgctccgttgcctcacagctcttaaaacaacctccctccagctaatcccctcccaacttgtcccctacctcaaatcgtagcccaggcccgggccaggagccaatcccctaatcccgggcatttcagaaactcaattctgagcgcgcccctggccctgcccgtccccggccccggccccatccccacccccataccccgaggcggggaatgagagcttcccggcttggcctgaggctctttcttatgtaaatgacccggccgcggtgagcgctcagccatagggagctgcggagccaggtgggaacagacaggtcgaggcttaaggaaaaaaaagctcgttttcggaaggacataaatctcaagaatctcaagtaatccaggaacgcggcgcgttggcctctccgagtaacttttagggcaaaccagaaagtaacaaccaaagtcctccccttactcagaggcagatcctgaggacacgaggctgggcggtcccgaggctgatttggaggggcgggggttaatgggggacgcccctcgccgagcctcagttccgggcgccacagttccggggagggggcgcggcgggcggagttcctctgcccctttcctactccttcccgggtcagcttctcctcgagcccacccccgcagggccgcggggaaggagaagggaaccgctcgtctcctacacgcggtccgcgagcgcggacggcccccggcggccccacgcggcagcggagcagcctcccgcagccacgattctctccacgtgctctcgccggaactcgcgctgcagaagggggctccctcccacgtgggcgcagcaatccct

SEQ ID NO: 23781 - DNA, 2300 bp, Homo sapien
agaactgagcacgcattaggtgatttcttttctttttttcttttcttttctttctttcttttttttttttagacagagttttgctcttgttgcccaggctagagtgcagtggtgcaatctcagcacgccgcaacctccgcctcccgggttcaagcgagtctcctgcctcagtgtccccagttgctgggattacaggcatgtgccagcacgcctagctaattttgtattttttttttttttgagatggagtctagctctgttgcccaggctggagtgcagtggcgcgatctcggctcgctgcagcctctgcctcccaggttcaagcgattctcctgcctcagcctcccgagtagctgggactacagctgcctgccaccacgcccagctaattttttgtatttttagtagagatgggatttcaccgtgttggccaggatggtctcgatctcctgacctcgtgatccacctgcctcagcctcccaaagtgctgggattacaggtgtgagccaccgtgcccggccctgtatttttttttttttttaagtggagatggggtttctccatgttggtcaggctggtcttgaactcctgacctcaggtgatccacctgcctcagtctcccaaagtgctgggattacaggcgtgagctaccacacacagctgcatgaggtgatttctaccagtgaagggtaggtgtgggtgttttgggcctggctgttctatctcagggcctaccattgtcgtcttgttcacactccctgtgctgattatgaagctgatgtctctaaggtcagacccacctgtctgtactctaccctgtgattctggggctggaacttggcgaaccacactgctctgtggccagctggctccatgtggggctctgtcagtaaggagggatggcaaattggcagagcagggacttgcctcttcctgggactgcttcttgtccctgtgagcatcaccccaacaatgacttttcaccttgcagtggcagtttacctcaatagcaatgggttccagtcttcaacattttctggactctcaaatccagcctcacagatactgtgcagtcgccgctccttagaagcctaggtcccagctccgcagggctcctcttccaagctttgaaattattgcaaccccagtatcttccctgtgttcttcagccccagaggtagagctgcctctggcagttaccatccctgtgtttatcttgatacttcctttttgcctttcagcctctaatacctgcttactcaattgcctagattaaattatttctgttaaaatgcaggtccttttcctgttttctttcctaactagatctgactgttaacatgccccttggaggcattgcctgagaagcacatcagggtgtagccttacctctctgtgctgctccgaggaccctgatctcagaaaccctgccagtggccccaacatgtgaaccatcgtggtaaaagaactctctgatcacaagaaagtcccctaatctaagataatgttgataaacaagctaactccaggagggagggtttaatttaagaaagccagtagggaccctaaatcttttcattccaatcaaagctgtcaaagccagttatcgtcagagccagtcaggtggccccaaagccgccatctacctggcagctgtcctgtcaccacggaaaccacaagttggtgaacaaggcccgaaggaaccctgctgaaactcagttgcttgacatatttgtcattatcgagtctgccagagtgcagcatctcttgcaagagtgattctctgaaacttctcctgcttcaatccctctacccattgtttcccaaatagagaatatgcccacctctgagaaagacatgtgctggcaggcatcacaggcccaagaggaggcacttgtttactcgacaacagacaaggtgactgtctgctgcattggcaccaggactagcattctttgggcatccccaactaccttttcaggcccccgtgtcttcaggctgtctaggtcctggactggtggtcgtcaagtctgcccaccctcactatccagcagcaccagtggagcatgcttcataactaccctttcctctctccgaattgagtttgatgtcatcaccctgcaaacgatgaaacaaatccccattttattgatgactgataacttcaaatgtgacaagaggattcatttccttattcaatcattccacaaatattcactgagcatctcctacgtgccaggcaccaggctggactttaggatcaatcataataattttcaggttatggataatgccaatgg

SEQ ID NO: 23782 - DNA, 2300 bp, Homo sapien
tccttcacctccctaggcttctactttctcacttcaaatcagggaggtagagttggattaggaaaatctttagtgtctattgaggtgtaatatcctagagtttgatgtaaagtataaatgtactcaattttgtttgctctctcttcttaggtaaaaagacatcccttaactatggcaaaacaacaacaacaacgacgacaaaaaacaaaacaaaacaaaacaaaaccctgcatcaatttgataaataatcctccccgttgatgtcactggtttttttctgcacatcttctcactgatatttaaatgctgagcttacactttccatggacatgcttaatgactaaacaatagttgaattctaaattaatcaactgaccaaccagtaagaatttattgagcaactcctttgaagccgtctatctgttaggtgctgtgggagcacaaaagaaataggacatcatctctgcctcagggaatttagtgttttggggaaaacctgagtggtatacacaaagcaattgaggaacaacctaggaccttgtagtccattaggatttccaaaaatagaaagagaatggaaagtcacctggctaggagaagccagtggaaacttgacacgaagaaaaaagagcagctaatttcattcctgtccaccagttatttatgtgtttatctttaattacatttgtttgatttcccttattaaagtctgatgtcttaaaaaagcagaaaagtgaggcaggtcagcaggggatgtaagttgggaagaaagacaggtgagggcaagaatttaggcaggagccacagtgttggttgtgcaggtgaaggtcaggtgacggagggtaaccagtcatggatgacccaggcaggagccataaccaaaatgttagaaaaagttggtaagaaattgttccaggccaggcgcagtggctcatgcttgtaattccagcactttgggaggccaaggtaggcggatcacttgaggtcaggagtttgaaaccagcctggccaacatggagataccctgtctctactaaaaatacaaaaactatctgggcatggtggcacgtgcctgtaatcccagctactcaggaggctgaggcaggagaatcacttcaacccaggagacagagattgcagtgagccgagattgcgccactgcactccagcctgggtgacagagtgagacaccatctcaaaaaaaaaaaaaaaaaaaagttttccaggaacaagggcagaacttagctactgagttctaccgaaggccaggatctgagtcaagcaccaaggttaactcccagggaagccaaatgttcataaaaggaaatctttccaaatcacaaatatcagggcctgctaggtaaattctagcttctctgtgccaagggctgtgttcctactctcaagcgccactcactgactgtctgggtggtgctgtgggcttctgtacttttagcttcatcagctgcacctgtcctcttttcccataagacgccaggaccctcagaatcttccctcttaccagaaatttgggttttgggctgggtccctggaccgaattctgacactctaagtgtttgcagactattttgatagaggtagtgattatgatgccagaaaagtgaagccagtttttattagaatgttggccatcttgaataatccattcccccacttccatgggacatcttcaaagagatttttaaaagacaaatatgatctctactaatgagatatcttcagaaggtagaattaaagcaaaattaatgtacacagaattcctatttcaatatatttattattcacaacatttctacacacacacacacacacacacacacgcatacacacacacacacacacattcctgcacaggtaatttatagtggctaatccactcagtactgtggactttggttttagagagcattgttttcaagggtagtacagataatctgcctccaacatattctattcttagggctctaaagtcaaaggagtttgtacagacccctccctgctaaggtaattatgtcctcttcatatcttgcatgaatgtttgctcttagagtgatgatctgaaatatcaacatcctgcaggacctagtctggtctggaagaagaagagatatgtcatctctatgggctttgatcttggtaggcatatttattcaccaggtacacaaatgcaactttaaaccctcagccacatttagtaaactatttcttcatctgttgcagtcttattctgatgggaaaaatttcctctgtttttcaagtttaatttattattttttcaa

SEQ ID NO: 23783 - DNA, 2300 bp, Homo sapien
atagaaactagaattctccttcctccaagcaagtcgtaaaacctagaaaggttattttctgccttctcccttgaagaccctcattccagaagggtcctgccctaataccagaaggaatgctacacagggaggccaagaagaatatgaacagacaggccttgctgggtttccccattcagtctattaccattagactattatcattccctttttgtccaatcccatttctttttctttttaagacacagggtctctctctgtcgcccaggctggagtgcagtggtgcaatcattgctcactgtaaccttgaactcctgggctcaagcaactctcccacctcagcctcccaagtagctaggactataggatcacaatacccagctaatttgtgtgtgtgtgtgtgtgtgtgtgtgtgtgtgtgtgtgtgtgtgtagaaatggggtctccatctgttgcccaggctggtctcaaactcctgggctcaggcggtcctcctgccttggcttcccaaagtgttgggattacaagtgtgacccaccgtaccaggcctctaatcacatttctacacagcgatcccttcttcatataacctaagcataaaaatagtttcctctaggtctcatggtctgcatttttggactctcatgtcatgtaaaactttgattagacttgttaggctttttgtgtgtgttataggagtgtcagctgtgacccttaaaatgggtaaagaaaggtttcacacctttccactcctacaccagtcagagtttactacataattttggaactgagtgatttcagatgtgtttaattcagcttcatcttggcttcaccacattctgccctgtgtatgcgactcagtaaccactctgcacctcaattttttcaaataaggtttgaaaaagaaggttataatatttacctcaatagggtattgtgaaaattacagaagttatgatttacataaatctaaaacactttgaatcatgcacatagtaaatgtttaaaggtgttcactattattatgattgacttagattaaacctattttaaatattaactgttcctctacgctatcagacctccaagtgtggtgtggggattcatgggggtgggaattttctggagacccttttcaggagtccatgaggccaaaattattttcttaatactactatgaggttgcctttttcattcacattctctcaagatgtagtagttttttaagagctacctgagaagtgctaacgttagcaacagaagcagctagagaatccagttctcacatgaaatcagacattagagacttttcttactagatttaaaaaaaattacttgtcataaaaatgttgtttgttagctggtaacgcattagtaattttaaatcaatattttaaaactttaattctaatatagtaagtattgatataactgacagaaacaaaagctccctgggctctttaacaatctttaagaccgtaaagggatcttgaggtcaaatttgagaaccaaagctgtgatgcaacctctttttgaacaaacgtggatgcctcaccaccacaatttcatcttttctagcctccatgactttttcttgtttcctctggctgggctgaatttcttcatttctgcctgccaaaagccctacccctccttcaagagcatctataactggttatccttgaatttggtccagatttcgctgcctccttggcaccctcttccacgatgctgggccctccagggccgggcctccctcggacacgtgccctcgttagccttggaatatgcacactctgttttgacggagactctcttgcgagcctggtctagatttctcccctcaccagccaggcacaggcaccaatgggaggtgcctgggctccacaggcccgtcggggccagagggtcgccggtagcgtcaaccaagtgcacgacagcccacgggtggctaggcgcgtgggaagagccggagcccgacccccgcccacccggtttcctggcagcgcactgccgcgtaggggcggagccgcgcgcctacacagggtgtggcctccagcccgcgcgggaaagggcctgcgccgcatgcgcgcgcacagtcggcggccgcgcgcagcacgctcaaggccgggatggcggcggcggcggcggcaggaagcgggacgccccgagaggaggagggacctgctggggaggcagcggcctcgcagccccaggccccaacgagtgtgcctggggctcgtctctcgaggttgcctctggcgcgagtgaaggccttggtgaaggcagatcccgacgtg

SEQ ID NO: 23784 - DNA, 2300 bp, Homo sapien
ctctcccttttcctccctctctctgtcagctctttgagatggtggaagcctcaagcagagatccaaggtggaggaggcattcccttccacaaagaagacctcttgtgcagccgctctaaataaagggacgctgttctcttgaaagcatctctagagttttctatgcagtgtgtttacgggtgcctaggagaacctggcaaagcaatgtgcggttcctatatacgctaaaatcccaggctccgaaaaaatacagagtgaaacagcagattctcctccccggcgtgggatccaatttttgcccggcataagtgtatagtaaatttcccagccttaaagcacttcccgagagatgctttgagcgctcgcggtaccagtgcgtaaacgccgctccccggctggcgcgggtgtgcgccaactccaacctgcgcgcaagtctgccggtgcgcgctccagtcccacagctccgagtccccgcagtgaaaggagggggcggtgcaccggggtagatgggcccctgaggactcccggggttcagttttccgcggaactctgcctgcagcagtctggcgggaacgtgctgcggagctcatcccatcttggcttctccaaaagggtttatacggactggcgagtctttgccctgcctcctccaagtgtctggcaccagttctaccgtttgaaatggtcttggactgggatacgaggcctcaaagtcagaagacggcagggcaggatggaggcgggcagagaaggctggctgacctgtcctccagcccctatgcaaacctggaaggggaacagggagaaggaccaccgatgccaccccgagcccggctctggcctgcaggcttggcaggcgcggaggcggaggctgccaggtccccgggaggcaaacgcagcgccgcagtgattgctggcggagagcccagagccgcgcgtctgagcgacaagctgcctatgagtgtggctcctgcgctcaccaagattcgcagggagctcagccctgtccccagtgattgagcagaggctcatccagaggggtcaggtggagggctcaaatggagcttctcctggaacgaggggccaagtcaccagggtggctgaggaaagtgtcctcaaagcttagagactgtcacttcccaggtgaatcagctagccaggtaactgagctagatattttgtgggggtgtttcctaaacacagcctcaggaaagttgttttcgggacacctggaccagggagtcgtcgcctctggcttctcggtagctggagcgcggcccggagcgcggcgctggcacatcgcccccacacatgaccgtttcccattgccacaggcaagccgcctctgcagagctgtctcagggctctgggcttcattccctggaagttgattgtcctccactccagctgtttcccaaatccttccttcctcccagcacccctcgtgcaacgacgattccagctgcggaccgcatctgtgtcagttacttccaagccacctactgccccctcgcggagtgcgtggggctcccggctcgcagactcccacggcaagtagcaagcagcaaaaggcgtggtagctgcggcggtggaatgagacagttgtcaacagctggcgcagctgccgcgctgcgcaccgggactggcgagtacgcagcccaggtactgccccttcccagtgacgtctctgcagggggttataaaagcctcgtgcgcagctaactcgcgagctgagcaacccgaaccgagaggtgcccgcgaaactgcaggcggcggcagcggcagcaaaagagaaggaaaaatctccagctggatacgaagctccagaatcctggccataggctcagaacttttacaggtcgcgctgcaatgggcccccacttcgctcctaagtcctcacgcagcacagggctttgcctttccctgcggaggaaggagaaataggagttgcaggcagcagcaggtgcataaatgcgggggatctcttgcttcctagaactgtgaccggtggaatttctttccctttttcagtttaccgcaagagagatgctgtctccagacttctgaactcaaacgtctcctgaagcttgaaagtggaggaattcagagccaccgcgggcaggcgggcagtgcatccagaagcgtttatattctgagcgccagttcagctttcaaaaagagtgctgcccagaaaaagccttccaccctcctgtctggctttagaaggaccctgagccccaggcgccagccacaggactctgctgcagaggggggttgtgtacagatagtagggctttacc

SEQ ID NO: 23785 - DNA, 2300 bp, Homo sapien
gtattaaatttgaagtcaataaaattctaattcatatcacattatgatatggcttaattttaagtaagagatgttattgcatttatttttaaaaattggattgtaaataagtgtactctaccatatttatagattaacaggaaaaagatcgtatgaatagatgaaaaaatgtatttgtgtaaaatttaataaaaaattcatgatttaagcaaaggaaagacctattgcagtgaagccccctattaatcttccaaatgcctttctttggctatcaaagtgtccaaatattcttctaatattgtgcctatgatattgcaattggaactgagtgtcccctggtatgtcacccccatacatagtgttcagggggtaataatctcattatccctttagctacctggggagaggtggggtgtcaggagcagagaagtttctggtaagaacagttcatctctgatgatgttggcatcagccagtagaggttctaaaacttgtttggccccagttggcttctcagactctgaaagaaaaaagaagcagcacaaaaaccatcatatacccaggagatcacatcataccttagacctggtatgtgtgtgaacccagcagagaagctttggtggctagtgtctggatccttggaaggatgaatagcatccccagagaggagaaagcccattgacagagtgtaatctggaatttgaactagacagccagataaaccagtctcccagggtcataccagaaaggatgcaagaggtaaaagatcaaagaaacatgcttcctctctgctcctgtcagccaaaatccacaaaacagctagtgtgggatgtcccaatctggcccctcatcagtgaagtttgcaggccagcctctctggaacaggaagggagggaattctgtttccttctagcaatgcccagatgggccatgaaatgaagtctcacacagctctgtaggaactagaatcctggaaatgctgatatgtagattccgacaccctatgccttccttgctaaagtgtcaaggcctctgctaggcccaggtaggaaatctcctctctgtgtctagcttcacttagaagcttgcaggaagaatgaaatcagtcatggagctctgagcattgagctgtccccacttcacgtgtgcacactcattcattcgtcatcatcacacccttccaactactgtggcttccgacttctgcttattgattactttatagagacacatctcagctatttcttccccaaaatggattggtgtcactatcctacgttaattttacaggtcaagaaaataagggcaagaaagaaaaggaaactggaagcatgggatgggtaactgtctacagactcatgtaccaaagtgcagaagtaggtctttgaggcccattgaccttccactctacactggtgaaaactatcaggcactgaccctaggacagtcacagggagtctgaagagcaaaagctcaaatggaaaaacagtccttatatcaccggctggggagaggatacacatggccccagagaaataactgagctgagagaaaccccgattttctttgtagcactgataagcacctggggatgatacatctaacatgccagcctgccagccacttggcttccactgccccatcaaccttcccctcccaaccatcacagtgaatcatttccagagatgtatcctggaccttgtcatcacctggaaaggttttacctctgaatactgggttgtgaactccgtaagggcagggaccatgccttaattcttatctttgttctcagagtttcccacaataagtgcatagagctaatgctcagggactgtttgctggatgaatgactcacactgagaaatctcactctccaatcggaacctctatcttacctctctgatgtggtttggctgtgtccccactgaaatctcatcttgtaatatagttcctataatccccaactgttgtaggagggacccagctggggggtaattgaatcatggggcagttacccccatgcttctgttctcctaatagtgggtgagttctcatgagatctgatggttttataaggggcatttcccccttttgctcagtacttcttgatgctgccacgtgaagaaggacatgtttgcttccccttccaccatgatcctaaggcctccccagccatacagaactgtgagtcaattaaacctctttcctttataaattacccagtcacgggtatatctttattagcagctagaatctgctttattagctgagtatatctttattagctgagaatactgcta

SEQ ID NO: 23786 - DNA, 2300 bp, Homo sapien
tctgtaggatccttaagtagtcatttatctcaatgttggccttcatgcagggatgcatgttctggagaatgacccgtaggaaccccaagaggggctctcaggctagcaacggatgcacttctgtcctgctgcacaaccagaagtagataatctagatggcagctctagtctctccatacctgtgattcctgaaatctgttgaagtgtagggggttcaacagtatctgcttcattttaataaaatgaggcaatgtttataagtgagacacagcccagtgactggcacgtactaagtaccaacacatattagcagttcttagtagtggtagtatttttaaatccaaaggtagattgggtcagagtgcttccaggtgtcctttctccagcctgggggcaaataagtaggctcaagattagggcccatctatagaaagtctgtgctcacctattggcacctgtgccctatctatttatttctttactaattagttcattcaacacacatttactgagcactgattgtatgtgtgctcctgtactcggcacacaaacctctgatctctgatattcgtacagggctgtgcccttggctaacacacgtagtattacatcaggaaaccccgcttctcatcacagcctctccatatgcctgctggaaagctggagagttagggggagctctgatgatggcccttgcatgccagagtgtggaatttggagtcaggcaagtatgtattctttttacagataaggaaacagaggtcggagaggggagtactttctcaagttcagagagtaatttagtgctgtctgaggctagaaccttgttccctgattagtttaggaaacaagggccctttctaccagaccagttgcctctgcatgagagtggaataacctgtctttacgttttcatctacagataggtgttgttttccttttgaagagcagcatttcaaggtaaaatgaagtagctcttgagtaagtctgaaacagtggctctcatctctggctgtatgagatcatcttgagagcatctgaaaaaaaactgatgtgggagctccaccccagacaattacagaaatatttgtgagggtggagctggggccacctattggtttttaaagctccccaggtgtttctaatagacacccagggctccatagtctaatatacaatcagtccaatatacagcataatatacagtcagtggtctagcagccagtgcttccaaattctaatgcacatttgaatcatctagggatcttgttaagctgcagatactaatccagtggttcaagtgcggcccgagggttttcatttccataaagcttccatgtggtgttagtactgccagtctctggaccacacttggagtagcagctccagaaggcactctgggattctagtcatccacgtggtcactggctactctagccagaggcctgggagtcacctctctccttcatcctctcctcatcttctccctttcaagcccttggtcatcagatcttgtcagttccatcacactgcttctaggagctcctctcctttcctaacggactggcacaatattttcctccctgttccccaccatcactcactgccctggctgtgctctttgctagaccgcctcctgaaggctttcttattccgtcttccctctgtccaagcttttattttgattctgtagaaggctctttcactccgtgacccatctcttaagagaccaccgcaacccgggacctgttctctccctgcactcttcccctatgacgattgtataggaacagggtgtccctctagttgtttctgcgtttccagcccccagctgagcgcccatcactctcaataaaatacttgttgattttaacaaacaaaaccccaaccctgaaagagaaaggccaaacagaggcctcagctgcatttcttccgataaaaatgaacattccttcgagattatgcatcaggctttaacttcccactcagaaaaaaaaaaaaaaaaaagttgatcaaatttaacaaagtaagtggttatttcctgtctgagttgagtagctgaatacaggctcaaagcaggcgacgggacaggaatgagaggatggatgctggcaggggcttggaggtctgctttcaaatctgggctcgtcccagcagggggaaagcctggaggaccgggataggttggggactgccgatggggaacctccccggtcctgcggacagtcggcagcgcggggaggcaggcaggagttgggagcgtgaactaacttggcgcggagggaggtgccgcacgccgc

SEQ ID NO: 23787 - DNA, 2300 bp, Homo sapien
ttcatctttcattggcattgccctgcctgcaactcccttggaataaaactatctgggaaaagaaggggaaactatgtgagtaactaaggactgtggtttctagagcacttgagccataaactccccgtgttgagggcatgctcttgtcagcctcactgtgtgcaggcatttattttgcttgggaccaaagctaaacattaacccacttgagctttgcctttcctttcccattttcaaactcccatggctcccagtggctttagtcatgtataccctatctattattattccctttttaactgcttctgggcatgatgactgcatgtttgcaaacaccgtggcatatttgtggtaattaaacttcacaccgacgtctggatccagggcttccacaggcctcatgctccagcattgcctgggagcccctctgtatgccttcatttgaggaatctcaagtgagtgcttgtggctccttctccccagcctcagaggggagaaaaattgctggccaggcatttccagagggcttcaaggggatcaaagagagaaaagcaaacactgagggaaaatgtgctatttattcttggaacaaagttacattggcagctttctcctctccagtaatacttgttttcctgaaaggattacacttgcatttgcttcctcccacaggatttagctgccactcagctcatgacctgtaacttctatctcccgccccctcccaaccacgctttcagttttctcacaggctgggcaaaaattaaagagattaaaatcatccatgagaaaaagtgggttagtgcagctgctgcaaataccctgcgtcagcagcccaagtcagcagctcaagtcagcagctcaaataaacttggccatgtgagtagtgttcctgggccacagacagggaatcccaggccttttagggcttcctccttaggaaaggaacgagaaggaggattaggcttagtggcgagggctgccaggtagaggtgtctttctttgggagagcaattccatttgtgtttttcatggccatttctgcttttaattaagtaattaaagaaattaaagaaattcatgggtggttttatggcagagcaatttatcgagatatttacctatgtcttggtttcttcactgagggtactctttgcctcaaaaaggtagcaagaccctgtcatgcccttgtctttgagagctgtttcgttgcggggctgaaaacaggttttccagtaggagacatccctatttctgtttttgtttcagctccctatgcaccttgaggagaatcatgctgctctgtgatgggcaggagtgggagctttgcatttctgaaggtgtgcaccctgactggagactgagggagtctctgaaaatgagagaaagaacagagtcactggggtgcccttgaagtatgatcatctggaccttgctttccaacagcacgaacaatgagggcagctgaggggctgaaagtggcactggggtagaaataactaaacattgaagtctgtgaccttgagaacctctgtgaaaagaatccccaggcccaagccttagaagaacttgcctcagggttccatgctgttttggaaaacaagcctggatatggtgaccaggtagacaaagtctctttgcatgctctgcgtcatgcacctctacctgacactggacttccgtctgactctggggaggggacatgccccagtaataactgagattaaaattttctatgaaatgaatagaaagctcagggcaaattatgttaaattagagaagtaaaagaagcatgcatttcttgcaccctaatcatgtggtaggtggagtgtgcaaacctgagacagagagatgaacaagaacctattgacctcacaggactcggatatgggagacgtaacagggtgcagagctctacagtgaaaatgtgtcacagatgcccaggactcaggtggggttgctgcctctgtttgggggcagacaaagcttcccagaattgctcacctttgtcctcagtcttaaaagatgagctggaattccttagtggaggatgggggtggagtcaagaacattctgtacaaaggtacaggagcgtgaaatagcataacctgtttgtgaaactgcaaaaaggttgacatggctgaagcagaagatgggttggtactgaatggttgggagagatatgtagcggctgaccctgaaggacgttgcagcccatgctatggagacctgattttattttgtaagaggtgggcaacccctgaagcattttagtgatgcgaacagatgtgtctgttacc

SEQ ID NO: 23788 - DNA, 2300 bp, Homo sapien
ttatctttgcctctcctcccttttactcttaagggcttgaagtctactttttcgggtaggtagaagagccaaaatattgctcatctgaaattttggttgtgagattccttgtcatttatagaataaattcttgttctaatcaaagaagctagagttaaaatagaaggccctgtctttcttcacagcatcttgaattctgtgctcaaaacatggccctgttcctcaggctgatgtaacagctcatgttcttcaggatggcaagtcagagtatagaggccaagctgcagaggttggttgcttttatgagcatttgacttctgtcaaaagtaaacagtaaggctttaaactggggaaaggaaagaacagggtatgcatttctgagccatctttttttggttgctgcgtgaaggactggaggtaaccagaggcaagaagactaatgagaaggctgttgcagggatctccagggatcctgaagagagaaaatatgttgacctagattggaaatatggatgggaggatgagaaagtatatggattcctgagatatttgacggtgtcaggcatagtttttggaacttcatccaggaggagacagggaggaatcaagaatggcactgagatttttggcttaggcaagagagtggatgctgaagccattccttgagatagccaatactgggaaggaagtctggagctgaaaaagatgaactcagtatggataggctgaatttgaggtagctttgggacattaatgcaactggaatgactattatgtagttaaattatcacattactctaagtgttcaatccttatataaccactgctgaaataacaaattccaaatttctttttttgtgtgtgtttctttttctgtttttttgagacggagtttcgctcttgttgcaatggcgcgatctcggctcactgcaacctctgtctcccaggttcaagcgattctcctgccttagcctcccaagtagctgggattacaggagcctgccaccacacctggatcattttttttatttttggtagaaacggggtttcactatgttggccaggctagtctcaaactcctgacctcaggcgatctgcccgcctcggcctcccaaaatgctggggttaaaggcgtgagccactgcgcccggctgtgtgtttgtttcttagagatacggtctcactatattgcccaggctggtttccaactcatgagctcaagggaccctcctgtctcggcctcccacagtgctgggattacaggcatgcctggccacgcccagtcattttccaaatttcttaacaagacttacaatttaccttttccagctttacttctcccacctatccatacccacagttgcccagcccaaattcatttgggttcctcaaagggttaatgctttgtgtagtctcaaggactatgggccagcagttctgtcaggaactattctattctcttttctgtgcattcagcaaagaattagaaaaattagctgggcgtgatggtgcgagactgtagtcttggctactcgggaggctgaggtgagaggatctcctgacatcaggagttggaggctgcagagccatgatcgcgccactgcactccagcctgggtaacagaggaagaccttgtctcaacaaaacaaaagatgttagtgagggcccaggtaggtgctaggtgctgggataacatggtgagcaaaaagaagactttatcccttcccttgcctcattatagtataatggcagatttaaatactaatctaataattacacaagaaagaattgcaaatgagatcagagctgccaatcgaaggcacccagtgggaaagacggcctacaatgggattttcgcatagcgaaagcttgtctgagaagatagagtggattcatagggggaggaaaaagctttctaggctgggagaacacccctgtggaggggtgtaacttggcgcattacgaggaactagagaaacgtgcacttttcctaagacatcaggaaaggagcgaggagagacttatccattttgtcccatagcagccgccatatggtggcagacagcaacaacctcgtcgcactgattactgggagctgtagtcttgacgtgagctagctggcatggcggcctgcattgcagcggggcactgggctgcaatgggcctaggccggagtttccaagccgccaggactctgctccccccgccggcctctatcgcctgcagtaagtggagccggacttgcgagctggggcgcgttaggggcccagggtcaggatgggggaggcgaacctggagat

SEQ ID NO: 23789 - DNA, 2300 bp, Homo sapien
ttgccattgtaaacattttaaatttacaagtcagaggcattaattacatcacaatgttgtgaaattattactactatttccaaaattttctcatcaccccaaactgaaactctgtaactgttgagcaataacctcattcctgtatctctcccaaccccaggtaacctcaaatctttctttttatctttgagacaaggtctcattctatcactcaggtaggagtgcagtggtgtgatcatagctcattgcagcctcaaaatcctgggctcaagcaatcctccttgagtagctaagactataggcacacattaactgcgcctggctgattttgttttttgtagagatgtggtcttgctatgtttcccatgctggtcttgagttcctggcctcaagcagtccttaagattcatccatgttgtggcatgtgtcagaatttcatttgtttttatgactaaataatattccattgtatgtatatacattttgttcatccatcttctgatgaacactgggatatgtctaccttttggctattgtgaataatgctgcagtaaacattgacataacaagtatgtatttgattgcctgtttctaagttcttttgggtatacatcttgagtagaattgctagataatgtcatgttttatttctcttgtgatttcttcttcgatcccctggttgagtgtgttaatttctacatgtttatgaatttcccactgtttttttgttattgatttccaagttcattccattgtgattagagaagatacttagtatgattttaatgtttttgagaattggtgtgtggcctgatagatggtctgtcctggagaatgttcctcatacacttgagcaaaatatttatcatgctattgttgactgtagttttctatatgtctcttaggtcaaggtggtttacaatgtgttaaggttctctttttttaaaaaaatttttgcacagagtatctttttctatgtgttccatgtatttgtgtctttggagctatagtctcttgtagacagcatatcactatcttgttttgttttgttttttctgtccattctgccaatttctgccttttgattggaaaatttaatccatttgcatttaaagtaattaaggaaggactttcttctaccatttaacacttcttctatatgtcatatacttttttggcccctcatttcctctttatggccttcttttctgtttttttgtagtgaactagtctgattctctttccactcccctttgtgtatatttgttagatgttttatttgtggttgctatggggattatagttaacatcctacacttaaaacaatctaatttaaactgataccaatttaccttcaatagcatacaaaatctctactcctgtaaagctctgcccctgccccccttatgttattgatggcacaaattgcctaataaataatttatagttatttgtatgagtttgtcttttaaatcatttaggaaataaaaagtggagttagaaaacagtatgatagtaatactgacttttatatttgtcaatatatttatcttattttggatccttatttcattatatagatttgagttactgtctagtgcccttccatttcggcccaaaggattcccttatgcatttcttgcagggcaagtctaattgtaataaactccctcagcttttgttttatctgagaatgtcttgatttctcccttatttttgatggataattttgccagatacatgaatttttggtaacagtatttttctttcagcactttaaatatgtcatcccactaccttctgacttcatggtttctcatgagatattagatgttataaaatttgaggattcctcattcttgatgagtcagttctgtcttattgcttttcggatttgctcagcttttgtcttttgacagtttgattataacgcggctcagtgtgggtctctgagtttatcccacttagagtttgttgagtttcttggagtcatagatttatgtcttttatcaaattttggacatatttggctattatttcttcaatttttttcactgcttctttcttttccttctgaaatattcttaatgtatatgttggtctgtttgatgctgtctcaccagtttcttaggctgtgttctcttttgttcctcagacttgattattgcagttgcccttctttttatttttttcaagtttgttgattcttctccctgttcagatcaactgttgaactcctctagtgaatttatttcagttactgtacttttcagctccaagatttatctttggttcctttt

SEQ ID NO: 23790 - DNA, 2300 bp, Homo sapien
ggaatgaagctgcagatcttcacggtgagtgttacagctcataaaagccacgtggacccaaagagtcagcagtagcaagatttattgcaaagagcgaaagaacaaagcttccacactgtggaaggggaccggagcgggttgccactgctggctggggcagcctgcttttattctcttatctggccccacccacatcctgctgattggtagagcccagcggcctgttttgacagggccgtgattggtgcgtttacaatccctgagctagatacaaaagttctccacatccccatcagattagttagatacagagtttccacacacaggttctccaaggcctcaccagagcagctagatagaatgtctattggtgcactcacaaaccttgagctaaacacagggtgctgattggtgggtttacaaaccttgagctagatacagagtgccgattggtgtttttacaatccctgagctagacataaaggttctccaaggccccaccagagcagctagatacagagtgtcgattggtgcactcataaaccttgagctaaacacagggtgctgattggtgtgtttacaaaccttgagccagatacagagtgctgattggtgtatttacaatccctgagctagacataaagactctctatgtccccaccagactcaggagcccaactggcttcacctagtggatcccgcaccggggctgcaggtggagctgcctgccagtccggcgccgtgcgctcgtactcctcagcccttgggtggtcgatgggactgggcgccgtggagcagggggtggtgctcgtcggggatgctcgggcagcacaggagcccatggagtggatgggaggctcaggcatggcgggctgcaggtcccgagccctgcaccgcgggaaggcagctaaggcccggcgagaaatcgagcacagcgccggtgggccggcactgctaggggacccagtacaccctctgtagccgctggcccgggtgccaagtccctcactgcccggggctggcagggccggccggctgctccgagtgcaggcccgccaagcccatgcccacccggaactccagctggcccgctgtcacctctcaatatgacgccactaaacatggagttgataacaggtgtgcagtagctcaacattatatagtatttctaccatacagatacagtagtagacagagcttgatgaatatagaacaaatttgcgtcagacaatagctttttgtttttagatagtttctttaagggtgaaaacatttaaccaggctctcttgaagccctgctgcctgggggaagtcatttgatttttgctagtctgtatgcattgtttatgtacagactttatggttttgttctcaaaggcatctcctcctaccccgagcctcacactgctggggtttcgtttgttttaaatcttggttggagggggcactctctccagaaagtaaaagacaacggatctggctccagtccaggacggaaagcataacgcttgatttctggatggggtttgcacaaggacagcacgtgagttctgctctccgtgggactcagaccggataggccgtgaaaatctctaaggtgtcagtccacgcaacctaacctggcaaagggaatgctttgcaaactcaggccccagaacagaactcggcctaccagatccagggagccaaagcacgcaggcgcagacagagtagcggtgagcagaaggcaggcgggacgggcgcgcgcactcggcggccaggcgcggcgggagcgcgccctagggggcgggcactgaagctgcggcttgcggttcagcgggttctagggcgccgggcgctcgggcctcggccatggctcacaggccgaaaaggacttttcggcagcgcgcggctgattccagcgacagcgatggcgccgaggagtcgcctgctgagcctggggcgccgagggaacttccggtcccgggttctgcggaggaagagccgccctctggaggaggccgcgcgcaggtggcgggactgccccaccgggttcggggccctcgtggccggggccgggtctgggcgagctcccggcgtgccaccaaagcggctccccgcgcggacgaaggctcaggtgtccagggagacgcggggaagcggggaggtgacggcacagggcgggaaggggccgcggggtctctggatccttctctgggggttctataacttgctgccgaccacaagccatgctgagtcttatccagaaagacttatccagaaggtagtgagcgagaaaatagctcgagcacttgcccgct

SEQ ID NO: 23791 - DNA, 2300 bp, Homo sapien
ctccagaaatatctttttcacaccatttgccaattttccaaaagaaacacacaaaaaaacaagtagttctctaattttacctggatttaaaaagagaagcctctctttataataagacattaataacttgtgaataactgataatactgtatcatataatttcccaaatttacatcaaggagtttcagtttattgagaaaagccaagaaaaaaagacaaagccaagaaaaaaaaattccggggctaggtcaatcagagaaactttgcctcttctcgattcctttggtgacatatagtcagtgatacaatggtaaatgtttaatgactggatatctgggagaaacacctggacttctaaggtcttccaatttatatggtataagtagtccctttatggctgatttcaaggtgccaatattgtgtccggaattggtgggttcttggtctcactgatttcaagaatgaagctgcggaccctcgcggtgagcgttacagctcttaaggtggcgcgtctggggtctgccccttctgatgttcagatgtgtttggagtttcttccttctggtgggtttgtggtctcgctgggctcaggaatgaagctgcagatcttcacggtgagtgttacagctcataaaagccacgtggacccaaagagtcagcagtagcaagatttattgcaaagagcgaaagaacaaagcttccacactgtggaaggggaccggagcgggttgccactgctggctggggcagcctgcttttattctcttatctggccccacccacatcctgctgattggtagagcccagcggcctgttttgacagggccgtgattggtgcgtttacaatccctgagctagatacaaaagttctccacatccccatcagattagttagatacagagtttccacacacaggttctccaaggcctcaccagagcagctagatagaatgtctattggtgcactcacaaaccttgagctaaacacagggtgctgattggtgggtttacaaaccttgagctagatacagagtgccgattggtgtttttacaatccctgagctagacataaaggttctccaaggccccaccagagcagctagatacagagtgtcgattggtgcactcataaaccttgagctaaacacagggtgctgattggtgtgtttacaaaccttgagccagatacagagtgctgattggtgtatttacaatccctgagctagacataaagactctctatgtccccaccagactcaggagcccaactggcttcacctagtggatcccgcaccggggctgcaggtggagctgcctgccagtccggcgccgtgcgctcgtactcctcagcccttgggtggtcgatgggactgggcgccgtggagcagggggtggtgctcgtcggggatgctcgggcagcacaggagcccatggagtggatgggaggctcaggcatggcgggctgcaggtcccgagccctgcaccgcgggaaggcagctaaggcccggcgagaaatcgagcacagcgccggtgggccggcactgctaggggacccagtacaccctctgtagccgctggcccgggtgccaagtccctcactgcccggggctggcagggccggccggctgctccgagtgcaggcccgccaagcccatgcccacccggaactccagctggcccgctgtcacctctcaatatgacgccactaaacatggagttgataacaggtgtgcagtagctcaacattatatagtatttctaccatacagatacagtagtagacagagcttgatgaatatagaacaaatttgcgtcagacaatagctttttgtttttagatagtttctttaagggtgaaaacatttaaccaggctctcttgaagccctgctgcctgggggaagtcatttgatttttgctagtctgtatgcattgtttatgtacagactttatggttttgttctcaaaggcatctcctcctaccccgagcctcacactgctggggtttcgtttgttttaaatcttggttggagggggcactctctccagaaagtaaaagacaacggatctggctccagtccaggacggaaagcataacgcttgatttctggatggggtttgcacaaggacagcacgtgagttctgctctccgtgggactcagaccggataggccgtgaaaatctctaaggtgtcagtccacgcaacctaacctggcaaagggaatgctttgcaaactcaggccccagaacagaactcggcctaccagatccagggagccaaagcacgcaggcgcagacagag

SEQ ID NO: 23792 - DNA, 2300 bp, Homo sapien
taatcaaatcggtgatactgggccacaagaaagttgtgtttctagatgacatgcacctatttttcatatacttttttaaaattggattatcaaaaatttaacaaacattcattacaaacaggcagagcaatttccagtgtgactacctgaataccttctgtttgtaatcatcatctgaatgaagattcaccacatggttacctaaacaatgatgaattatttatacctttaatgaaacttgtatgttaaaatgttagtaattgcattttaaaaaaatagacacacaaaacagaagaaaatcatctgactgagaattaagatactgtgatacacataagacagcttttcacagctttatgatgtattgttgatttaatagcaattgcttttttatataaaatatattttatattagtacacattaattgaaatttgtcctcaaatttagaaatgtttcaatattttttaaatgtgtagtttttttggtagaattgtagcacctggtcattactagatgtttatgtcaaagagaatgaacaacaaaaacagcagatactgttgcatgttttagttgttctacatccaaaattccctgtttcttagcttaccgatatgtatgcatggccatgtaacatttggcctatgggacttaaggaaaagcctgttggatgacacatactcagctagcaggctctccgcagcatcctgttcctcctaccctaaactgtgatatggtgctggaggtggagaaggcttctagcaacttgaggtcaaggactgacacattaagattggaagatcagaaaaacaacagaagcctgaaacactggagatatgatggagccagtgaattaccactaaactgctattttcaagattctttatctaggagaataaactcctacttgtttaagctcatgttaagtgtatttactgcagttcaaagcattcctaactatattgctgctcacactcaagttaacatgatgaaaaaattgatgtagacataacatacatttgcacaagtagatagtagaggggaatttgaaaaagcaagcattattaactcgtttcagagcaaaataattattttttctgaaatttggggaaaatcagaggatagaagtttcactacgacagcattctagacattcaaaataaagtttttttaaagtattaattttctttgtatgagtgggtctttcaaaatcccatacattcaagcagtttctcttatacaattcccccaaaaggaattctttatcttctatcaaaattttggtacactttagaagagcttttaaaattttatttgagattattttgtaaaaaaacatgcattcctaatttagaaaatttggtgaaagagtttgtattagaaagatgtaaaagttgtttatatttaaaaagttccccacctgtgaattaaatggtgggggataatgtttccttaaaagtaaattgagagattgctgcttctgtaaaaagaacgattcacagagtttgctttcagcttagagccccagtgggatagcatttctttccgttcgtctgctaacaccacagaaaaggaacagaggaataagaagcaataggatgtcccttccagagaccttgagtgacagtatggcaaacaagggtcatcactttaattagctttaataacccagagccgggtgaaagatctcctcctgagactaaagttgctagctgctgaaaggatgttagtgaaaattctgttatgtcaaatgtcttgccgcatgatttgaagtttttgttaaggaatccaggaagttagaggcttctgactaatgtgagaggcaatcaaaaaggagataaaatctaatgctttaaaaacacatttatttaagcaaaacaccggcttttttgaatggcattgtgtttgtatattatagtggctctgttaatgtactacgcacgcatcatttttaatcataaaagaatattgaaagacaatgtgagtcgttaatgactgagcaggaagaatgaatttgccccactctactccactaacattcttacttagagatttcaaagacctgaaaacaagtaatccaccctctgaaccactgagatcgcaattcacaatctctcacttggctgcttctagcaaagggtagagttctcgaccttccattcgcattgtaacttttaattttatcatgtgctttgccatctagagatatgagtgattaatctagttagattttaaataatgttaactctagattttcattggacttttgcattttagcagtgctacttttttttgagatgtt

SEQ ID NO: 23793 - DNA, 2300 bp, Homo sapien
aggaagctacatattgaaaggaaattaaacaggcaaatagatgggagcagtagaatgctccaggcaaaatgaacagtatgtgcaaaagtttccatagagtccagagaacatgatgttttagaagaactaaatatacttttaaataatttaattgatccatggaatttaagaaggctatatgaataagtttcgagttcagtaagaaatcttgatagttacaaaactgacaaagaataaaattgaggaattaatatgttcttgcaccttgaagagtagaaagcaactttcaactggcagatatattatagggtagagcctgtaatacagtaaaaatgaataattattagcatgaagaaatgtatttctctaagagaagtctgttacatgtaattaagacataatcattcttccattatcagaattgtatgtagaagtattattttcccaaaaatattccttcagaaaaaaatgtatacaaaatatttggataaagtgagcaaacttatgtcttcttaagtaatttttcagtgaatatgatctgtagtgcactggagtgcaaacatagcagtacaatttagaattataatcaatatttactccttcctaaatcactaccatctaatctttcaaaaggctattttggaatgattagatttcagtaggacattagaggctatcttctctcccttctttgtattatgtgtggaaatccaaaagcaatgaaaaaaaaggcattggaaagtgtcaaactctactttcaattttagttttgatgcctgattttccagccaggaagctcagacactgaaagtggattattggtgctattgtgtgcgagggaagatggtatagagcggggcaggaggcacaggaatatttgctcattgatcacataaactaaaacataaattccttgcatgagcagtacactacagccttcacttttggtgctccccagtaagcattgtttccaaagaaagtgtggttgggtaagaacaatcctccatcactatgagaaactgtaggaaaaagcacatccgttactgatggcaaattatacctaaaattctatctaattgcttctgttgctggtagtgtctgtggttggcaaataattaaagacacaaaataatctgagataaacagaagtatgaacagggctcattgggaacacagaagaagatcactaccattatcaagacaaggtctggggagagggcaggggaaggatgattgacacaagtaaataaactgttcacatagtactaagtatttcgctctttttttgtagtatgtaccagactaaattacaactctctgtgtagctgtttgtcttgccttgaagccaaagatttggcttactcatctttgttttctcagctcttaatatagagcctactacttaggaagccttcaatatctgtttgttgaatgaaaggaaggttaaaaaaaagtgaaaagagagagatatacaggaagaaaataagtaaaaagagagagatacaggaagaaaggaaacagaaggataaaaggaaacctgacataataatgtgggattagaagcattttgatttgaggtaacagtataacctcaagtgccttgtcagttaggagtattgcaaatatctcctcacttttccagtgtaatgaatcggatttgtagtgaactctgcttacaggaaagtctcattgatgtttgaaggaccacagctatccacacaatccagaagatctctgaaggaattaacataaccttaacatatggatatatggggttttgtgtgtgtgtgtgtgtgtgtgtgtataaaactagacagaaatatcaatgtttgcctgttggtttctacttatgaaacttatgtccatatgtactgcataatttcattccattaggtgatagtgtgcatttttttctggttgggggagagaggagaggagagaagaggagctcttttgtggttatttgtgttttgcttcttaacatcaattctccctccttctggcaacagcttcccatatttgctgtgagaaatcacccttctaattgttacatttaggtaaaattttctccatcatttactgtgttggcttaagccagatggactgtccattccacaggtaacaatgattggtccagaatagggcaaatactacattcagaacaagaagatcaaaagaaagctctcctgtagcttctgaaaaagaaaacttttcactgtttggaatgcgtaggatgagtttaggaggttgggactgctacagctaattggttacatgaagagaggcagcttgatgatgaa

SEQ ID NO: 23794 - DNA, 2300 bp, Homo sapien
ttctttaccctttatatcattacaatgtgttcaagagacttttggccactttctttgtaaattctgcatacaatctagcacgtactttggaaggtagcacctgttagatcctggtactttgaacaaaatttgcattttagccagttattacactatagatgtgccagttattacactatggatgtagagaatatcctggggttttcccaacattctagcaaagctgttttcatatcctgaattcaaacaaagaaaaagttatacacacacacacacacacacacacacacgtatattgatagatatcacacatgacatattcattatatttaaaattagaaaacacagacaattttataataaaagatgaaatcaaatacttctataatccatcttccaggaaagtctgctctgaatattttattttgctctatttacagtaatagactccctttcactgcccttaactatctgagttctctgccccaccttgcttactttatacatggtggtctaatttcctatcagcatatatcaccctttattttaattttaatggcagtgtgtgttctattttattaatatattaattttcccttcactcatcctctaccattgatatttgggtgggttttgtgtttctatattaaactacaccactatgaacaaatcgtatgtgtacatttatattgatatacttattttcagcaaccacaataatcctgcctcttttggcgtgcatttgcattttaataggtattaagccttaagccaaaggcacacatttctaagatagaaattcaagtatcagttagtggaaaaggaatatatttgggggacatattattcctttctgttcctcaagaaatcttagtaatgagacaattgcctgcaactgcctactcatacatctgagtcaaattatatgtgttatttatatgataagcccccttaattattaatattttggcaaacaatctaaaaccaaggctctttctaaaaatatctatttgcgatgatccacagcaattctaaatgcttatgtgaaattcatttaaatttctcacgtctgctaaattaggttagcagtcttacctagcagtctctccctgcattacattgattcattctcctggattattctaaaaattgttatctgccagaggattatggaataaactagtaaaaatgaggaaaaaatggaggtgatgcactatgtttttcaacgtctgtccaagcttaaagaaagtgtgtaggtccttttaaattatatatatatcaggtgttttatcatgtcatcccttctaattctgaggatattctgcacattttagagtaataccatgataatgcagaactcaagtgcttttgtttttctggaattgcacattacaataagtgatttgcataagaaatgatttgcattctaaatgtagatgatttaaggataatggctgcactaagaatgtcaagctagaattctactcttatctcttagttaccttcacatttggtaatatactatagattataactgctttaagactaaaaatgtaaacttttagaaagtagtgttctagactgttcaataaaatgcacaaaattgtaaaatgcattttatgtcaaaggttgagaatttgaaaatcagacttaaacatgttaaatgtaacctgtttaaaattgattaaaattgcatttttcccttgaataagatttcttccataagcggttagtttaaaacaatataaataaataaaacaaaccaacagcaacagtgaataaaacttaaatttcaacaatttctgtcatttgcaaaagatgataaatctccagtgacgtgcagaaaaaacaaatttcaggtcatggcaactttgaaaaactattaattgcataacatttagagaagcagtattttacttaatatttgctataactgaaaggaactccttggcataaaccttttaaattattggagagaaaaaaatagtgattctgtgcctttaatttccctttctgagcaagggaaggctgcacaccactgacaggctcacttgttcccgtctttaatgtgcaatctgttttctccagcggagggcactcagtgtatcacaaactcaagcattagcaccaacaagctctgagcatcatcagtctctggaaagccttctgaattagacaagggctgcctcccagcacagctacaaaacactttaaacctgaccagctaaatggataaacctagcctgcatagcttttaaactggggtctcatacagcacaggaggcctacttgcttcaaga

SEQ ID NO: 23795 - DNA, 2300 bp, Homo sapien
ctaatatgtatctatttgggatctcaaccacttactacttttatgctcagcatacgttattataaggtgccaaaattaaaaacaaaattccttcatataaattagtgactaaataccatagttccaaatttagcatgtgctaaggtgacaaactgctgaagtattgtagaataaatgataaagaactatatctttggaggcaaatatatctacatttgaatgctgtctctgtgccacctgctcatgtgatcttcacaagtttaatgaaaaatgtacataggtattttgcccaatgactggcatttagtcactgcccacttaatgttagcagatgtagaagtcttttagccttagaaatcggaaggatatttattgtttctatttgctgcaatgcactttttcccctcaacatatgcagaaatttatttccaaaatgaagggagataaggagggaaggggaaggtagtggtactaaccaaagtcatcaaacccaagctgcaacaagaacaagtcactttggttcctggagccaaacttgaagaggaaataggcagaaaggaagacaaaattgtaagaatatatagtcagtgggattctttttctatctaaatgatttagttataaatatagacgtcttccctctatgcatgtaacaaatacaaaattcactaccgtgaaattttaaaactgaactctttcacatttgttaaaaaagttaaaatcacataattttcttcccttcagtttctgaactattacatggaataatggctagtcctaacttctatacacagttaagctatattaaactcctttgacagtataaggagctacataatttctatcacacttgccttgaatttaggcatgagaaaaatttcttgaagcgactaaaaaggagcaagtcaagaaaaaggaaagctataaaggagacaaaaagaagactaccagatgaaacaattaccctgaaaaactcatgtattttattaaaggagtacaaataccccacaaatgacaataaatgtaatctattacaacaaagtaagcaaaataaagtgcacatatcaagcatgataaatggccctaataggctatctgctgaaagacgtaaggctcgagattaagtccaccaaagggtccaaattccttttagaccctaaagaaaaggttctgcaatgcacttttatttttttcttttagtctgtaaattgttgcattgcacttttaatatacaaatgtatgtatacaatatttctcacgtatgcatttaagaaatattcattgtgaacctactattccagatactgttataggcattagatttatacacacacacacacacacacacacacagaaatcagcaaattttcagaatcattctgggcagcacccactggattgattaccaatgcttcctacatactatttgaatggtccttattttccataaaataaagagaaatgcatagctcaaaacatatctttacaataataaacttcaagattttcctagatagttgcaaatttgaatattatgtgtgatcagaccataattcatgtttcattgtcaatttatatcttatggttaccattcttttatagtacaaacgcaatacaaatttgaaataattcctttgttaaaaaaattaaaacctaaaacaaaatttaattatgtaaaagcaaaaactgcagtgattccaatagcaatattctattataaatattagaaatcacattcttctcttggttagagtgacctgagtatttttttctccacatttagtatcaaataatcttattggcctgatatagggcatacatgtgtatttacatctgtgtgtatttggacacatataaatatgtgtatatattaatcattatacacacacacacacatacatatatatatatacatatgcatttaagatgaggacattgagacttgaggtgataggtgttatggtaatagttgaatggtatgccctttattaaataattgtctttcagctccaatccctctactttccactctgtttggcaacaatgggcttggaactttgcaaatcacacttcaacatcaccagctgctcacattcttccaagagataccagaagggaaactgggaagctggaggagaaggggagaggaccatgccttccctgtgtgtttcccgttagtgttagcagcacctcagtttctgtgtgtgtgtgtgtgtgtgtgtgtgtgtgtgtgtgtgtgttttgtggcagtttatttccatcgcattagttgcagtgtattttctaaaagtcttctgcag

SEQ ID NO: 23796 - DNA, 2300 bp, Homo sapien
taataaatctttccatttgtggtataattttaaagccaaaaaataaagcaaagaactattttgcaaaacctatgttttagaaataataaacgttcaataatcataaaaataaatatgcagtgagaattagaatgataataggaaaccagtatcatttatactcctgtatttgatagggatataaaatcaatgtacaaatatcagtagcatttctatataccaataacgtgcaatctgagaaccaaaccaagaattcaatcgcattcacaatagccacaaaaaaaattgaatacctaggaatacctttaatcaaggagatgaaaaatctctacaaggagaactagaaaacactgataaaataaatcgtagatgacacaaatgaaaaaaacaccccatgctcatggattggaaggatcaatgtcattaaaatggccatactgcccaaagtaatatacagattcaacacaattcttattaaattatcaattgtcatttttcacagaattaacaaaaataaaactaaaatttatatggactaaaacaaaagtgcaaataaccaaagcaatcctaagcaaaagaacaaagccagaggcatcacattacatgacttcaaagtatactaaaaggctgatgtaaccaaaatagcatgatactggttcaaaaatagacacatagatcagtggaatagaatagagaacctgaaataaagccacctatctataagcaactggtcttcaacaaagttgataaaaacacaatgaggaaaacataccttatgcaataaatggcactgggaaaattggatagtcatatgcagaataatgaaactggactcatacctttcactgtatacaaaaattaactcaagatgaattaaagacttaaacataaaacctgaagctacaaaaatacaagaagaaaacctaggaaaaacttttctggacgttggccgacacaaagaatttataactaaaatctcaaaagcaaatgcaacaaaagcaaaaataaacaaatgggatttaattacaataaaatcttctgcacagttaaagaaataacaaagtaaatagacaacctacagaatgggagaaaatatttgccaactatgcatcctataaaggactaacataaaaattacctattgagtacaatgtttacaatttgtgtaatgggtacactcaaagcctaaacctcactattatgcaatatatcctcataacacacttgcatatatatcccctgaatctataaaaattttaaaatggccaaaagcaaaaaacattgaaaccacagaagtaattgtgaagattctttttaaaatttgctggggttactttaatggtaaacatataatcagcagcaaaatatgcacaatgtttgatgtaagttaaacaatatgatatgttacagaattatagacatgactggaatcttatcaatgattacacctagtaacaaagctaatactcttcactgacaactgttgataagacaaataaataaattcagccaactctttggcatttatcagatagtagctgcgtaagaatttccaatttctaaataaaaaagtctgtaaatttgtcccatacctataactgaaaaagatcattttcaaactgattgccaacttacttatttgtaaacaaatgaaactcagcctagaaactaggttttagaaaatgcacacagcatgctaaaggtatagtgagtctaatgtgagtattgttcctcaaatccaagttatgaagttacttcgattttgcggctttgggtgcagaatggactcaaatatacacacatgaaagcccacttccccacatacactacatgaagaaatgtgtaaatcatattaataacagaccattcaatttttattctctctctttctccctatgcccctctgtctctttatctctctttctgttagaccacaaacaactccttttacagtgatgcttgtttgttggccttttctacactaacatattctgcctacattattcaaagaatctaaggtcttctgaacaagacttttgtttcagagatagtatatgcatcctttgtttagctttgcatgttagcagactttgttatttcacttatctttagagacacatttatatcagaaaatttaacttgatgattaaaaaaattggtgaaatacgtgtagacttttgtaactggattatagtttcatctaagaactcactaaaaatatattgaacttcaggaagagatttttaaatggctttggtaagccatttaaaagccttattttcccaaacgaattagtgttg

SEQ ID NO: 23797 - DNA, 2300 bp, Homo sapien
ggtgctgcatcattacctgacacagggcatcacagggtgagagaggtgcactgagagccaaactggttgttataatggacctgctcccatggtaactcattaatccacttatccattaatctattaatccatgaatacatgaatccatttatgagggtagaatcctcatgacacaacttcttaaatgccccatctcttaatactgttacattagagatcaagtttcaacatgagttacagagggacaaaacattcaaatcataccagaaagctatcaaaatttactcaaaagtaaacttattaagaaacttaaaataatggttaaaatggtatgggaaaggacattttatgcacaagtcatgtcactgggaagtaatatcaagcatttaaagaaaaaagtcaactccaaaaaagttaaaaaatgaacaggaagaagacctttccaatttctgagtcaagaatagctgtgatatcaaaaccagatggaagatagtacaagaaaatgaacatacaaacagacaaattttcatcatgaacatagatctgaaaatcctcaaaaaatattagcaaactgaatacagcaatatataaaaagaatattataccataaccaagtaggttttattgtagcaataataactggttcaatattcaaaaaatatatcaatgtaatacattatatcatcagtataaaacaaataaaaatgtgattatattagttgatagagaaatagcatttgagaaaatttaacatctgttcatgttaaaagctgccagtaaacttggaacataatagaatgtttacaaaatttacttaacctacctaacctcatatttaataatgaagtactgaaagttttctcttaagatcagaaaaaaaaaaaaaaccatgaatgtctactctcatcattgatattaagcattatactggaaatcctagccagcataataaggcaagaaaaataagtaaaatggcacatatatttgagatgaatttccaaggtgttcctcgtgcttcttgtatttggatgtctaggtctctagcaaggctggggaagttttccttgattattccccaaatatgttttccaaaattttagatttctcttcttcctcaggaacactttaggtccctagttttggttgtttaacataatcccaggctctttgaaagctttgttcatattttcttattcgtttttctttgtcgatgttggattgggctaatttgaagacattgtcttcgagctctgaatttctctcttctacttgttcaattctattgctaagacctaacagaacattttgcacttctataagtgtatcccatgtttcctgaagttttcattgttttttctttatgctatctatttccttgaatatttctcccttcacttcttgtttcgttttttagatttccttgcactgggcttcgcctttctctggtgcctccctgattagcttaataactaacctcttgaattcttctgcaggtaaatcagggatttcttcttggtttggatccattgctggtgagttagtgtgatttggggcgggggtggatgttaaagagccttgttttgtcattatcagagttggtttacttgttccttctcatttgggtaggctctgtcagagggaaggtcaaggggtgaaggctgttcagattcttttgtctcacagggtgttcccttggcgtagtactctcccaattttcctatggatgtggcttcctaagagccaagacccagcaagtttaccaggctccaggactggtactgggggttgtctgcaaagagttctgtaatgtgaactgtctgtgggtctctcggccatggacaccagtacctgttccagtggaggtggcaggggaatgggatggactctgtgagggttcttagctttggtggtttaatgctctatttttgtgctggttggcctccttacctggaggtggcgctttccagagagcatcagctatggtagtctggagaggaaccggcagtgagtggggccctagaattcccaagagtatatggcctttgtgttcagttaccagggtgggtagggaaggaccatcaggtgggggcggggctaggcggggctaggcgtggccgacctcacactctccttgggcaggacctgctgcagctgctctcggggttggaggggaggttcctaggtcaatggagttgtgtacctaggaggattatggctgcctctgctgagtcatgcagattgtcaggaagtgtgagaaagccagcagtcaccggcctcacccagccaccctgccgccatta

SEQ ID NO: 23798 - DNA, 2300 bp, Homo sapien
tacatttccaagattaactcttctttctcttcatttattatataaaacaatgaattcaatttgttttgtgttttgttcaggaactttgcatctgtgttcttgagtcagattgtccttcaaatttctttctcacgatggccctgaatttttctttttctcaaaattttccaccaatattttagataaaaacccaaagacaatagtgttatgaatcattatgtacctaccaccaagcaacaactctcatgacctcaagtcctctcttgttttatctgtctctctctttctttatctctatcatgcttgattattttgaagtaaattctgaataaccatttcatctgtaaatattgtgttatgtatcttaaatgataaggatactttaaataatattatttcaatattataattacatctgaacatgatatagtcctttaacattatcaaatgctcacttttacccaattgttttataattatattttttatttaatttgttcaaatcaagatccaaacatggttcacacattttatttgattgatatatttttcacatgttaagagtgagatgttgttttatttccttaaattcacttgctggggaaatgtacttatttgtcctgtagaatttcccaccttctaaattttgctgatggtattcctgtgttgtaatataataccatccccatgtcctatattttctggaaattgccagctagatgttaaccagagatctcaaactgttttgatctcaggaccctttaacactcttaaaaaatattgaggacactcgaaaaaaaattttgttcatgtgagctattgatatttataataatatatagtaaaagagaaaagttaaaaatattcatttactaactcactttgaacttttttgaaaacatgttaacaaaagacccatatgtcagtaagtgaagtttgtcttggtttatttttcaagtaaaaatggtgttccatgaaatagtgaactaaaactcagtgttacaaattatttccctcaagacaaccattatactttagcatgtcagcttcccatttagtcatacagaatattccctctagatgtattcaagggttgagatttactgaagccaattcactaccctgattcatcaagttcaagggcattttcaagtaaaaatggctttattttgtttcttgcaagtgcgtggatatgagcaatgcaatttggtgccactgccttgattgatgttaaggcaccagaacttctatccaccatttattttgcctcatcagtgcaaatgtcaacatagcgaaaatgacgaataacactttagtataattatgaaaattataactgcacaaccactccaaacaggccctgaagacccccattggtgtgtagatcacaatctaagaacgctactctgagatatcaaactgtcagcgcagaactacaataaaccaaggaactatctcttggtcttctcacacaaaggtagctggaaggcaaatctatttaactgctgttccataagaccctggcttgcctaatgactcacaagattatttcaagcttcttttacatcttgctgtgaagttgaagtagcaacactgaaccagtgctgctgcttctggtttctattgtttctttatttcgactaatacattgtctttgccaacacatctaattttaatgcccacccaatttttatttattaatttattttaaatgttactagataaggtataaaggaattcatatgtatgcctatagaagtgagctcctggcacgttgatcaaaaacaaacttttgacatttctcataactatgtaatatcataatattttctaaactatataataccaggctcacaagactgcctttattcccttaagtttctcagaagaagatatctggaagagggtgggaaaagtgcaaacttcaactgtttgtggggaaagtgccggcctgctacagagaaaaaggcaacatctgtaacaattcccagcctttgccaggaagagtctcctccccttggcataatctttttgaaccaatgccaagccctctccatgacccctgtcccgcctacatattgccgttattcactccagtgaccatccctgagatctttttataaaaaacccagtctttgctgaccagacaaagcataccagatctcaccagagaggtaagtgggagctgagagaagatgagacctgtggaagggcaacctcacataatacaggagaacgcatgggagggtcccttcctcagggagcacaggagctctgagactcagcaaggctgtactggg

SEQ ID NO: 23799 - DNA, 2300 bp, Homo sapien
tctgtcatctatgtttaaaatgattattataaagggacaaaattatatattctccaggaaaacagtaatgtaaacggtaaaaagatccctgttcaaagtttcccttcttgttaaagaataaatcataagtgttagaaataatagtttattttaaagacgaacttccttcaagccccctcgctttacgctaataactctttgttaagccctatcttatatagctgttgaacagtcacaggcacgtagtacattccatgtccttgtaccttaaccaagatatttgtgttggacgtgctcataggtatgtcctagttcacagcctgtgccccttccttatttggaaatattattatttttgtacctattttaaaaagttttaaattattagccaatcaggttttaatttagattgtgaggtctggctccagccaatggagacaggacacagcaatagggacctcatgcgtaaggaataaatattctggtgtctcttcattctgtgtatgcccttgccattgttccatctgtgaggggcatcctttctgcagaaattaaaaattgcctcgctgagagaactttttgtctgaatgctgacttttccttgcagaactgagaaacaaacattttgcatttctaatgagtatgaaaattttttgtatagtgttttattacggatttattttactttaaactacatgtgaatagataaaaaaatataaataattagcttttttaaagcacatataaatattattagtttgtaaatttttgcaacttttaaaattcattttgtttatatatgcttttgaaatgagctcatgtttatataaatatatttagtttatttaatttaactcctgttagtatttcaaaatatattattttgtcatttatcccaattgatatagccatccttatttctgtgaacattttggttagtttttcaactgaattttaaattccagatttgctcttgttccctgattctgaatgggtatttaatgggaatttcagtaagcttttaatttcacatcactatctgtaacttcacaacaacagacaattgacttcaaaccaacaacttcatattccattactttgagcttacttaggcatcagctccctgcagttcccacctgcttggactttgagaacatctgtatcatgctagctacttatgctgaaaccttgctggaaacgctggcttaaatttacgtaactactaaaccttgtgatgtggtgtggctctgtgtccccacccaaatctcatctcaaattgtaatcctcataatccccatgtgtggattgaggaacctagtgggaggtgattggatcacgggagtagtttcccccatgctgttctcttgatagtgagtgcattctcacaagatctgatggttttataaagggctcttccctctccactctctcttgctcacctgccaccatgtaagacatgctttgcttccccttcgtctccatgattgtaagtttcctgaggcctccccatcctcaggaaagtctgtgagtcaattaaactatgagtcaattaaacctctttcctttttaagttacccagtctctggtattatctttatagcagtatgaaaaggactaatacaccttgccttctgaagtaggtcttgagaggttcctgaacctgaaagggaatggagaaatgacttaaagccaccagctaattgggcttaatcatttggactcagttgactcttcccctacccctacccatgcctaaaccaaagaaaggatcatcccacatttacctagcacaaagaaatctactcttctgctctttctaggactgctaaaggccatgggaactggacacctggatgctgcagaggaagagcaaagctcaacatcaacttggacagtttgccaacctgtttgtggtaagttgatgtcatttgtgaccactcctaatgtgtgccaggaataagctattcctgatgccagaatctcttactgtcagtgccctctgtaggccttctgatccttactccttgctccacccattgtttatatcatgtagttctctctcagaccctgatataaagctcctactctgtctgacctgacaagccacctcaagtggacaaggcacttaccaacaggtaaaggggcattacaggagaagagcatgtctaacgtgggattttctcttttcattttgaggtagatacagggtgattttctgaataaaagatcccagtagtaatgaaacttaagcaagaccaaagctgatttcgggtaatttggcctctgttatccccaaacca

SEQ ID NO: 23800 - DNA, 2300 bp, Homo sapien
ccacttaacttaaaattaaagttaaagggtgggtgtgttagctcacgcctgtaatcccagcattttgggaggctgaggcaggcagatcatgaggtcaggagatcgagaccattctggctaacacggtgaaaccccatctctgctaaaaataaaaaaaaataaaaaaacttagccgggtgtggtggcggatgcctgtagtcccagctactctactcgggaggctgaggcaggagaatggcgtgaaccccaaaggcggagcttgcagtgagctgagattgagccactgtactccagtctgggtgacagagccagactccatctcaaaaaaaaaaaaaaagattaaagttaaaaaaagaaaagaaaacattatgccataaagtatttttatcttagattttttaaaaattaattgcttgtttaattttcacaagataaatatgtaatgataccaagtatacccgactcttccctactatatcctttgttaacggaagaatatttctgaatctcttatttatagaaaaaaataggaatcattctctggttgtaatcattttaaaaggtataactactttttgtaaaagcagaaaaaatttggattaatttaacaaatgcatatgaaccagtgagaataaacaatgttaacatttgtcatctttgtttaatatcgttagtttttgtttttattttttgagacagttccctgttctatcacccaggctggagtgcagtggcacaactcactgcaacctctacttcccaagctcaaacaatcccccaccttagcctcttaagtagctgagactacaggcatgtgccaccatatctggatatatatatatatatatatatatatatatatatatatatatatatatatatatatactttttttgtagagatggggtctcgctatgttgcccaggctggtctcgaattcctgggctcaagtgatcctctcatctcagtctcccaaagtgctgggatgacaggcttgagccaccacaccaggcccatcatcagtttttatataaagaaaaaaaaaccttaaaattgttaggcaaatactatgacaaattgtaatatatattcttacatttcagatttttattttttaaactgtataagaattgattaataaataaaatttagtattaatctgtcttttaaaaccatatataaagtttatcaaatagcttataacttcttgcaactgaatttttgtattcaatgttatggctttgatactagtccaagttgaaatatagatatctactttattcgatttaaattctgtttagtattttattatattttgttaatccatttgtcccaattcatatacttatctctctttctgtgaatattcaggttagttttttcttcctaattttgcattctgattggcttttattccctgaattataaatgactattctatgatgattctggtaaatactcaatttcaccacacaatctttgacttcatactaacaaacagttgacttcaaatggacaatttcaatgaagcctgacttcatatttagctcctttaagcttccttaggcatcagctctctacaattctcacattgagaatatgtgtattttgttagctcaaaccttgttagacatgttaaatgtttagaaatataaatttaacctaccccttgaggtaggtcttgagaggtttgtgagcctaaaaagacatggaggaaccacttattgccacaagcacattgttctaaattatttggaatcagttaattcttccccatctcctacccatgcctgacaccaaagaggagcctctaaatttacagggaatacaaggaagtctactgttctctgctcctctctgggttattagggcacatgggagccctcagttgttttctgctgagcaagagcaaagtccaccttggacttagacagcttgccaaattttttgccagaaggggacctgagttgtgaccactcccagtgtgtgccgggaaaaggctcgtactggtgccagaatctcttactgtcaatgctcccaaaactcaccgcttgcccccaccccttttgcttaaatgacgtggttcttatctcagatcctgatataaagctcctacagctacctggcctgagaagccaactcagactcagccaacaggtaagtgggcattacaggagaagggcgtctctaacatgcactgtagatctaaaatcttcgggaagatacagcatgagtttctgtccaagaggttttagctgtaatgaagcctcagtgggatccaaagttgtttttcagttact

SEQ ID NO: 23801 - DNA, 2300 bp, Homo sapien
gcttgcagtgagcactccagcctgggcgacagagcaaaactccgtctcaaaaaaaaaaaaaaaaagaaaaaaagaaaagaaaatgttcttggcctaagaagagtcccaagggccattctgacttggggcaggaaggtgaaatgttttatggggctttagcaagggtacttcagccaccatcaaggatagagggactgttcctgaggattagcagtcataaattgagtaatttgaatttaatcaaaagatatgaagataaatcgttaggggatgaagtattatgcaagtggggattagttggaggagggggacattagctgaaagggcatgaacatgaaagtccagaggaaatgtcttaggtatgaagccttttgattctttcatgtgggaaatagagtaattgttccccttatacaagtttgagtgaggttcatcgcagaggagcatgaattatttgccatgctgtgctatgcagaattatgacccccatgacccttgatgttatgtaatgtgtgccctatgaatgtgagcagaacctgtaaataggatgagattgaaaaaccacaactatgttatattacatggaaaaagggattcttgaagatacaatgaaggttactaattcattgaccttgtatcaataagaaagcaggttttgggagattcctggaggggcccagtctaatcacgtgagccatttgaaagcagataattttctctgactggcagcataaggggaagtcaagaaattcaaaggccaaaaagaattcactgtcctgttgctagcttagaagatggagaggttcttgtaccaaggaatctagctgagactggcacctaagctgatagccagcaaggaagtgggaacctcagtgctacaactctacaactacaaggaactgaattcagtcaataatctgaatgagagtgaaagtttgtcacacagccaagttaaactaataaactgactttacaggggaaaaacatatatggggattagtctggaatcctcttgtgagttataattaccttctccaaagatcaaagacctggttcctctaaaattttaatgaacagatcttaacctatcttctggtgcattataaggctattttaatctatgctaaggagacaacatgaaggaaaattcttaggtctggccctattgtgttctttaattggctaagtagagaaaatgccaatgttgaaaagaaccaataggaaattctactggatggtaggatcagaaggcaagccagcaaatccagtaagggagattctcagaaagaacctggagctccttttgcaaaagatagagagtgatcttgatggttttaaaagtgtgctcaacagaggaaggaaagcataggcttttcagctacttgtgggacagtccaaattgaaatgcatgaatggtttgagaagtacataaaggttataacagggtgatgcaggcagtggtcttgtcaggaaatggacagtgcagaaggactgaccatacatggactgacagaacctgcaagtggagggtgctcagagaccaaaacaaacaaacaacaacaacaacagcaacaacaacagtatattagactacgaaggagaaaaaaagaagaattgagttttagctctgctttcttccatagtacagtattggaaaagtcaattaagttaccaatattttaaactctatttgccccactgctccaaacagggatgctccataaccattcagcagctcccttctccctgtgtctcaaagacggccctactccaggttctcactctctctgcctctactactgctggcctagcctgcataacagctgccaagattcctggaaggtctcagctgcttgctggatcttcagggctgcaggataggacatctggtttctgctgagcaagggcaaggtctgccttgaacttggaaaggtttccagtttaggggaagggacttcatctgtggccattcccaggatatgccaggaagagctcctcttgatgccagaacctcttactgtcaatgccctctgtagaaccgctgtctctcactccttgctccaccccggcttaaatactgtggctcttctctcagatcctgttatacatctctaccattacctagcctgaaaagccacctcagattcagccaacaagtaagtgggcattacaggagaagggtacctttcacaagggctgtaatctaaaatcttggggaagatacagcgtcatctgtccaagaggtgtcagcagtaacgaagcctcagtagaagccaaagttattttggattactgagcct

SEQ ID NO: 23802 - DNA, 2300 bp, Homo sapien
tacatcaagaataagaattcctgtgtcatccctaagaagtagatttttatataactcaaaaccagctcaagaaatataatatttaaacaaacttctcagtgcttggttaataagcattgttatgaagaaacaatgaaaaataaaacaaaaacaactcaactttagtgagtttagtgagtgtcattgcaaagaaaatttcacattgcacttagggattttataaccttaaggcttattacaaaggtcacactatttcaattaagaacaaaagtgagttttaataataaactgtcagcatttcaaatcttctctcctaggtatcttgaaatatacaacatattgttgttaactatagtcaccctatgtgctatcaaaagctagaacatattcctcctatctagctgtatgtttgtacgatgaactaaactcttttcatctcccctcacccgtctcagcctctggtaactattctaccctctggttaccttctaccccgtacctccatgtgtttacatattgttgtataaattttgtggaaaaaaatcctttttaacaaaataatctgctggctatatttcttctcatattatttgaggaattgcattgaattttgggtactgaattttgaggacgtgaattaaggatgagctacatctcatgacctcgtcacagacccctactataaacatctgcatacaagttggcatattacaacaatagcatgagagtcagggtctgtagaaattcccagcctaactttttcctggactggccaaactgaacctgaaccagtgtatgggcaatgtagtatgcttgtcagaggcaccaaactgctaactcaaaaataaacatgactaaaagaacttctcccagtatacccatatgaagctgaccatttgcccagtaagaatgcaatgaaaagggcttttaatgtacagccaaatggcagtccagcaaggaagctcatgagcaacctacaagtagtgagcattttgatgtaatagagacttacatgcaattcagaattatgtttacaacatcacaaaacaaaaatttagagataggctctcactctgttgcctaagctggagtgcagtgggatgatcataacttactgcagccttgaactcctgggttcaactgaaggtcctcctacctcagcctgctgagtagctaggaccacaagcacacaccaccgcaactggcttaaattaaaatataaattgtagagatagggtcttaatgtgttgcccaggctgctcttgaactccttgcttcaggtgatcctcccacctcagcctctcaaagtgctgggattatagacctgagccacagcacctggccaactgacctatgattttacacaatggctgctcttcccttctttaactattattcattcttctttgatcctcattatttgactgtagtccttcttatgtcttgttttccttcattacctcttattctatcacattgccattgtcattctccactggggaagctctttcttgctgaagactggaaagacaagtccattcacctgattttctgtaagattgtggctcatgtattgacttgtcagacaattctgaagtttcatcaaaattagctatcatgcttgcataatggccctgaaccctcactcctactcttagcttcagtaccatctatgtcctcaactgtccatgatacttataattcccgtaaatcttcacttaacacctaacatttatttaatcttactaggcaaggtaataagaaatacataggtttgcctccagaagtgggttcttaagaaacccaccagaggaactcctctttcagatgtccacattagaagatttcatatcacatttggtgccacaggcctttgacaaggaggatgcagaggaaaaagcaaacttcacctcttcctagggaaagtgttggcctgccaacaggaaagaggcaacatctgggaaaatccccagtctttgccaggaagagtccatgccaaccccaccccatgacccctgtcctgcctactcattgtcactcttcactccaatgtccctcccccagatcctcttataaaatcccactctttcctgaccagacaaaccataccatatcccaccagagaggtaagtgggagctgagagaagatgagacccagggaggagctactgcacatgacacaggagaatacatgggagggtcccttcctcagggagcacaggaactctgagactcagcaagggtgtcctgggagggctcggggatgggagagtacacagattcacaactcattcagaact

SEQ ID NO: 23803 - DNA, 2300 bp, Homo sapien
caaacttagatctctgctccttgttatccaatattctccaccctgcttatcttataccatttgggatttttttgtgacttaagaaacccaatgactttagccatagaatttttgttttgtttggggtattgtttgtgtaaataaaaatacagaagctaagctaattttatgtaatgattgatccactaccaagaacctagtatatctctacatctgctctgcctgcttcatttataattgaatattgttaaagctgggtgatggacacgtggcttattacatgactttatctgcttttgtatattcttgaaattttcaatgtaaaaagtaaaacaaaattactccagtcgggggaaatttctgtatttctccctatccttattgtttcaaaaaagggtcattttcagggcattattctaacttttgtcttatattcagacctctgcactggacttaccatgggaagtcttttgtgcttatctttgatttgacccaaattttatgtatctgacaaagtttgtcatatggacctgtggcaggttaattaaagatgaattttactatactcttttagggttttgttccttcagctggattgctttgggagaggggagttgaagatatgtatttttttttcttgtcaagagagtctgttggaaagggcatttaatttatttgaacagaggtgtcagtattgctctaaaaaccataaagcacagaagacaaaaccatactgatataaataattcacctccttctccccccaatcactgccaattatattttgttgccaggaaaaaaaggtcaaagaaatattacaaacttctcaaatttgcataggcctaactcctctattgtagttattgcaattctttcttgaggctacagtagcagttagtactggaaagaatgaaatctgaagtccaaagaaccattcttccaagttataaatgaagttttgagatattattccctcaatcccatggtgtcaccattataaaaagcaattaatatgatgtaccactgaattaatgatatttccataaaagggtgcatagtgattaaaagactctttctgattttagaaatgtgagagtatgacaaaaatgcatctgctagaatggcagaagtctgcaagtcttctgttttcataggcccaagcaacctgaaatttcttagaatgaaaagtgccagcagccataacaggttgcaacttatccaagcttagtttctgtagcccttcttaaggtgagaagtaggggagcaggttttctgagtcttatcgctttctttctgaattgtggctttgtaggggttccttgtcatccttcatctctattttaccaggttaccaagctttctacagaagctggctctttctggctacttctatcacagctttcctgtcaactgggtttttcatcaagttcttgagttttgaatcttcttcatcttatcttggatcaaatgtagtatctccaactcaattctacatctttcaccaccattttctctgttctgcccttagaaaagtgttcgctcatcctgctgagattcaaggagagtcacccctggctagtgagtaatcacatttagacatgttttgtgttgtctctcagacccttgtttggccacatgagcagctccacagagaaatggtcgatactattgtagatattatcatatcccactactcccttctcttttgtttagcatgatatgctactgtggtttatatcaattcttggctggctgtcagtgatgccagttgtgctaaaaccatatttagcagacctaaacacagtggtccatgggatagcattgaattcaatggctgccttagaggttaacacaatgagatctgttttcaaggggagagagggaaacctgacacaaagaaaacttttgagagagtcctgggggaacatcatatgcatctggtatgtctgaaacatttggagtctcctcctctgcaagtgaatacacatagcctgtactgtatgtgtcactgctacttcattatcacaaatttttttcaggataagagaaattgagcctaatagctgtcatatcatgtcttttaacactccaccctcttatgctgaaggaagctacaatcatccaagtgggaagtaatgtctaccgatgttctgatttaagtgaatgaaggtcttctttccacctcgggaaatcttgagggttatgtaacagcagctttgaaaggcttgtgagatgtactttgtgctagtccatctcaaatcttcaccggctgtaccaagaacagaaaaaaaaaggaattt

SEQ ID NO: 23804 - DNA, 2300 bp, Homo sapien
tatttttcttttgtggtctacattatttaattgcaattaaaacaaaaattataaatgtaagcctaattacaacaatacaaaaaactatacatgaatccttggaacttaaagagataaatttgtctggtcactctttggcctgtagtttttagtttattccctcaggcctgaccagagtatgaaaaagatcacaataatcatttttttaaaaagtcaattcttacgtgcatgctctacctcatttgactaggacaactttactctttccagattcttggaccattcaaattcataggtgtcttctgcctctggaatgacactgtatgcagtatccctttttatttaagcacctcgctggtgcttaccacatcttaccacatcagggacttgtgatgcctctctaaatcttattcatgcttcaaaattcagctgaaggcctacctccttcctacctactccagtccatagtatgcacttttcattctccactctttataccttttggcacaaatcatttggcgctcggcacttcatgaagcacatcgtgtgcctttagcgtgtttctcctgtttctataggcagtctaagaaaaacgctaggtggtaagagcacgcggtgtcactgtccgtggtcctgaaacatggttgcgtgctaagattcttcttaagccaatatccggtgactcctgttcactttttcccaggaatttttaaattggtaaagtggtggggacaagaaaaaagaaagccaaaaagatattgggagagaaagatagaggcatggacagaggtatccctctccagtcattccctagagagaattaaaaatagtaggattttatgtaattttcaaacaattgcagacgcgaacttggaagcaaaaggggggagggaaaaatatcaatggcatagccattgatgaaggagaatttaaaaaatgcatgcactaagtgacataaagccatccaagtgtcggcatgaacacacgcactgatgctagtggactaggataccaaacaggtagcatgttgtgaacttagcgtcggttgtgtcatactaaacttccacagattttctttttgtttctctctcttgatttaaaacaaaacaaaattgtcatttggcactgtggcagaacaaagatgactgtaacttatatttctcatctgatgtagctgtgtacctttttcactgttagcacctctgtaacagttacattccagcaacatcgagtcccagctgccgatggctggcggcgcaaacactccctgccctagctatgtaagttccccaactacagtataacctctcagaggacgaacatttttggatatctcaaaatgcctaagtacagtgtctggtacaaactaggagccaagtaatatccactgaatcaagaaaagaatcacaatgccttccacggagaaaatattcaacaaaggcttgttaaatgagcaaatattccagttgttttaacaattccatcctcttctaggttcttttaaagtccaaatctcccttcctctcccctcgggactccacatcccaacaaacctcccttccgcggcagtcactacctttgcagcactctggccctgccctcctcctgccacgtgtcggacccctgctgggctggccctcctttcctactctgcgacacccctatcccccccgcccctatcctgcccgctcccgcacccggtccctctccccgggcctcgcgactccggcgattcagctccgggtccccgcccgcagggtaacgcggttgtcatggacacggcacctgcgccctacggcggtgccccttcgccgccgtcccctccccccacctgcggcgccgagcctgccgcgcctccagagctccgccctaccccgccccgccctttcgggcgctccccaggccgcgcgcgcccgcggccccccacccagccacccctcgatgcccggtgcctttccaggcgccgcggagccacggggaccgcgggggcgcgcgagcgagcaagcggccgcgcatgcgcactggctgcctcccctagcggcgatccgggccgctgccgctcgcgcttgggcaggacgcggggcgggcggggggaggggggagcggcttcgcttccagccccgagtgaggcggagacccaggcgggcgggcagagcaggcggcaccgcacctcggccagaggcggctgcagcagctgctgcccttgtccctgccgccgcctctccagtcccttctgtgattaccactccagctgctgggaacgggcgagaaagaggaggaggcgagaaactcccaccgac

SEQ ID NO: 23805 - DNA, 2300 bp, Homo sapien
agcagccagcattaggaggatttttttttttcctagcaaccctagggattgggtggtgtgtactcacagtactcgctgaatggctggccgctgtttaaccctgcgggtgcctcctcaacacccctcccccacctcccaaccctttagagtttatggctccatcagctggcctgctgtcacgaataattgtcttggcaagaggtgaaaccacttgatggtgaatttgtttgtctgtctgttaaagtgttccgcagcaccttggaggtgccaggatgaaacatgcaaatgcctgatccagagttaggtaggcagcaagagtgacagagaggcaatcatcaagaatggcaaattaagaaagaaagaaagagagagagagaaagaaagaaagaaagaaagaaagaaagaaagaaagaaagaaagaaagaaaagaaaagaaaagaaaagaaaagaaagaaagaaagaaaaaaccatctgtgccagttgcaagctgtatgaccttggataaaccatgatgtctcttggcctcagtttagtcacgtgcaaaattaagggggttgattttctaatgtctcttctaactcctaagacagcatgtgatgtctaggacatttcagatttgtgttccttccaattaaatgatacatctcagagatgaatgaccagggcagagctcagatgaatacaaaatggaatgattcatgcccctgttcatatgacttttcctgaaaagtaccaccagtctttggtgactttgattccattggttggcctcttcagcttagatgctaaggaccaatccagttacttgtccagtctatctaccctggctctggtaatccaccctcattcctatcaaagtaagtgccactacatataatgcctactgattttgacttccttagaggcagaaacgatgggaattcaaacagtggagctggagactcacatttgactctccctaccatctccctgggcatctttgtcaagaaggaaggcttgcccacactcacttcccgcaggctttctcagccatcttggaggactttgtttaaacagatgaccaactgaccctccccagggcagaccctctacagaccagtaggcacaaggtgtgtgtgtggggaggtggggggagagctcattgtaaggactcctatctataaatgattatgaatagaaataatgaggcaaaggcttctcgtcatactcagaggaaaaagtggcacaacttagtgcagtctcaaagattaattaggatgtgtgtatggagacgggtaggcttcattatggcttaaactatcacgtccctacacattcacactctcttggagtggggtgcactgcagggcccagtaatcaccatgaacagcacaagtcagggtaagccctccccatgtcagacagtacaatcgttctttaatccactctgtaccccatatgtatctgtggagcctgatgaagccccggagggatctcagtcaagtctccctgcacacagacatacctttttgccacactggatctcacaccaccgggacttggatggcttcccaaactaggtgggtttggaaagcatttcccctctccacctcaaaaaagggctggctgactgcagaattccagtacccgcaagagggggaaaaaaccccaaaaatcttagccaagccccaaatcattgccttcctgtgtcttctctcaagttgcttttctaaagcaaaggtccaaacgttgatttctctacagattcctacgtatctcttacacgtagacagttttaaaggggaaaagaatatatccccaaaaggcaagggggagagcacagaacatttcagtttcccacttggaaatatcttgtcgtggatgatgctacccctacctccacctccctcccccctcctttttttttttttttttttttttgaaatatggacaaaaaagctgaaagtgttttccgtttcatcaaaaaacatatattactttagtggttcggtaaaatgttggttttatgcccaccccttttcaatctgcccatgtctgaggtgctcggggaagacgcacaatcgtgagcagcttacgacactcagtgagcagtaggtgcctgtgcaagctcgcgccgcacactgcctggtggagggaaggagcccgggcgccgctcgccgctccccgcgccgccgtccgcacctccccaccgcccgccgcccgccgcccgccgcccgcaaagcatgagtgagcccgctctctgcagctgcccggggcgcgaatggcaggctgtttccgcggagtaaaaggtggcgccggtc

SEQ ID NO: 23806 - DNA, 2300 bp, Homo sapien
caaattgtcatcctgaaagatttcacacttttcatcctcaatagttgctttgctgctttctctttgccttgagaaacccccatgataccataaattaaaacatgttttggggcccctctccttcatctggctggggccccgacctgtatttctgtctgcctttgtttattatgccttggaatcattcttcctcttcacacccatttcctcattccatcctatgaaggcaattcccacttcagaaagagggctggcttggggccttcaagattccttctgggagtttacgtggacttaattcctgcatcttattaagtagctggccagccaaattattttcacaaagccattaatatctgaaaatggattaatccagcattacttaaaatgctctacgagggtaaaagtatttaaatgcatttgtgaaatgcacaaggctttgttctgttgttcctgtttcactctcataagaaatctcagtctcacaatctcagttgtaagaaatcttgtttttcatggtttcagccatttatttgggatttctattaacactaaaccagaacagttttgaaaacttatttaattgcagtttatattgcatttgactttaaactggctatcactttaccaagacattccaaggttcagatttcaagcattatagaagaatgctggtgcaggaacctgttttatgtcataattttatcaattatgggggatacctagacaactacagttcttctacttgctattagcaaatttcaccttctcatcctagccataaataaaggaactgttagaaatgcttgttcctcattgccacaaagaaatagcattcgaacataaatttgattctctcagcaaggcagtttttactttcttcagaaagggtgctcatcgcagatggaacaatggccagagcacacctggacagaggaggggcaggagttcttactccttacgcaggtagcccctactgctgtgtggttcccctattggctagggttggaccgcacagtctaagctaattctgatgggctatttaaagagggcgggggtatgagccagagtagcggggtgagtagttggtggggacaacggttagaaacaggtaactaaaagtgacttaggtcagagcaggtgaccaagggtgactcaggtcaaagcaggtgaccagaatgagtcaggacagagcagatgaccaggggaacagatgtgaactactgattaggactagtgggaaagttgtttactgaaactagaagcaagtgggcaaagagaaccaggaagttaaactttaaaatggagaatcaaagaataagagagctgaacctactgacgtactgattttgtgaagagaaacttggggttcaatatatttaacagaaccaatttaattctatagtaagttctgtctgctctgtctctgatattccttgacacttaattatcttgttttatagaattttacagatgttggaaattttgtcctcacagataaaatgaaactctctaagaacagacatattactttctctgtgttttagaccttctaatatctacctttaaagggagaagaagatcagatgtgagagaccagatatagagacatgagaattgccacatagcactagtaaatatgttttctcttctcttagtgcagtctgcgtagttctgggtttgtaaacactctcattgaattgagtttattaactagtttgaatgcttgcctaatcaatagcctgtggaatctaaattaaatataaaaacctctatattacattgacatatagacacaagccattagcccagcaaagccaaaactcttgagttgaagtcacacagattaatgcctttatgtgtggcctcctgttgcagatctattagttgtaggaaatccctcaccatccataagcaacaggtcttcagtggtaaactaacctgcctagttagatgcatttatctcttcattcaagctgtctcactcctcaatctctgacaagaatcttgaaaatgcctttctaattatttaacatacgtgtttgctgctattcttgtttttgttcatttgttgtaagtcagatggaattttacccgatgagaagcagagttagataaaatgtggtgcctaccctgtgtgttcacagttctggagtggagatgatgagtaacaaaccaatattattcatgctatggcagagatgtaaacaagagctgtggttgaagagatttttctagctaattgagcaagaccaggtagaggaaggaagacgaattgaccagatggatggatggagaag

SEQ ID NO: 23807 - DNA, 2300 bp, Homo sapien
ttgattttcgttcaacctattctcctaattaatggtctgaaagagatatttgactttccaaattcgcctagtccttgttcatggatttcacgttgtgtagacaattggagaattttttaatgcagttggtggaaactgatttctgttggcctttagggaaagcataaacttttgctttttgtttttttctctttccaacccttgcaggaagagattctaacattatactcctggtgaaggtctgtcctttacaaagaggcaaaagttgtttcagtcccttggtacattgacatgtacctgtgagattctccaacattgaaggtttattttctcccgtggttggtggttaaagacctgcctggggcctccttctttctggggtgggcctgaaacctcagagctaggcagaaatgtaggtaggtcccagaaaaagtatctacaggatgaatggcttatcttctactttatatgatgagaataaaatatcatttcttatctccgctcttccttagcgtcatctttctttgtcactttacattaggatagtagcaaattcttagaggccatgtaaacaaagtgtgggcctaagggataactaataagataagactcagtatttattcaaaaggggtccttacaggtttggatatctcacaggattgtgatgtgcaaatagagtttgggactttaaaatgtatgcatatatagtaatacacagagcaaatttacctggactttttctttggccatatacctacacatttttagtattctagaattatatctgccatattcttttttctatattaagcataagaaatgtgtggattagtaaactaggggcagacatgcacaaagtcctgggctttgtaaaggagtcttactcctcaagcagttttcagagttgcgtttaactatgggcaaaatcccatgcaaaatttttgttcaataggacattctggaaaccacttaattttaaaagaatatgtgtctagttttagagttaaattaggctttcgtggaagctcaaattgcaatgacaaccactattctcatgtgcaaatgtatgcatttagaaaggatattgaattttgtatctaaggtaattagtttttggtaggaatgggattctttactggagatgcatttactgtgctgataggttgcattatatatggagcatggcactatatcaatatatttatagctatttcaattttcatatttactgctaggattggagaggaggtgacttgcttttgacaatgtaggtgtttaaggctgatattcatattgagacaaacattattcactatcatattgaggcaagcattattgattctctggaggttagaaatagaagtatttccagttcaaagtatttatcctctctcatctattccaaggattctaaaaagtttatctgttgtaaaaacattctccaaaataattagaataattattctattagatttttctattaggacaatatagcatgatctttcctaaaatgtgttttctttgtttctgccttgaatctgattcagcctttgaaatcaggtcaagaattccgatgttcaagatctggtcatttattttgttttcaaactcgaatatatgcaaaaccctacccataacactgaagggctattaccaattcccctaaccaccaaatagtcttaatcctccattttgaggaagcatcagttctatcccagctctgctgcccataaaaagatagcagcgcgaatcagattctctcttccccacagaaccaggtttcttttttttttttttttttttttttttttgagacggagtctcactctgtcgcccaggctggagtgcagtggcgcgacttcggctcaccgcaagctccgcctcccgggttcacgccattctccagcctcagcctccagagtagctcggactacaggcgcccgctgccacacccggccaattttttgtatttttagtagagacggggtttcaccttgttagccaggatggtctcgatctcctgacctcgtgatccgcccgcctcagccccccaaagtgctgggattacagtcgtgagccaccgcgcccggcccagaaccagatttctgagacagaatgatcagggtcagagatgacatttaggatgacaagtttaagggtaagaatgttgcctatcctgggttgaaactgtttcatacaaagtcaaagcaaaaacttcaagcgaagtcagagagaaaactattgcaaagagttatacagaaagagatgagtttttttaaacaagcaaactgaacaaaggt

SEQ ID NO: 23808 - DNA, 2300 bp, Homo sapien
gctttgggaagtaccgtcattttcatgatattgattcttcctatccatgagcatggaatgtttttccatctgcttgtgtactctcttattaccttgagcagtggtttgtagttctccttgaagtggtcgttcacttcccttgttagctgtattcttaggttttttattctctttgtggcaattgtgaatgggagttcattcattacttggcattctgtttatctgttgtaggtgtatagcaatgcttgtgatttctgcacatggatttttgtatcctgagactttgctgaagttacttatcacccagatttataaaactagatcttaaagacctacaaagagacttagactcccacacaataatactgggagactttaataccccactgtccatattagacagatcattgagacagaaaattaacaaagatattcaggacttgaactcagctctggaccaagtggacctgatagagatctacagaactctccacccaaaaataacagaatatacattttttcctcagtgctgcatgacacttagtctaaaattcatcacataactggaagtaaatcactcctctgcaaatgcaaaagaactgaaatcataacagtctctcagaccacagtgcaatcaaattagaactcagccttaagaaactcactcaaaaccacacaactacatggaaattgaacagcctgctcctgaaggaattctgggtaataataaaattaaggtagaaatcaataagttctttgaaaccaatgagaacaaaaagacaatgtaccagaatctctggaatgcagctaacgcagtgttaagagggaaatttacagcactaaatgcccacataagaaagctagaaagatctcaaatcaacaccctaacatcacagttaaaagaactggagaagcaaaagcaaataaaccccagagctagcagaagagaagaaataaccaagctcagagcagaactgaaggagatagaaaaacaaaacactctttaaaaaatcaacaaatccaggagctgtttctttgaaaaaatcaataaaatagatagaccgctaactagactaataaggaagaaaagagagaagattcaaataaacacaatcagaaatgataaaggggataacaccacagaaatacaaactaccatcagagaatactataaacacctctacacaaataaactggaaaatctagaagaaatggatacattcctggacacatacaccctcccaagactgaagcaggaagaagttaattccctgaatagaccaataacaagttctgaaattgaggaggtaataaatagcctaccaaccaaaaaaagcccagttccaggtgatttcctgcagaattattctggaaatacaaagaggagctggtaccatctcttctgaaactatttcaaacaattgaagaggacagattccttcctaactcattctatgaggccagcatcatcctgataccaaaacttggcagggataacaacaaaaaaagaaaacttcaggcgaatatccctgaggaacattgatgcaaaaatctttaataaaacactggcaaaccgaatccagcagcacatcaaaaagcttatccaccatgatcaagtcagcttcatccccaggatgcaagcctagttcaacatacacaaatcaataaatgtaattcatcacataaccataactaaagacaaaaaccacatgattatctcaatagatgcagaaaaggccttcaataaatttcaatctcccttcatgttgagaactctcaataaactaggtatggaaggaacatacaacaaaataatgagccatttatgacaaacccccagccaaaatactgaataagcaaaagctagaagcattccccttgaaaactggcacaagacaaggatgccctctctcatcactcttattcaacatagtattggaagttctggccagggcaatcaggcaaaagaaagaaataaaggtattcaaataggaagagagaaagtcaaattgtctttgtttgcagatgacatgatcctatatttagaaaaccccatcatggggggggaggagccaagacggccgaataggaagagctccggtctacagctcccagcgtgagcaacgcagaagacgggtgatttctgcatttccatctgaggtactgggttcatctcactagggagtgccagacagtgggcgcaggccagtgggtgcacgcaccgtgcgcgagccgaagcagggcgaggcattgcctcacctgggaagcgcaaggggtcagggagttccctttccgagtca

SEQ ID NO: 23809 - DNA, 2300 bp, Homo sapien
cagtccatctccctggccttccatgggcaattccaaggtgtaacttatactccaaagctcccctgcagggtcaggctgtagctaccaccctcaggatgttgcctgaggacaccctcttgctgggtttcctcccttccactgtcctgcacctccactccttaccaggctccatgggagcccttccttaatatatcacttatgcatgaaccctaatgttagtccctgcctctgaggccttcaggtgtccagtctctagaaagggagatggtcaagagaagagaaaaagacagtgggaaagaatgtggaaaacatatcatgctggaagggaacatgggaaggacccaagatcaagactcccaggactcgagagggcttccaggagacaagggaggctgtgctgatgctggaaagatgaataggaatcagtccagcaaaggcagagggcatttgtgacagagaaggcaatcagtgtaaagatcctgagaagagcaacagcagagctccttagggaaattgcaaacagatcagtatggctggagggcagaacaccagaagggctgggcaggccataagaccacaggtgggcactggccacttcaaatggcttagtaagccaggatgggggatttggagcatcctgacaagccttgaagtgcctttgagcatccctttggcagcagtaaaaaaaatggattagcgaggggcaagataggagacaagaggacccattagaaagctgttgaagtaattcagccatgagacgacagtggcctgaaataaagtagcagaagtggggccagagggaggaaaaggattaaaactgagagatcaattgtgatatcaggagggcaaggccagtgaactgggcaaggcagaaggcagacagagtaggtgggcaagttatgtgcagtaaagaggtggagatgatgaacagagattatttttgaacagcttaaccataagaagaaggaaacaattcagtgtcaaaaaagggttttgcaggggctgaagggggcagcctttaagatgaaagagaactggaactcatttataaagttacaaggaaagtgagatctacccatcaaagtttctgcccatttctctctctgcctttctcgcttttattttcctttttacttagatgaagacttgttgtcatgttatccttaagatgagcacaagaaattccagcagcaagaagataccaggacataaaaactatatacttcaaaagttcagacttaattcctgttcatatattgcattggataaaatttgtttttttttccagtccagccctggtaaaaaggccacaatagcacaagcagtcctgttatggctgcagaacagaaggtgggaggaaaagttcaattagaaccatgccttcctcagcccgataatgggtttaacatttgcagagggttcccaggcaacaacccctgccattccacaccctacaaattgggaatggctttttgttgcaggctgagaaagcaccacacaaaaggtcccaggcagcacagctttttcatgtttgaagggtcgtcagcccagccccatctgcctcccaaagcatattcccctcttctctttaccttcccacagatgacacttcggacagctcttttcaggtaagtccaagagaaaaagtaaatgctaggcctggtgaagtaatttctcactcaggttttgcaaaatgcagagaggctacaggtttccccaaatatactacaaaaatctttgagtctcaaaaggggagactgtcgacggtgtgaagggaagtgttttcaaagataattcacctggacatttgcctaggagttttgcaatttacaaaatatttcacacacataattttattggatcctcacaataatactgtatttttcttattctatagatgagaaaacagactcaggtcttctccttggacatgtggtccattgctctttccaccattccacactgcttctaaaaaaaacaaaaaaccaggatggcatctgttgggcggggctacggggcttgtgatgccgcccgctgaactttgtgacacagccgcttgcggagacaggaagcggtcgcagcacgtcaggcccgccctcttccgcggccgcggtgggaatggaaacatctgccccacgtgcaggaagccgggtggtggccacgacagcgcgccactccgcagcgtaacctcgcagatcccctgcgtgtgtcctcgcaagactagctcaccgaaatggccgcgtccagtcaaggaaactttgagggagatattgagtcagtggaccttgcagaatttg

SEQ ID NO: 23810 - DNA, 2300 bp, Homo sapien
aacgttctggtgtttaacttttatcctgatgctttggtaagttgtttttgttctttctttatgaatgagaaaactggtacaggaagattagtaacttgacaatggtaggtatacagcaaacgaactggggtgagattcatacccaggtttgtctgacttctccatttcaccatggaaggatgaggtgtcagattgaaggagttaaggacaaagagtcatcaatcctgggcataggctcagactacactgatagcattctaactggcctttctgtttttagacatacctttcatcatttttgtgtcctattttcagactacacttccccatagtcttttagttgtagttctctccacttaaaaaacaaaaacaaataagcctccaatggctctttgttaatgggacagatgcaaatttgtttgccattctaggctcaacaaagtcttgatcctttctagtgcaacaatattcccactttttggggaacaggggagtggaatcaaatacaaattaatgccactcaaacatgagattctcatattctatgtagatcttatgagtgaatgagtaaataatttgtggagtcttttctttttaattctataccataggtactacagtaggtgccaggcataccgaagttagtgaaaatataacctctgtgttcagggaattcatagtttagtagaagaacacacggggaataggttatagccagtgtgctgaatttaatagtagaagggtgtaaaaggcacaacagggtcactgatgagatgatcacctatgagggcatttgtggggagggtgggagggagagatagaaaaggcttatggggaagaggaagctagagtcagatcttaaaagttaagtaggagtttgccaagcatccaaggagggtggagagcattctcagcaaaggcacagagctagagcattctggggttactggaagataaggagaaagggaggaaaggtggcagatgaggcaggagtaagcagtgtctgaccatgtagctccttgcatgctgcatcttagtgggaatcagggcagtcagtcgaaccagagtagcagtcattcactgccatgtactactcacagtgcaaagaaaaaaaaagccagtttcacttatgagtgtccttgatgaagcaatgcaaattattaattttattaaattatgaccctggagtcagtattttgtgataaaatgggaagtaaagcattgtcacaattgagttgtgagctgaactagctgcccttttcatgggacaccaattttacttgaaagaatgactggcagacgaactggtaattcagacagatctcttctcaataatgaacaaagtaaacctgctgtgtcaagggaaacagttgatagtatttgttgctaataataacatttgaactttcaagtgaatatttaaaattttagaaaatttgcatctgcaactgtgagcttgacagcttcctcctacctagaggcttttctaatgagcttgatggtgatactgataactgatttgttgttattaaatgatgaaacatgtcagcatttggaagatctgcataactcagtgaacccatacatatttcctaactgaggaatgcatgttacaaaatcactgtggttaaaagatcactcaaagtgcaagacagattaatgagttttaaattaacaagggacagaaagttcactgctatggtttcagattccaacattgcacctaacctgtaagaaattaccacttgagagatttggttagtatcaaagaagaatactcccaattatctgtaaggcagtcatttaaaatacttctgccttttccagttacatatctgtgtgaggctggattttccttttatacttcagcttaaataacacactacaacagattgaatgcaaaagcatttatcagaatccatttgtctttcattaagttaaacattcaagagttgaaaatataagtggtaaaataacgcaactcttctcactagaatggtttttaaagtgttaaaatgttatttttaagtgaattaacaaatatttataaaatttgttttaatttctaatatactaaatatcattagatataatacatatcaacaaaagctctttgagatcgtcaataattcttttaagtataagggatccctagaccaaatgatctgagaactgctggtctaggggaagatgatggtacctaagtgaaagctctcaggttccacttgtgctcaagttctgccttttcagtcctctctgttttacctggttccttattatctctggacttctgttatgaa

SEQ ID NO: 23811 - DNA, 2300 bp, Homo sapien
ttctcatggatcttgtgctttttcccctcagggcacctttcacagccagcaggcattggaatatggcaccaaactcgttggaggaaccactccagggaaaggaggccagacacatctgggcttacctgtctttaatactgtgaaggaggtaattagtggtacctgagtttggcaagacaagaaaagcaagggaagagcgagcattctttgggtagagatcttaattatgtttttttggtagagtcacttgctatttgaaaattcagtaacctagagaaatttgaattgccatcaaaaccagtgtgttatttttgtttctaggtatgaatcagctattaagggaggaagtactgtggccaggcttctgttgggctttttacgctttccttacctttcttcttccagtatgttagtagtacaaatgtcagcaaccaccccttaattcttcctgagtggggactatgcagtaggcactgtgctaggtgtttcattcaaattgccctgttcaggcctcactacaaccctcggaggtaggtgctgttatcatcctcattttaaagataacgatgttactagtgcaaagaggttagagatcttgcccatggtctcacaactgattaagtggcaggcttaggatggcttggagtagagtggtcccgtgtgaagaaactaaattgtagagtcagatttacaaatcacagtgtcctagattctccgcaaactgctgatttcttaatagttaccttttaaaatgatttttaaattaaattttattatttgttacaaaactgataggtactttttgtaaaaattcagacgatacaaaaagtaagtaaagttaaattttacagtgttttcgaaatctcagattttgcctctgtagggagctaatttaagctcagtgtgtagtctttcattctcttttgactcttatatgaatatatacaaaactaatagtatttaaaagaaactatagtgtaaattcttgggtatttaattttaaaaatctaggaaataaacttagttctttgggatgatgtgttgatcagccttaaatgtattcttcctctcttcttttgcatatttttaaggtatgttttaaagcattacattttttaaagcacaaatttaaagtccttcctgccttaaattctattatggctgattttataacctcaaaatatagagaggagatgtttttttacaattcctctaggttgacttttcttttgtcatgagcctctttttgctttttttttttttttaaagaaagttcttcttgctaagcaatccatttataatttatagtgacacaaatagttgtgacatttggaatattctataagttttttgacagatattgtttatttttcacccgttctgctcttacaaagggctttttgaatgagtagggttggtacctttcatccatatgacgtcccagcacaatatttgctgttgtcacagtatagcttctggcagtatttgtagactttagaggtagaaaactatgtaatgtaggtacttttcattaaagtacctacatccccatgatgtgactttttttgattccatactagttttaatgttttttgtgtctccccctctgttatcatcttgaacagagttttaaaaaattatttttaacccccggcatcatttgtggatgatatgttggcattctttgactctgttcactgtcaggctgctttcagatttactgacatgccatagagagtgagatgtcacagaagctttcaattcacagtggcattcaaatgggctgagaaagggctatgcttgattctgttctactctgacagtgtagcaaatttgagaatgggaagaatgctatgtctctgggtagtgtccttttcttaccccaagacattattaaaatgatggtattgaatttattttacaatgtttatgatttaacaaataataaggtgcttcgtcgttaatgtttcaggccaaagaacagacaggagcaacggcttctgtcatttatgttcctccgccttttgctgctgctgccattaatgaagctattgaggcagaaattcccttggttgtgtgtatcactgaaggaattccccagcaggacatggtacgagtcaagcacaaactgctgcgccaggaaaagacaaggctaattgggcccaactgccctggagtcatcaatgtgagtgcaaaaaaacaaaaagaaactcagattaagcctctcacaaggctaaacagctttgagtgaatgcgagtgtatttgtgtgtatgacctgtgagtgacttttttttttaac

SEQ ID NO: 23812 - DNA, 2300 bp, Homo sapien
tgagggttgggctgctattttttgtggcccaataatgagatgtagatgaactggggaggaagagagtttttatttctgcaaccgattacagggagaaggcctggaaattatcatcagaccaacttaaaattacagttttccagagcttatataccttctaagctatatgtttacttgtaagtgtgcatttatctaaagacataagtgattaacttcttttaatctataactaaggtctgagtactgaagaccatcctctgaagcctcaataaatttacttaatctacatgggtttaggtgctggggtgattacccttatcttatcccctgctaaatcacagaggtttggagagttctttcagacctccaataaacttgtttgtggaggcctggggagtttcttcggacctccaataaaacttgtttaatcctaaatgggtcctgttaagaatttcttcattaatttgtcatgcttcaaggcccaggaaaggcctaggcaaaacccttggtgggtttctgttacatctcagcctttgtataagggcactggcttttaatatttaacttaaccactcagtcagcactgaaacattgttatggaggcctgcgttagtgagacctggtctgccacaggggtgcagttattacaagaggttgaaatatcctaagtccatcaaacattgcctgtggatccaaaaaataatctatatactactatttctcctatatatatcaattcaattcaacgatgagttatttgtgtaaggcattgttctaggtgctggggatactccaggatacaaaacaaacaaaaatccccgtcttcatggaaatacaaattttcattaaaagtgtactgaaattatattttttgtcatcatgcattttatcaattaaatgaaactaaacatataacttatcaagcgacagctcaggaataattttgctatttaaaatagcaagggattttctatttatttgccataaaaatgtccattttgttataatggatatatctggaaaccactgatactatttaactctgaggaatttagttatcacaagaacatgatccatgagggaggagtttatttgcagtgaagtccaacctgttaatgacaatatttggatcataaaggaagtattgggcaatctcctggggtaatcccactcatccatcccacagctcagtgccaattataatgactacctaagtaaattaggattgcaattttattgacaattctgatgaggaatctcaggagcacgattttcggcagagacgcagattacttcatctcttgtttaccttttgactctgggactctctgaggttccttctaaagctgttacagaagagggaactgtttgtccaatcagggagcaaagtcacatttgacctcgaatttcagcccttaggatcctcagggaataaacactcatgcacttagtgctagtcaaagactgcatgattatttaactaaaaaaattcacattccaagaagttaactgtcagtaagataggttttggtctttctcatcacatctttcccttcacaggccaccagtgccagttcgaattcccgtccccagcggcaacccttccgggtccaggcacaggtacgcggtgagaaatattattctctctaatagcaaacgaggaaaacgaagggggaaggagatgggcctgggatacaaagttctggcactgctcttcgcacctcacctcgctgtttcttccctcctagtcttcaagtcccttgtctccccggtctcactgccgctcttccctcgctcccttcccgccgcctcactcaaaagctacgaaccagtcgcggccgtcagactacattgcccacaatgccacgcgctggccagtctcgcgtggggttttccctcagctgctgttataattaatgttaatcaaacccacatttctaggaaggagccgagttattatctgcctctccgataggatgcctctttgtcttcacctgccattcccgctgtttcgtgaagaatcctctgtaaagggaaatttgttcaggcgactgctgtggccaccctctgcctcctccggcctctgcccctgggaggtccccgggggcctgggagtgtcattggcgtatgaccgcaacccttgccgctgccgctgacatcgctaccatggtctccggcagcagcggcctcgccgccgcccgtctcctgtcgcgcagcttcctccgtgagtccagccagtactgtcttcctggcgcccgcgggttattggccccgccggacccaacctcctggcccaggcc

SEQ ID NO: 23813 - DNA, 2300 bp, Homo sapien
tctttaagcctcaatttcctatctgtggaataggtataataatacctctaacataaggttattgcaatgattagtggaatagcacccatcacaaatggcctggtatataaatcttaacctaatgctaaaaaaattttaactgcatttccttttactattaaagatgtgaacttgtgagtaaccatttgtaacctacttctttagctgtgaaatgggaatttcatgtttgttagcagtacttaagaaaatgaatgggaaatataaagcacagtacttggcacataagaaacaaccaatgaaatgtaacaattatctataagaactataaaaatagcaggctatacacaaagctgctacattgatttagtaagtggtcagttgataatgaagataacatcttgccacattaaaaaataagcttggagagatttgatgagtagtgtttcatatagtaatatctttgtaaaactatgtctgtgtcttccaatcctcccacccccacttcaccacagtcacacacacacacacacacacacacacacacacttcttagcttttggaatgctttcagctgcacatggtaacagttgtgtacaatccaccttaatctaaaaaagggagtctaggattgaggagcaatagatttgtctccattgcataaactttgaagggaacagattaaaattttcactgcacatctgaaatgaaatctattctgaggatgtgtctaacattgcttgttattataactttatgcttcgatgtactgagttggctttgaatttctttttccattattagtttatatcaatgattgcattttactagctgactagttttgtgtgtatttttcatctctggggaattaatctttattttgtctacatttgaagtttttcagaatttttaaaattttttctaaactgactttactctcttgctgtttccagtttctcattagggattgggagatctgcattctagttttgtctgtggcacaactagctgcctgacctggagtaaagcacttgctttctctgggcttcagttcccttacaaatcaaataggggagttggactatgtgacctgtaatctccattttagctctatctgtgatttagagaatcatactaccatatcaaatacataactgaatatgttaagattgagaagatgcaggctgtgagtacaataatgtaaagaacttcacatagagcaagaaacaaatatcaaggtaacaaagagcaaccgaaaagagcaaaagaaaatgatgattatgtcattttggagacaaggttgaaaaccagagctcctccatgtggtgtaaggattcatcaagacaggtgaaaggatttcttcccctgatcagtaactgggataaggcatcccgagtaagcaacaggccctggccttcgatggggtcgctccatacaaaattagcaacagtcacttgggaacttaagtgagattaaacgccagaataagatccagggtctgctttggtagaaggggcacgggaaccaagtaatacgggctcatcctatgcctgacacctaggttaccttccaagtggaaaaggacattagttggaaggccacagtggagtttaagggaagaggaggccacatttcttgagccttaagacactcgggaggaggttggcgggtagggcagggatgcagagtggttgcttccttggagagtgggacctcatttgtctacacaacccacattcctctcctgaaattctcgactctttcggataaatttctattaaagtgaacgtcaagtcagtcttacgcctcttgaaggaaaacagaaaagaaattcctgtaagaggttgagatgggtgtgagtggtcgataagcaacgaagcaaacagaattaaccacctcctttggctgctctgcctacacctcctggcacagtactcaattcccagcgcagaggaggaaccaggctgtgcggcttctccaacaatcagcgaagtaggaaatgtttcggagacactaattggctcgattgcctggcgcgctcctggaccgaaagctgtggctggttgaggcgttgcctggcgacgtgttactcagtggcgcagtgcttccgtagaggccagctggttgctacgcagcaacaggaaacattccgcgctaccgagtactttctactcccgaccaggcattgctctctctggagaccctcggcggtggttgctgtattttgacttggtgagtcctgggaaccgaccctcgggcctgggctccgatttctgggccagaaacaaagtctgactttcgga

SEQ ID NO: 23814 - DNA, 2300 bp, Homo sapien
accagggttctcttttctccacgcccttgccaacatgggttatcttttgtttttttgataacagtcaccctaacagttatgaggtgacatctcattatgtttttgatttgcatttcccttatgattagtgatgttgatcattttttcatatatccggttagccctttatatgtctttttctgataaatgtctattctcttcccttactcaagttttaattgggttatttggtttttgctcataagttgtaggagcaattagacccttgtcttacaccatacacaaaaatcaactcaaaatggattaaggatttaaatgtaagacctgaaactgtaaaatccctagaagaaggcataggggaaaagctttgacaatggcgttggcattgatttcttggatataacaccaaaagcacaagcaacaaaaggaaaaatagatcaatgggattgcatcaaacttaaaagcttttgcacagcaaggaaacaatcaacagagtgaaaaggcaatctggggaataaaggaaaatatttacaaacggtatatcttgtaaggacctaggccgactcttttgactccaaattcaattctacttccaagcaatactacatttttaaagagtcacccttaaaacagaaaaataaaacaaccttattgaataaaacaactttattgaaatacaacaactttatatatatttatatgtaaattttcaatatttatttatcaaataaaacaactttattgaagtaagagaaaacactctcatgaaattcctcaaagaaacttcatctccatagcttcagaaaagaggaatgactccctaaaaaaagttcctttgcctctgtgtagaggtggtccctcatcagggttggcccaagtgacatttcagcacaatggtgcaaggtcctcagaggcgctgctcttccttgaaaaagatttaattattaaggtaaaactcaagtaaaaatttagctaactctttctgaaaatgttttcatttaaccagtcattggctagcttaaaatgctcagattttctgaatattaatgggaaaaccacccctaaaactgaagagtatcacctttaaccacatttaatttttagggaggacactctcctctagagaatcatcacatagtggttaagaacgtgggctttcctcgaggcaaatgtctactcaggtctcatttttgctgcttcataactctgtgactgccatcaagttacttatgctctctgaccttcagtttcctcaaatgtacaataggggtaaagacagtatatatttcacagaagtcttatgagaattaaataaaagtattgtcctgtttggtcacaaaattatagattcttaaaattagctggtttttagcaatgtctctccaaattgaatggtgaaagagataatgtatatatgtaagctgatattggaaaattcaccatgacaattttttttatttgtagagattaaatgccctagctgcaatagttcaaggcagtcttcctaaattacacagaaacatcctaactgcattgattactattgatgtgcatgcaagagatatagtcactgaacttgttcaatccaaggtaactgtttcatttaagtaaaattatatacttctttctgaaattagtgtatctaatatgtatatcacatataggtggagacagttgaatcttttgactggcagagacaactgcgctattactgggatatagacctggataattgtgtggctagaatggcgctctctcagtacacttatggctatgaatatttgggtgcatgcccaagattggttattactccactcacagtaagttattgatcacttgggttaatattgacacaagagtgcttttcaatcaaaagtcttgaaaagtttcatatgacattaactcttgaaagaatttattatgaatacatctttgtaaagcaaatatttgcattatttaattatgtgcatggatcttttggtgtatttcaattgctatatttttcatagaaaataataatccttcccccatagagaggaaatgccttaatttgtggccagagttggttcccttcatattgataatgcattgctttcttcaggatcgctgctatctttgcctcatgggagctttgcagcttgaccttgggggtgcaccagctggtcctgctggcactgggaaaacagagactaccaaagatctggcaaaagctcttgccatccagtgtgtggtctttaactgttcagatggtttggactacaaggtacagttcttgcatctgaatattaacattaagtgtt

SEQ ID NO: 23815 - DNA, 2300 bp, Homo sapien
gaaggacatcttggttttggcaattatgaattaaactcttaataagcattaatgtgcaggtttttgtgtggacatagttttcaccatatttgggtaaatacctaggaatgtggttgctgaattatttagtatatgtttagctttgtaagaaactgtcaagactgtcttctaatgtggctgtatcattttgcattcccaccaataatgaatgagaattcctgttgttcacatccttgccagcatttggcattgtcagtgttttggattttatgcattctaatgggcacgtagtagtatattgttttaatttgcaatttctaatgacaaatggtttgagcatcttttcatatgtttgtttgctatctatgtatcgtatttcatgaggtgcctattaaggaaggtctttggcccattttgaaattgggttgtttgttttcttattgttgaattttaagagttctttatatattttgaattcaattctttatcagattatatcttttgcaaatattttctcctagtctatggcttgtctttttattttcttaacaatactccggtttctcttcagattgtataaatatttcatcttctattctcttaacagtgtgtttcacagagtagaagttaattttaatgaaattcaacttaccagttttttccctcatggatggtgcctttggtgtcatacctaaaaagtcatcaccaagcccaaagtcatgtagattttctcctgttatcttctaaaaactgtatattttttgctttacatttataatccattttcagttaatttttaggaagggtataaggtctgtgtctagatttgtttttttgcatgtgtatatccagttgttccagcaccattttttgaaaagactgtcctttctccatcagattgcctttgctttttcgttaaaaatcaattgactgtacttatgcaggtctatttctgtgctctccattctgttccattgatctacttgtccattctttcaacaataacccactgtcttgattactgcagctgtatagtaagtcttgaagttgggtagtgtcagtttttcaactttgttcttttttgttgtgttggttattctgggttttttgcctttccatataaactttagaatcagtttgtcaattaatccacaaagtaacttgctggaattttaactgagattgtgttgaatttatagataacatcagagaaattgacatcttaagactatttagtcttcctatccatgaatgtggtatttctctccatttatttagtagttctttagcttctttcatcagagtattatagcttgtcttatatagatctagtacatatttatagttaatttattttggcactaatgtaaattgtgttatatttttaatttcaaattccaattgctccttgctggtgtataacaaaatgattgacttgtatatgttaacctcatatcctgcaactttgctataattacctatgagttccagttttatttgttttgttttgtcaatttaggtagattttctacatagacaattatgttatttgtaaacaaagacagttttacttcttccttcccaatctgtataccttttatttccttttattgtcctattgcattagctaagacttcaggacaaagttgaataagagtagtgagaggggctgaattcacttttaaatatttggaaattatttttctaccttacatagatactaaaatgttgtcttctgtgtttcttctttttcattgttaataattgtgaaagaacatcagtatagaagagtgcatgaaatatgtattgacagcttaagaaataattatgaaattaacacctctgaacccattgccagaccaagaaatagaacaccatcaactacccataatttcccccatgtatcccttcccagtcataaaaggtttccttaaaatttaatttgtttaatatgttgtgatagttatagcctttggtctaaaggtcactgaatatatagaaatatccagattttaaccaacctaattctaaacttaattatatatttatcaggtcttgctaaactatcatttgtttcattttcagctgactgaggaaacccaagaatatatattgaatcttttccaacgttatgttgatgaaggtttacattttatcaataaaaagtgcagccaagcaattccacaagtggacatcagcaaagttactacactctgttgcttattggagtccttgatacttgggaaagatggagttaacttggcaatggtatgaagagttttcttattgctatgaagcta

SEQ ID NO: 23816 - DNA, 2300 bp, Homo sapien
tggggtatcagccaaactgtgtacagcctatgttctgcctctggctatgcaactttgagcacattagtaacttctctaagccttagtagaaaataaggctaaaagaaaatctgtatctacctcttggattgtcgtggaatttaggacactttgttagtgaattcctgaaactatgatctgacacatataaagtgctcagaaaatagaagctgctgtcatcatcatcatcaggaaattaacatgacctacaattttctacattttaaacacactaaaaatggaagcacttacaatatagatatttaaattttttcagagggttcttacctggttaaatgcctgccttgtgaaataacttgactgatatttttgaaatctgcccatttgaaccagcttttttttttttttttttgagatggagtctcgctctgtcacccaggctggagtgcagtggcataatctcggctcactgcaacctccgcctcccaggttcgtgccattctcctgcctcagcctcccaagtagctgggactatagtcaaccgccaccacgcccgactaattttttgtatttttagtagagatggggttttgctgtagccaggatggtctcaatctgacctcgtgatccgcccacctcagcctcccaaagtgctggcattacagatgtgagcccctgccccagccatgagccaagctttctgactcaccttcgaaaaacagttcttcccaggtgtctcctttaccagataccagccctttgatcatggtcaagagttttctaccacagggaagtaggtttcaaatccagcagctagagctacaccctctggacctcatctccctaggggtcctcagccctgctggccagagcaaacaagctcccagagctgcagcctccagggattcacatctggacctgttcctcactcattcaacatgctaccacagggaataaaaacagtaccatgtggtccttactctcagtgagccacagcccagtgacgtcccactgctgtggccagagggcatggatccaaacaactgtgatgaatgtcatggccatttctagagttccattatctgaacatttcccaatttgtaatatgttcacaacctgaattattacaaactgatttaacaattctgtagacgtaaaagtctaatacatgagtaatatgtgttcgataccagtaaacttagagtttataatgctcattataatataaattttcattgtcacttaggcacgagatcgggtgaagaatggtctcaccaagctactagaaacaaacatactagtagataaaatgaaactagatctttcagctttagagcctgtacttttagcaaaatcagaagatgttgaagccctgatggaaaaattggcagtggatcaagaaagtgccgatcaggtatgctgcagttcctgagaatgtggaaaaggcttctgtcagcaactgatcacttatatataatgagacacgattggatttttttattatatatgttattaaaataattaagtgatagatttagcaaagtttttttttttttagcaatttagcaatgcttttaagttgtaaacaatctccctttactaaatcagtttggctctgtccccaagaattgatgcagcccaatgaataggacagagaattgtgagaaaagcaccacctacaaatataaagcaactatgtctctcctaagatggaactgtttgttataataagtttatattcattatgctattggcatggcatagatggacaaaggagagcataaaatgcaatctagctaattccctttcatcattattctaatccaaagggcaaatatgactcactattattggctttgttttgaatattaaaattcaaataatgaggccacttaagcagtcatgtttcaatggttaggtccgtaacactgtgcaggaggatgaagcaacagcaaaagtcaaagctgaagaaacccaagcaatagctgatgatgctcaaagagatcttgacgaggcactacctgcactagatgctgccaataaagcactggattccttagataaggcagatatatctgaaatcagagtttttacaaagcccccagatttggtcatgacagtaatggaagcaatctccattcttttgaatgccaagtgagtaattcagagtcatgtattgccatgatacctggtaagagttctttactgttttcctccatggtaatgtatatattcattcccttctccaccttctcattgcttcagttggtcattcaacaaattgattcaaggagcatttt

SEQ ID NO: 23817 - DNA, 2300 bp, Homo sapien
gtcctttgttactgttgtcaatttagtcttatttctacaatataagaatagtcacttcctcttctcttgttttccttttgcatgatagatctttctccacccctttactttgagcctattggttttgttgcatgacaaatgggtctcttgaagatagatggttgggtcttatttttttatccaacttgctactctgtgcctgttaaatggggtgtttagaccacttatatccaaggttaatattgatatgtaaggttttgatcctattgtgatgtttttagctggttgctttgtagtcttgattgtgtagttgctttatagagtctatgggctctggacttaagtgtgtctttgtggtagcaggtatcactccttcatttccgtgtttagagctcttttatgaatcttttgtaacgctagtctagtggtaaagaattgccttagcaattgcttatctggaaaagcttttatttctcctttgcttatgaagcttagtctgacaggatatgaaattgttggttggaatttcttttctttaagaatgctgaatatagttctgttatctcttctggcttgtaatgtttttgctgagaagtctgctgttagcctgataggacgacctttgtaagggatctgaccttttcctctagctgcctttaagaattttttttttcacattgatcatggaaagtttgatgactatgtgtcttggggatggtcatcttatatagtatctcccagggtttctctgaatttcttgaaattgcatgtcaacctccctagcaatattgggaaaactgtcatggactatattctcaaatatgttacccgagttgtttaccttttctcctgtctcaggaatgccagtatggcataggttttatctatttgcataatctcatatttctcatagcctttgtccattttttaaattcttttttctttatttttgcctaactgggttgttttgaggggacagtctttgagctctgaaattcgttttttgacttggcctagtatgttgttaatgcttccaattgtattttgaaactcctgtggtgaatttttcaattccaggagttcagttttgttttttcttcatatagctatgtcatctttcaactcttggatcattttactggcttctttggactggatttcaactttctgttagatctcattgagtttcattgccatccaggttctgaattctatgtctgtcatttcagacatttcaatctggttagatacattgcaatcttttagaggtaaggaaacactgattttttgaattgccagaattcttttgctgattcctaattatccaagggggctagtgtttatcattttcaagtttctgtcatttcgttgaggcttttttttttgtattcctgttttcctttgagggcttgactgtggtgtatgttgtgtatagttcattggctttgtttctgggtgctttcagagagccaacactttgcacaggtttcttagttgtagctagtttcccacattggctttcacagatgttgtgtgattaatcaatggcattagaattcaaaattgtttttgccttttgggataaggaggggtactgttttttgacctaggtggtggtacatgtgcacatttgcgttgtgagaattcattgacccatacactaataatatgtatttttctgtatatgttagactttaattttttaagtgtttaaaaactgatctatagtgttgttagaagttaggataatgattacctgtgggaagaaggaaggggaaatcattgcggtggagagaggcatgagagaaatgtctctagtgtatcagcacaggtctcttctcaaccgcaggtattgatttgtgatcatttgtagagctgtatattcggtttttgcacttttctatgtgggtcatggtaaaaatatttttaaaaacaagaaataaggaaaacatacttgtactcctattggaatgaggattcaaaatgtttatatatcctaagcaagagtctactgtatttatatttcttcatattgattttgctttaaaatagcataagatgatattgtgttcttgctgttcaattcagggtgcagtcaatttcactggggcaaggacaaggacctattgctgaaaaaatggtcaaggatgcaatgaaatcaggaaactgggtatttttgcaaaattgccatcttgctgtttcttggatgttggcaatggaagagctcattaaaaccttcacagatccaggtatgttgagcatatagcccttgcataataatcacatttttatgtaacctt

SEQ ID NO: 23818 - DNA, 2300 bp, Homo sapien
ttctgttggcaatccaagctctgctgtagaagcagtgggttcaacaacccacctgttaagcctgctcccccaccctaagtgagaggcagcttcccatcagttactttctgggacccccaggaagagtaaggactcagcactcgcttcccctcacaggctcctttcctcttcaccctgatatgaaaggccccaggtgcttccatttctagacaagatgaaggctctcagagtccagtgcatgggaggttgatgcagtgagcacaactggtagagcaaatgagcaggataagaagaagttggcctatgatgtcagttccctgttctgtggggcttcatcacaatccttggaagagcctgtgctttcacaaaagggcaggccaatcctgcccaagtacggaggattttccccttccactttaggatgaatctgtgtgaaaactaaccaagtcccagccaggtgcatttgagcctctgccacctcaaaagcagaggttggtgggtcagttctcaaatggagcagccactgtgacaaaccatcttgtgtcagtcctgccaataatggtctgcctgcttcctcggccataatgtgacccaagaaacaaggaaatcacccagctaggattgagcccttggtaggagccataccaccctcttacaaagaattggaggaacagagtcagccacagtgatcctaccctcccagtttatctctgcctccccacttcatccccatacctatcgaagttaagagcagactcaagtcgcagagaagcagggaacaccacttttaccagaaatcagtgcacaaatcagaaactactcttggtgtttcaagcagaaataggtactaacatgggcacaggaatggctgccactgcagaagtcaaagagttgatatcaggcatcacagcatctgtactccaaggtgggaaccctgaaggaaaaattatgccaacctcacagctacttcacgctgaagcaggggaatagagggggctgcagagactggctactgcacaaacttgtgtctgctgaagcctgcacataaccacgccccctgctcaagaaaaattccctctgcccacttttgttttccaaatatcccatgagtgtatctcattaggagaatcgaacatagcagcgaggggatttgggagtttttgcccgcctacgcctgcaatacaggtggtgcagaatggaaccaaagtggtggacatgggtcctgagtgccatcacaccgttttagtaaggccactgagatcttctgggccctagaaataactgaacatgaacccacaaaagcctcagaaaaggaagggaagccagagctacaaacccaggcaatcagccttaccctaagccagattaggggacaaatacaactacttcttattgaccccacccaagtcctggacagaccttctacccagggtttttatgggctattcagaggcccaggaccataaaggacacttgccacaggtgggagaccctgatctggaaccatggtggttaggggagggagatcacctgggcagggttaaaagctcccatttcagattcaactggggaagttctactcttacacattttatagagtcccaataagatttgtatttagaaaagacattgacaataaacatgtaaataataaataacaaaatggggattgggggtagtttgaaaaccactttcttgcacagcacctctgacaaagcctacccacgccccccaacccccccacccagcctccagcatgtcagtgagacacacacattatacaaaataaaagcatctctcaggacacagggagcaccctattcaccagagcttgaatagagaggtgcagaccacaagttccgtggcccactgactcccctgcatccagaaccaagagtgacacaaagaaagagagtggaaagaagaaagggtcaggatacaaagccagggcctgaagggatcagagctgcagctgagaagtgcagggcctagggggaggcagtggaaggattcagagggtgtgagagaagaagttgtctgcctgatatatatatatatcatgaataaaaatctatacaaaaaaaggtatttattttcatacaactcatttataatttattttcacacaactcactatgttacaaaactgtacacctgcccccaaagttggataacccaaagtcacattccttggaaagagaagaatcaacactgggccgctttttcaagagcagtctcttctggattgggcccaacaaggctagaccagaatgtggagtacaggaatggccattcttcaa

SEQ ID NO: 23819 - DNA, 2300 bp, Homo sapien
aatcttgaaagcagtgagagcaaagcagacaagggatccccaataggattaacagcagatttctcatcagaagccatgcaagccagaaggctatgggagacatactcaaaatgctgaaataaaagactgtcaacaaacatttccacatccagcaaaaatcaaaaacgaaggagaaatctgttgcatgtgagctgaatagaatttgtattctgctgttgttggatgaagtattctttaaatgtcaattagatcaatttgattgatgatgctcttcagttcaactatattccctatctgataattccagaatctctatcatgtctgagtctgggtctgatgctttcattgtttcttcagattgtgatttttcttgcctcccagtgtgacttgtaatttttaattgaaagctggatatgatgtatttggcaatgggaagtgagggaaatatgtttttagtgtgagggtttatgttaatctttctcagagttgggctgtttaatgttttgctgtggtctgaatgttccttaaaacttgtgtgttgaaacttaattattattgtcatggtattaagaggtggggcctttgggaagtgattaagacatgaaggctccacattcatgagtggattcatgctttttaaaaggactggaggaaagtagtgtaggctatttttttgcccttgtgccttccaccatgtgaagatatagcattagcccctcctgccatgtaaagactcaggaagaaggccctcagctggacatggtggtgcatgcctgtaatcccagcaccttgggaggccatggcaggaggatcacttgagctcaggagtttgagaccagcctggtcaacacagtgagacctcatctctacaaaaattaaataaaaatttagctaggcatagtgatgtgtgcctgtagtcccagctacttgggaagctgaggtgggaggatcacttgagccctggaggtcgaggctgaagtgagctgtgaacatgccactgcactccagcctgtgtgacagagtaagactctctgtattaaaaaaaaaaaaggctctcactgggcactgaatgcctatgcctagattttggacttcccagcctctagaactgtgagaaataaatttctattgcttataaatgacccagtctgtggtattttgtaacagcaacacagactaaggcatgtttgctgtaactctaggtcccagaggcttcagtttcctctagtgacctctagtttttcctctagtattttttgtcttgtgctttcttaagaaccttcttaaatagagtctgagtcttgctgcactttcacatataatccactgttattttactggagtcctattgttgtggtgctaaagtgaagataccatttcatactcactaggctataataaaaaagatggagagtaaaaagttttggtgaagacatggagaaattggcaccctcatacattgctactgggaatttaaaatggtgtagccattttggaaaactgtttagcagtttttaaaaattaaacatggggctaccatttgattcagcatttcaacttccagatatatgcctaggagaattgaaaacatatgtccacacgaaaatttgtacacagatgttcatggcagcattatttataatagccaaaaagtggaaccaatccaactatccatcaactgacatggataaataaaaggtgatatatacacacaaatggaatactatttggccataaaaaggaaagaggtactgatatatggtactacatggatgaactttgaaaacattatgctaagtgaaaacagccagtcacaaaatcatatgattatatttatatgaaatgtccagaacaggcaaatctatagagacagaaagtattcatagattagtggttgccaggggctggggtcaaaacgatgaaaatgttttaaaattagatagtggtcatgattgcatgattttctgaatatacagaaaaaatcaccgactggcatacgttaaaaggatgaattttatgttatgtgaattatattcaaatattaataaaactgttatagaaatataaggggtttggctcccacattatgctcattgaaaagttctgccacaaacaaactgcagtttgtgccctcagcaatgcccgtgagtatgtggtagttttcttcttctgtaagtcctgtgtttcatgtctggattgggcaccgtgtgcacatttgtactgtctcaacaaatggcttcttggaacaaagctgttagcctgggcctcactcttgaggcaccgtaacagtggtgcagacc

SEQ ID NO: 23820 - DNA, 2300 bp, Homo sapien
aaagcaatgaccctgggatgatcaagggttttgatttgcttgtgtatgtgctgtcctggcaagcctgaaatcagagagtttaactttgggcctctgcctttccttctcctcccagaagcttctatgatacactagacctcctttccacccatcttttcaagatttttcttgaaaaatgccccctttttcaggtaaaatgaaagctccattaaaggcaaggatcttgtcttgttcatgactgtatcttcagtgcttggaacagtgggcatataataactatttattgactgaattaatgaatagaagggatgaatgattgaaatttaggatcatttagtactgtgacttgccttgattctgtccttgattagttgacacagaatgaactctcatgatacccttcatcatcccttatgcccttccattcttgatgttcagtctatcaaccactcagtttccagaatcctagagtaactcaggatcacagttggcattttgctacccttcttcccccgcccttgtctcccccaactttgctgttcccaggccttctggtccttgaggaccacagggccagaaacctgtcactgatgaacaccattagccaggtcactgtcctaatgtccatcttccaccagggattgtgtgtaattctcagtaggggagtacctgatatcttaaatcattataatgcacaaaactctccagtagtcattttatttatttattttttgagaaggaatcttgctctgttgcccaggctggagtgcagtggcacaatctcagctcactgcaacctctgcctcccaggttaaaagcgattctcgtgcttcagcctcccaagtagctgggattacaggcacctgccaccatgcctggctaatttttgtatttttagtagagacagggttttaccatgttggccaggctggtcttgaactcctgacctcaagggatccacctgcatcggcctcccaaagtgctgggatcacaggtgtgagccaccgcgcctggcctaaagttcttatttaatctgtgatgtggcccatacacagtctgccccagtttgcagactgacatgtctgttacaatgggtaactcaatcttctccaaataccaagaaaaccttaagaaagaaaaatgtttcaaaattaatggacactctttgaggaaggtatttaagcaccaggtaacctgggcttgtgctcaatgcctttaagagaatagcaaagctcatcagcaggtatttgtgagccagtcagactgaggatttggcttggatgagttagatggagacagaatatgtgggacttgggcctggggccaggcatacctgataggtgtttcataatgcccctctctcttccctcccaaacctttgaaggtttgttcctccagctgatctgaagtcagttggcaattcccagttgttgtgggtaggccctaattgtatggctttagaatgcaggggcttatacctgtggaaggctgagttgtctcatttagatcagtttgcagacaagcacccgggtgtatctgcttttctggcaaggctgtgatcccacatgtaccagtctgttctcacactgctaatgaagacatacccaagactgggtaatctgtaaaggaaaggggtttaatggactcacagttccacttgcctggggaggcctcacaatcatggcggaaggtgaaggaggaggaaaggcgtgtcttacatggtggaaggcaagagagcgtgtgcaggggaactcccctttatagaaccacgagacttattcactatcacgagaacggcatgggaaagacctacctccatgattcaattacctcccactgggtccctctcacaacacgtgggaattctaggagctacaattcaagatgagatttgggtgggaacacagccaaaccaaatcaccgcatgaccaagcagatttgttacctgctctggcttgtgaccaatagagggatgggaaggatgggaacacagtatggtctagagggtaccaagacagaagaggctattgtgcagaaccttggggagacgccttccagagagactggaggtgcctctgccagagaaaaggaggaggtattgagagaagagaggatggaggggttttacagagagatctgtctcctttggttaaggttgcatcacaggcacaggaaatattagagtaactgagggaggtaaactatgtggaaggagggatgctgtggtttgaatgtgtcccctccaaaattcagatgttgctagtgtgatggtattaaaaggtgaggcctttaggaggtga

SEQ ID NO: 23821 - DNA, 2300 bp, Homo sapien
actgtgggatgatagtgaacttaggaatgtctgtggaaacatgtaagtagagtagatgtgattctatagaatattcggacactgagtgtcttacagaataaatcctacttgatgatgggtctggctaagagaaaaaacaaaacgaaacaaagcaacaacagcaacaaaaaaaacacttcatttaaaaactgtcagaatcaaacaaaattatctaggtactttggatatggatatgatatttcatactcagtatctgaccatatgctgagccataaaacaagtcccaataaattcaaaataatcaaaatcatacagagtatgttttctgtttacaacagaattggattataaatctgttgatattgcaaaaaccacaattacttttgcaccaacctaatatttaggacaattccatagtttggaaatcaatcaacctacttctaaataatccacgggcaaagaagaaaatcaccagggaaagtagataatgaaagataatgaaatacagtttttcaaaatttgggtgatgtagctaaagcagtgcttatagggaaatttataactttaaatgcttatattacaaaagcaagaagacttaaagtcaatgacttaaggtaccaccttaagaatccagaaaaaaagcaaagtaaacccaaaagtaaacaaacagaaggaaataacaaagataagagcagaaaccaacgaaataaaagagagacaaacaacaggagaaaataaacaaattcagccatgttttgtgtggccagagagaagcccagctcagagagaagctgggcgggcttctctgtggccacacggattgattcatttggagtgggagagataacatgaaataataggtaattacatccttttgagttttttgttttgttttgttttgttttattttaaataagagacagggtctcactttgtggcccaggctggagtgcagtggttcgatcttagctcagggcaacttacgttcttgatgctttttgcttttccccctcacaaccgaaagagaaagtttttgccagcaggtggcagcgctggtgcctgaaaacgccaaaaagcatcgtcctgggttggcccggagactaacgattgccgccgggctgacacggggcagtcatctgaagacaggagacagtcaattccagaaagcaaatccccactcaaacttagaaaaaagcgattttacaaaaacatctgaactctaaatgttggtggagttaaatctcgaaagacttggctcttcaaagccaggggttctttacgggaaagttggaaatgggcttcagaaaacctctccccgcattgtatgcaaatctgcccccccccttttctttttccctgggagatcgtccagttatcagattctcaaaatggacagcgacttaaagcaattaaagaccactgcgacaaatgctcctgcgaacaccactccgaagttaatggcgcagacgtctggactttaaaaggtggtggtaaagtgcgctcaggcatgggtaggaggtgcggcaggcggggcacagctacttgctttcataatttttttttcttcctgatggaccaatgctgtgaaaaatcctcagtggggttttggagccgaaagggagcgactgcagtttgcaggcttgctatgtgtgccaatcaaggtgtttctcataaatttcctcttttaatccttgcggcaatcctctgagttcggtgttaacatccttaatattattcctaaaaatccattaagagggctcttaatggagtgccagcttttgtggtcctggattttcagtggatgcacacactgaccattcccctctctcttttacattcaaaacttccgtgagatttcctttgtttaaatgaactttcctttatagatagcctttcatttgtttattttgtctgcctctttcaatcaagaggcaccctcccctcacaatcggcagcataagcacagacgtaaacgcaggaaccaatgcgattttaggttgaatttaggacagcgctggaacttcactttacccctcttgcggtcacacgaggtgggcggcggccccggcagggtttgggcgggagaaacgcggttcgggactccgctgccgcctaggcgcggggctgacctgcgggggtggggtggggggagggaggtcgaggcccggccccacgtggccgctgctgccgggctcaccccagccccgcccggaggcgccccgcggccccggctagccagggcgggcggccacctctgccctactccttccctccgcgttccgggcctcggagccgccttg

SEQ ID NO: 23822 - DNA, 2300 bp, Homo sapien
taaatcattgtttaaactcctaagctttgggtggtttgttacatggcatattgcagcagaagttaaccaatgcactcatcaaatataagtgtgatattctaatgaggttgctatttgaagtatccacttgaggccaggcacagcggttcacacttgtaatcccagctctttgggaggccaaggagggcagatcacttgaggtcaggagtttgagaccagcctggccaacatggtgaaaccccgtctctactaaaaatacaaaaattagccggacatggtggcacgtgcctgtaataccagctacttgggaggctgaggcacaagaatcgcttgaacccgggaggcggaggttgcagtgagctgagattgcaccactgcactccagccggggcaacagagtgagatccgtctcaaaaaagaaaaaaaaaaaaaaaaaaaagctgcagtgacctgtgatcccaccgctgcacagagaccctgctaaaaaaaaaaaaagaaagaaaaagtatccactctatgcctcttctttatctcacctcagtttatgccaaggctattttatagatgaagaaactaaggaaaagatttgcccaaggtcacacaagcctatgctctcttcccactgttccaaactgaaggaacgtgagaaaagcaggtaaaatcaggaggggagaagcagggagtggtgctcaggcttgtaatcccagcactttgggaggttaaggcaggcagatggcttgagcccagaagttcgagaccagcctgggcaacatggtgaaatctcgtctctacaaaaagaacacaaaagatttgccgctagtggtggtgcacgcccgcagtcccaactgctcaggaggctgaggtggaagaatcacttgaaccggggaagtccaggctgccataagccgtgatcacaccactgcactccagcctgggtgacagagtgagaccctgtctcaaaaaaagtaaataaataaaatcaggaccgaatttaggatgtcaccaccaaatcccactttaaagagctcggtaatacttcacacttaaaaaaggaaaggtcaggacaaataaaagaatgaccagccttaactccggggctggtaatttatggaacttattacctaacggtgttgcacaggctgaaaatacaacttttctaagaaagatgtgaataattgcagtataccactcctacaatgggttaataagaaaaacaagaacgtttgtaggcatgtgggtctctattatcctcaaggttaacttcaaggaggaaaaccgcacccgctgatacagtgtttctaggagctcgacgagaaaaggcaaactgcgagccttctcgggacgccctgttcccaccacagcccttcacacaatgcgtctaacagcatttaaggaacacccgccacgccaacgatcctgctggaaccgcccagttcagggaacaggggacgactgaccagaaggcaaccgcccccaacctgagcaaagagcgctggaaacctattcccccctccccctacacccccccgccccccgctccactacgggaccctcggctcgaattcttttagtgcaggaccaccttaggactcagcctccctaaggagaggaaaagtgggggagggaaggggactctggaggagcaaaagcaagaggcctgggggcgactggggtggggcgtctcctagagcgaggattgctgcagagtgcgcgtgcacgcccgcacatccacacccacggctacacatcatatctgcacacgcacaaaaccacacaccctcccacgccggtcccatatcctttctgcggggtgagcagcagattcccggaaagggggaaatgtagccgcaaaagcaaagccgggggcctggcgcccactctggcggcgactacagcccccacgctgggcacactgcgagctgggggtgcccggcgcgggagaagccgcgcccagccgggctggtagcccagcggggggcgcggcagggcgaggagcagcccgcgctgctcccgcccctcgggtgccagcaccgcccctgctgcggcgggtgaggggcggggcggggcgcggcgtatataaggctaggggcgggcgccgctcttttgtttcttgctgcagcaacgcgagtgggagcaccaggatctcgggctcggaacgagactgcacggtgagtgcggcgccggggcggggggcccacccagggtgtggtcggatccggtgcaccgggcgggcgcgccgcaaccgcgacaggcgcccttctcggaccggacgcaggggccggcgaccacgccctgggacc

SEQ ID NO: 23823 - DNA, 2300 bp, Homo sapien
accccaaataaccataatatttctgcttactcttatttaaagaggaaaaaaaatggtttagttactctctccttactcttgcctgactgaaaaaaatgaagtaactgtcgaaaacaaagttatctgtttagttagctaaccctctgcaaaaccaagcaaatgaaatctctatatttactcttagtccctcctgcagttcagtactgttgtaggctttcctatctgctccaccattttatcagactacagcactgataatgccttaatctctatacaatttatttatagacatcacttacccatcaggagacaatgggatcagcgttgttctccccatttttacagcccaagaaattgaggctcctgatacccaggatcacatatgccaacaccgtaaaatgctcagaaaggcatcgacacagagctttacttaatacccttctttctactccaccacaccccatttacggccaggttggatctctttctacaagagaaatggaataaatttgtgcaggagctccatacaggcaataaaaatatctctggtgacaaagtcctcatttaaactccagtttgtttatcactagttactaccaaatacagtcccttgggagttctgagtgacccaaaacctacttcctggacttcaagatgagcttttagtttctttgaaatcaggaagtgtcttaaaaccagattcaatgaaatacggtaacaatctttttactgtgtcctgtgctaggtattttatatgcattttagcacttaacctccaaacctcttattattaaacctctgttgttacgtccattttaaagatagaaaagtcagggcacagagaggtttagagatcacacagccagcaaatggtggacagtataagagtaacctcaaagcaagcagtaccccagattccaatttcagttgacttagcctggtaacagttcaattttatgcaaaacccacaacttcaaatggaaaaagataaattaaaacaaccacaaaaaccagacaaatggaggctcagcaggccttgtagctcatccacggttacacagaggatctcagagccaaaattccatggccgatccgtcttgacttcaaagcgcgatctatttccaccaaaccacggaaccatcgacacgtggtaaggggcagtacaaagatttgttgaattaataatgcctgaaaacaaattgacaataagaaggtaaaaatggaaaacacagataaaatcggaaaagcagaccactttcaggaaacaaaaaactccaaattttcaaggcagggcattcacggtgagccaaggcgctgggacaaagtttgcgcgggtaccgccggactcccgggctgcccggcgcggagtctttaacggagatggttcgcaaggaatcggcctcggagcccggcagcctcctggcttccctcctgaccaccagtaacccggccgggaaacactggcgaagaccgggggccagtcgccttccctttctgggctgttggcttaaaatacacacaaacacaagtccccaggcggtccgcggcctctcagtggggctggagctcgctgcccgaggcccgcccggaagccatgcacctgcggacaggagtctctccgagtcgcagctcgccgccgagaagcacccacctcccgcggccggcgcagcccaaggccctggcccctatagcccggcctaggcccgccccaggcggggctaggggcggcgtggcgggcgggcgcccctcgggccgcgccggtgagcagcgggagccggcgccgggcatttcctcttcctccctacgcgcggcgcggcggcggcggcggcggccaggccgaggctgggcacgggcgcccgatcgcggcctgctggctagcgcgggcaagcgccgcgccccgagccgccgtcgccgcgtcgcccccgtcgcgaccgccggccgcggggcctccgggcggctgggcccggcgagggcagcgagaggcggggctggcgtgcgggcggcggaaggaggcggaggaggaggaagaggaggaggaggaggcggcggccgggagccgggggagaggggcggggggtgggccgggggaggggaggagcgggatttgcggagcgccgcgccgctgccgggagccggcaggcccgagagtgaccggagtcacggcgggcgccggcggagctgcggcgtcggacccgcctcctggaggagctcagccccgaccaggcccggccccattcccgccccgcgccgcctccccgccgccgccgccgccgccgccgcgggagcgctcccctgcccac

SEQ ID NO: 23824 - DNA, 2300 bp, Homo sapien
aactgacagtggacttctgtcttccacaactatgagaggataaacttctgttgttttaagccaccaagttttcgtgatttgtgacagtagcagcagaaaactagtacaataggtttttcatatatttatggaccataaacatgaaaaatcgtctgacttttaaatcttataaaaataaaataacacacaataatacaaagagtatgattctatgtatgtacatcagaatatctgtaaatacgtttacatatgttcataactgcctaggaaagtgtctggaaggatatataccaaactagtgacagtggttaaccagaggcagttaactgaaagtggttaattagaagggtcctgtgtcctgagggggaaagaggaacttttacttgttactcgatactgctcaagatacatctgttatttgaaaacgctttatgagactgtactcatgtattgtgtaaaaaattagaaaaggcatatctgcttgttataaagttcatagaaaccagaaaactatctcctttcacttatcctttcccagaaatagtcattgataataatttgcatcttctcagatttttttctacgcagaaataaatgtgtataatttttttaaaaacaaaaataaaatagtgagtgtcatatatagtgtttcatttaaagatgttcctccaaaatcaatcttggtccatgtgcctgtgtgtgtgtgtgtgtgtgtgtgtgtgtgtgtgtgtgtgtgtgtgtgtatgggtggggggaggggcggggacactgcatagaactggccagctgcatggactgtcactgtaaagaaagatgaagaatgcatgtcaccaagctctctgatgctttgaacctagcatatgtggctttgcccatatgtgcgggcacctctgtagaaactcttctgccagttgggctgaaaatagttttacatagttccatactgccttccaagctgttttcaaagtttatgctctaatagttccccacggaggataacacaagatattcattttcctcaaactttcccgcacaggttggagagaaacgacatcttaatgtcattgtaacaggcatttctttattaaaaaaattttttttttggagacaaggtcttgctatgttgcccaggctggtctcaaactcctgggctccagcgatcctcctgcctaggcctcgggagtagatggaactccaggcgcgggccgtggcgctcgcaccacaggcattacttaggtatgaggctggttgagcatttttctcgtgttcactggctactcacgcagctttgtgaatggcttcggagatcactggacaggcaattttccctctcaatgaaccaaatccaaattcttttggaacccaagaccgcgatttttcgatttaggacctagtcccaaacaatgaagaaaaggtgatcttcaagatttcagcagggaaatctgtatatctgtacaaggttgaaaacctgggccgggggtcgcgttggaaccccacaggaaaaaggcgcggaaagccgccgggcattttccggggttccatagatgtccccagtgtcctagtccgtgcatcagctcgcgcactcggagggactctaggcagggggagggccccgcggccagtatgtgcgtccgaggctttcccgcagggggcagtgccgcccgcccgcgcgccgatacggtgggagggggtgggaacctgcgcggagttctggaggttctttgggagaaagttaggggatgcggaggggtgggcgcaagacttccaggactccagggaggccgtggggagggccgccgagggtgcagtgtgaggcgcaggagggggttgggggcggtgcacgttgcagggagacgcagcccctggaagatgcgagtgtgaacgtgtgagtgtgagtgcgtgtgtatgtgtgtgtgtgcgcgcgcaccgcagctctccgggttccgcgaggcgcgcgggtgtcagcttgcagccggggctcctccctccggcccccctgcccagcccggcggtccctcctccctccctccccgctcgcccctccccggcgggccaggggctgggacgccccggcggagcaggcggcggcggtggcgagttggggagccctaggctcggcgctgccggaggggcccgagccgagccgcctgcgccccggccgggcagcgccgggcccgcttcccgcggggccacgccctgtcaaactttgttgcggcggctagcgcagcgggcccgcaagcgggcgggaggggcgccgggccgggccgggcagggcgcgggcggctaggggctccgagagc

SEQ ID NO: 23825 - DNA, 2300 bp, Homo sapien
aaggcacaagctgctgttgaacaagcactccacacctcaggcataagccagggtagtggctttggcccagagtcccacttgggatagccaagcacgaggcgcgggtgccctctagtggtgccagtcagccctggtggaggatgtgcggaccacatctgcccaccctagacctggctcgtgccctgcacctccccccagtgcagccatctctgtttcagatctgtgccttcctctacctctcctgtgccgtctgccagcccactcctgaagacctgagatggctgggtcctctgtcttagtttctctctgcatattgtcgcatctccatctacttttcaagaatgttatttccctttaaaaactaacacatgaggccgggcgtggtggctcacgcctgtaatcccagcactttgggaagctgaggcaggcagataacctcaggtcgagagttcgagaccagcctgaccaatgtggagaaatcctgtctctactaaaaatacaaaattagccaggcatggtggcgcatacctgtaatctcaactactcaggaggctgaggcaggagaatcgcctgaacccgggaggcagaggttgcagtgagccgagattgtgccattgaaccccagcctgggcagcaagagcaaaactccatctcaaaaaaaaaaaaaaaaaaatcggcgtggtggtacgcgcctgtaatcccagctatttgtgaggctgaggcaggagaattgcttgaacccaggaggtggaagttgcagtgagctgagattgcaccactgcactccagcctgggcaacagagcaagactctgtgactcaaaaaacaaacaaacaaaaaaaaaaactaacatatagtggccaggtatggtggctcatgcctttaatctcaacactttgggaggccaaggagggaggattgcttgaggccaggagtttgagaccagtctgggcaacatggtgagatctctacaaaaaagacggagttttgctcttgttgctcaggctggagtgcaatggcgcgatcttggctcaccacaacctctgcctcctgggttcaagcgattctcctgcctcagccttccaagtagctgggattacaggcatgtgccactatgcccggctacctttgtatttttaatagagacagggtttctccacgttggtcagactggtctcaaactcccaacctcaggtgatccaccctcctcggcctcccaaagtgctgggattacaggcgtgagccactgcgcctggccaaaatttttaaaattagccagatgcagtcattcacacctatagtcccatttactcaggaggctgagctgggagttcggagctgcagtgagccatgattgtgccactgcactctagcctgggtgacagagtgagaccctgtcgtgaacaaaaaaacaaaactaacacgtgtactctgagtttcccattcttccttttgcacagagcaatcctctgagaaatgaaagaaaaaccctgtgttcagccttcctgttcctgtgagcaccgtcctgtttcttttttattgtttaccgcctgacttcccacacctctgtcacctcctttattctgccactccactgcagcccggcttagcgcttcagtcaccatcgaataactaactccactcattttcctgcttttttgcaacacagccgacagccaaggcctgactactctctgcttcctgtaaatcttatcattgactccaagatactgtattaatacacataatcagttgtttgtctttttgaagcttccattttctttctagacttttattcaaataaatcaactcttcatcatcacttattcctctcaatgtttgtgacagaaaaaatatataaaatcccatcaagagagctgtagaactctcaagaaagttctacacccgtagttccaactgccaaacaaacatctaaccattgcagatgtgtgctctgcaaataataactcagcattgtggtggagcaggggtcccttattttgtctaagggcagagaagcatgaaccgttgccacacatggcattatagatagcaacatggatagttttctagtaaattttatattaccgtagtctatattataatatagcaaagcagacacaggcctcaaaaacttaaggaacatttatgggagaaaatcttaactgggaattcaacagatggggagaagaccatcattctcagtttttgaggcagagcatctcattccaacgagaggtgtgtacgtgcaggagcaaaacctgagacacccggggaggagggtatatgagtgggaggctg

SEQ ID NO: 23826 - DNA, 2300 bp, Homo sapien
atctattctttgtattgggaacattacaattcttttcttttaaaatatacaatgtttctgttaactatattttcctaccgtattactgactacagaacttactctttttatgtatctgtatttttgtacccattaacaaacttctcttcatctttcctcccatcttcccttcccagcctctggtaaccacctctacttccatgagatccactagtctcagctacttggaaggctgaggtgggggatcactagagcccaggagatggagattgcagtgagctgagatcgtgccactgcactcaagcctgggtgacagagtaagaccctgtctcaaaaaaaaaaaaaaaaaaaaaaagagagatgggatcttgccatgttgcccagtctggtctggaacttctgggctcatgtgatccccctgcctcagcctcccaaagtgctgggattacaggagtagatatcttagatatacttatttcctttcttttgtacatatccagcagtgggaatactggatcatatggcagttctatttttagtttttgagaaactctgtgctgctttcctttatttttttatagagacaagagtcttgctacgttgcccaggctgatctcgaactcctgggctcaagccatctgcctgcctcagcctcccaaggtgctgggactacaggtgtgagcctccatgccctgccaatactgttttccataatggctgtactaatctacattctcaccaacaggctattagcattcccttttcttcttatctttgtcaccattttgtatttttttttcttttgataacagtcattctaactggggctaagatgatctcttattgtggtttggatttgcatttccctgatgattagtgatagtgagcattttttcatataccatttctatgttggccatttgtatgtcatcttttgagatatgtctattcagcaggtcctttgcccatgtttttcttttttctttttctttttttgagatggttgcctaggctggagtgcagtgataagattttggctaactcactgcaacctccacctcccaggctcaagtaatccttccatcctcagccttctgagtagctgggattacatgcacaggccaccatgactggctaattttttgtatttttggtagacatggggtttcaccatgttgccccggctggtgcccatttaattatattttttccttgagtttattatatattctagttattaatcccttgtcggatggatagtttgcgaatagtttctcccattatgtaggttgtttcttcactgtttcctttgctgtgcagaagctttttaacttgatgtaatctcatataagacctatcatttcttaaatcactgtctccaaagcaccaagcctggcaatcgttgataaagtgatttcaaacatttaatgtataaacataacagtaactgtaaacggtgagatacaaaaccacttacctgattatcccaatatggggagaaaataaatatgcatagaggaaaagagaaatacactaattaagaagggaaagagtcctttttttttttttttaacaaaactaaatggaaacataataaactaatgtaagcggtaacctgtggaggagtaggaagacttttctaaagtctgtttactttaaaatccggttttcatttctgaaacattataatgtattatctattcaaaaacatcaaatgtttagagggcagacaatacactaaaacattaatagtgattatcccggaagggtaggagtcaggctttgttttctgcttctgtatcagaaaaaggatgcactttttggaaaagatgtttggcgacctggaaggacaccgtctccgtggagtcgggaaggaggagggccaggatgcgaaggcaacgctttgcaggtgatcggatggatttattcccacatgggagagaccagagcacagcacgtttgtgtacggccaggagggaaccacgaaaaaagcagaggatagaaacgcaagcacacgatggtggtggccaagaggagcctgcccctagtgacctcacttccgcggccagtgcgagaggcgagggagctccagctctgcctgtaaggtctcggaagtacgaggcggaggggacgaaaaacggggggccagactgttgtggctgtggtggagacgagaaaccaggaagaagaggctcgcctcccactcggcgacagtaagcgaagcagccgaaggcgagcgccgacatcagcagctgccccctaaatcccgcccttcgtcttggcggcagcgggagactgag

SEQ ID NO: 23827 - DNA, 2300 bp, Homo sapien
gttctcttgtatcttgaaacatcccagatctcagttctttgccagtgattgttaaagaacagatcttgtgtcggaagtacccatatagcaccacttgctatccagttttgtcttctgagaaggtgctgcctccctcagcactgcccccagaccttccctatgggaggggctggtgctgtgatttctcagagctgcagcctctgagcagttctgtcctgcccaagccttttcatcaggacctggaagagccaccataagacccagctattccactattgcttgcagaccctgcatcttccaaagaaacccggcttgtgggctggtgtgttggctcatgcctgtaatcccagcaatttgggaggccgaggtgggtggatcacttgaggccaggagttcaagatcagcctgggcaacatagcaagactttggctctataaaacataaaataggcggggcgcggtggctcatgcatgtaatcccagcactttgggaggccgaggcaggcggatcacgaggtcaggagatcgagaccatcctggctaacatggtgaaaccccatctctactaaaaaatattaaaaaaaaaaattagccgggcgtggtggtgggcacctgtagtcccagctactcgggaggctgaagcaggagaatgatgtgaacccaggaggcggagcttgcagtaagcggagattgcgccactgcactccagcctgggtgacagagtgagactccgtcttaaaaaataattaaacacataaaaataaaaataaaaataaaatggcccggcatggtggcatgcacctgtagtcccagctactcgggaaccagaggcaggaggattgcttgaggccaggagttcaaggctgcagtgagctgtgatcacatcactgcacttcatcctgggccatagtgagaccttgtctcaaaaaacaaataagcaaaaccccaaatctgcctggctggttctgagtattcccaggtaaaatgtttgaaacatgttagtcaagagttctgtgccaaaccactctagaggtttcttgcactgtacaagctagagaagtcttctttggtttccctatctttgctatttccctgcccctgcctgagaaacccaccctttggcccttctgctgtagctttttcagccaaccaagtgccggagaagctggatgtggtggtaattggcagtggctttgggggcctggctgcagctgcaattctagctaaagctggcaagcgagtcctggtgctggaacaacataccaaggcagggggctgctgtcatacctttggaaagaatggccttgaatttgacacaggtaaggcttgtgtggaaaagggttgggagcatggctgtatgttgaagaggcttggagcagcccttgtggggtgatactgagcatttctgttgttttggaagtgccatcttctctctgggtactttttttctttgtttgtttcagacagagtctcacttcatcacccaggctggagcgcagtggtgtgatcccagcttactgtaacctctgcctcctgagttcgtgattctcatgcctcagtctcccgagtggctgggattacactcagtaatcccaccaagtgggccaccacaccccgctaatttttttgtattttagtagagatggggtttctccatgttgtccaggctggtctcgaactcctgacctcaagtgatccacctccctctgcctcccaaagtgttgggattatgggtgtgagccaccgtgcccagcctctgggcagttttcttatgtgacagcatagctactgggagttgaatcgggcagcgatctggcggtttctgctgtgacacctccctacagacagagtgagcagctcactctgggcgtgaacttggccaggccagataaactcttccacctcacttcctcagccacctttccagggctcaatccccatatccctttactaccttgtttttccatctcccaacaggaatccattacattgggcgtatggaagagggcagcattggccgttttatcttggaccagatcactgaagggcagctggactgggctcccctgtcctctccttttgacatcatggtactggaagggcccaatggccgaaaggagtaccccatgtacagtggagagaaagcctacattcagggcctcaaggagaagtttccacaggaggaagctatcattgacaagtatataaagctggttaaggtaacatggacatgctgaggacccagagtttgttctcgataaggctgggtttctttattattagtggaggcactgggggtgg

SEQ ID NO: 23828 - DNA, 2300 bp, Homo sapien
tgctgggattacaggcatgagccaacacaccagcccacaagccgggtttctttggaagatgcagggtctgcaagcaatagtggaatagctgggtcttatggtggctcttccaggtcctgatgaaaaggcttgggcaggacagaactgctcagaggctgcagctctgagaaatcacagcaccagcccctcccatagggaaggtctgggggcagtgctgagggaggcagcaccttctcagaagacaaaactggatagcaagtggtgctatatgggtacttccgacacaagatctgttctttaacaatcactggcaaagaactgagatctgggatgtttcaagatacaagagaacttggcaaactgcttatttttttaatgtttttagagagatcaatagtaaaaaaaaatttcacatgtaagtatataagataaatacatgaaacaagtgtcacaatgcaatacttagtggaactatgtataatgcactctgatattttctattctactgcattctaaaatactagttgtggccaggcgtgatggctcacgcctgtaatcccaacactttgggaggccgaggtgggcggatcgcttgaggccaggagttcgagagccttgacaacatggtgaaaccctgtctctactaaaaatacaaaaattagctgggcatgcccactactcgggaggctgaggcaggataatcacttgaacccaggaggcggaagttgcggtgagcggagatcgcgccactgcactctagcatggacaatagagcgagactctgtttcaataaataaataaataatgccagttgcaactcactaaattgatttcatagcccactaatagatcacaatccggtttgaaaagcagttaagctagtcatctcatttttagaccagcccaggtaggtgctaatggttatgcagcaaattagtgacagagtccaagctaaaactcagttctcagaagtccagatgattagtccttccacttagaacagtactgtctccgattgtgtagcaagatatgacacggagaattctaaaatttacaagtgagagggactccgtagatcaaacaggtgatccattattttttaaagcagcagaactctttaaactctagaagcaaccacaaaatatgttttaaagatgagagtggagagcaggctctgagcctgaggcgccttgttgaacctctgccaatgtttcagaactagggttcaatccttacgatttgggaccatgcaaagcctgttaaatcaccggacgggcaaaacgcaatttcctacgcatttctgtgctgctcccccacacccctgagctcgcatgggagggtaggtgaaaaagttaaggtcctggaaccaagtggaggaatgagtcacggggattatcagttccacgagccacggggattacaagtggcagggcgggtgccaacaccttgcaaaccaaggacaatgaccacacccttgggactactattcccggggcctactagggcaaaggctatcgacagtgttgcacactaaagcggggctcctccacgtgcaaggaagccctcctagtactttacatatggggaaactaaggcccacgtctggtagcggctgccttggcaaaatgagaacccaaatctgtgagaaagcctcgagtgcagccccggaccccagggtccctcctgctaccttgtttgagaaccttcttcctggcctccttgtcagttaccaggggcgctgggggccgtttgacatcttcggagaaaggattcggggagctgccagagaatagtcccaagtaaactttgcagaggacggccagcagcagcacagccaggagcagcaccagcggaagccacatcacgccggcgtcgggtcgggtaaatgggacagctccgactgcgctcagcctctaggactgtggctccgcccgggctagttcgctctccagtcaggaggcggaggcagctttgagcactgattaaccagccagccagcgaagagccaactctcaggtgatgattgaccctcccggctctccgtacttcttttgggtttccattgcctactgggaaatgtagttctcggggccaggggagccggcacggaagcggctgtgcgcatgagcagatgaggcctagccgaggcggcgggacccccaagtttggaaagctcttttaacggtgagaacgcgttaacacttgccaaggggagtggttggtgcctgtgcggagctagcagccggcctgaggagggagggagaatgtgatccggtggaaattatcactatggggcgaga

SEQ ID NO: 23829 - DNA, 2300 bp, Homo sapien
gggattacaggcatgagccaacacgctcggcctgttgacaaaatttaagcagctgtgaatttattctgaatgaacaacttgcctcagccaaatgcttacctcttactacccaagccacaggatggccaaaaggggaccacacaggggactgtgagctggattctgtgtccaaaaggcagcagcaccactagaagggatggggtctgtttctgacaatggagttactgggacctgggccagcttatcaaaggcgtgaggctaaaggtgtcaccttggtgggtggtcttagctgaagtgctcaggctttgtttaggcctcacacacaggctgggtcaggggcttataatactagacctggttccaacaatggtagaaattcaaaatgcaacacgatgttctaacctttctcagttatcagcaatactgtgcatgtggcagctggctagccagtttgggcaattctaagtctttcatctgacattgcttccctcaggaaaagggctggacaaggctcatacctcatcacaggggaattggacatccggaatgtctgtcacatcaaaaattgcatcctaagtgggcagatggcccacacacaactgacaatcatagttcacaactttgggtgactaaggaaggagggtagcctctctatgaggtcagccctccaggatgccataaaaactggctgctggtgtcaggatgctttgattattaacactgagaggaagaatacctcctggctcttgggcttgacatgtggctcactgtaatccgggggacagggcaatgcccccttagtcctggcaccccaggaactaaactgctctcactgtggcctctggggcctcaacatctgcctcccctttccttttcctccatcatggcctccatgacagcctatgacaaaacacacattggccagccttggcaaggtgacaggcgggtatggtaatagcaatctcaggagggctcttctgttgctgtgtagaaaatgaaccaagtagcatagaatcgtgaccagctttccacacctggctggagcactcctggggccttcagtagggacagttactatctgtagcagagaagaaaagagcaacaattccattaaacaaggaagtactcaaaggcaaattcctgatagttggacctaaggaaacggccttcctgtaaaaatggatccttctccaatcaagtattcattatgcaccctctttaggcaaggagggggtatgattcttcaactgcttgctggaggttagattctctgcataggaatttaaattagatgggcccttagctgatcctttcaccatgcttgtccatgggcggctccccgtcccccaggttccccacggatggggtgtcattagggacccgccatagaggactccgtcccaggcgggcccccaggacaaaactatgggccactttgaggggcacagagacagacgctcaccggttgtgatgcgcaggtaacagagagctcaattcatcatgacaaccagtcagacaggggctgtgagcagcctttggacagaactttcgcatagcctggaggcgtaagacgaggaaagcaatttaacacctcaaggcagcgagtccagggcagagccaggaccagaactcaggactcctgtctcccagtcgggattctctttcagtcttacaactctcggccttgtctcgccccatagtgataatttccaccggatcacattctccctccctcctcaggccggctgctagctccgcacaggcaccaaccactccccttggcaagtgttaacgcgttctcaccgttaaaagagctttccaaacttgggggtcccgccgcctcggctaggcctcatctgctcatgcgcacagccgcttccgtgccggctcccctggccccgagaactacatttcccagtaggcaatggaaacccaaaagaagtacggagagccgggagggtcaatcatcacctgagagttggctcttcgctggctggctggttaatcagtgctcaaagctgcctccgcctcctgactggagagcgaactagcccgggcggagccacagtcctagaggctgagcgcagtcggagctgtcccatttacccgacccgacgccggcgtgatgtggcttccgctggtgctgctcctggctgtgctgctgctggccgtcctctgcaaagtttacttgggactattctctggcagctccccgaatcctttctccgaagatgtcaaacggcccccagcgcccctggtaactgacaaggaggccaggaagaaggttctcaaacaaggta

SEQ ID NO: 23830 - DNA, 2300 bp, Homo sapien
tatcactctaccaggttaaccgcccagcctgtggttttgtggggactaggccctactgggattctcacccagactatccttttttttcttttttaaacttttaagttcaggggtacatgtgcatgtttgttatataggtaaactcgtgtcatggggctttgttgtacagattattttgtctccccggtattaagcctagtacccattagttattttcctgaatctctccctcctcccaccctccaccaaactaccctattattattgttattattattattttttgagactgagtcttgcccagtcacccaggctggagtgcaatggcgcaatctcggctcactgcaacctctgcctcccgggttcaagcgattctcctgcctcagcctcctgaatagctgagattacaggcatgcgccaccacccccggctaattttttgtgtctttagtagagatggcggtttaaccatgctggccaggctggtctcgaactcctgacctcatgatccacccgccttggcctcccaaagtgctgggattacaggcgtgagccaccgcgcccggcccatattaccctatttttaagcctggcagtttggccatggagacacttggatgctagctacaggccatgttctttggggagaagatttaacttcccgtcttgctctagtgaaattttatcaatttcgtttcaatgagaaacattcatccagtattgctttttttttttttgagatggagtcttgctttgtctcccaggctggagtgcagtggcgccatctcggctctctgcagcctccgcctcctgggttcaagtgattcttctgcctcagtcgctccagtagctaggattacaggcacccatgaccatgcccggctaatttttgtatttttagtagagacagggtttcaccatgttggccaggctggtcttgaactcctgacctcaggtaatctgcctgcctcagtctcccaaagtgctgggattaccggagacagccaccatgcccagcctatccagtactgtattttctccagacttttcccacgcagtcaaataatgaggttttgtttgaaggtctgctaattaggaagatttgttccagattttgctccagggtccccaggccttgaccctgaacctggagccttgtctcaagccagcctgctgaccaatacctttccaggacaggccggctaggttctgggcagaggaactacgcttgtgtggctgcataactgggtgctcactttctcctggagcctcatactgagtccgctcatccttcccccagggattcagaagggaatgggagcctcccttgcaggggcttccactccctgtgtgtttgtgggcagtctcttgtgctctcaggacctcggtgtcctccagaaagccagcgagttggaggagacaagctctagggtctagtgactgtgatgtaggcaggatagttgccctgggtcaacccaggatgggctgtctctcagagggcccagggcccagaagtcatgatgataaacatctggtgaatgagaagcagaccaaagggtagagacctgagaggcatcagcatggcatgcggaagatggtgaagaatgttttatggcctcagccattccctgagaactgagcttagccaggtgcagtagcccacgcctgtaatcccagcactttgggaggccaaagtgggaggattgcttcagttcaggagttctagaccagcctgagtagcaagactctgtctccagaaaaaataaaaaaattagtcgggcatgttggtgcaggcctgtggtgtcagctgctcaggaggctgaggcaggaggatcgcttgagcccaggagttcaaggctgcggttagcggtgataatgccacggcactccagcttgcgtgacagtgaaccctgtctcaggaaaaaaaaaaaaacaaaaaaaaccaaaaaactgatcttaaaaaaaatcaaatacttgcattcagggcaaggagaaagacaaactgagggaggaggaaaaagtaatgtgaagccagtgaccctgcccagaaaatgtgactaacccagcagcggtgggggctgtgccgcgcctgccccaggccctgaatggagaacatggctttccttgctggtctcagactcagagatgccctccctgatttgccttggctgtgacctgcagcgggctgaggccactgtggtggggctgtgtggacctccagcctccctgtgtgcccctctgaggagacggcctggcatacccactgcccaccccagtgactgctcttctgcttcaggcctg

SEQ ID NO: 23831 - DNA, 2300 bp, Homo sapien
cagtgtccagtgcttctctctcctgggtttcttcagccaggtgttcatcctagaagtaggagtttattaataatggtgatggtatcttgcattgtccaggccttcattctttttgcggatcctcccggctgggcacagtggctcactcctgtaatcccagcactttgggaggccgaggaaggaggatcacttgagctcaggagttcaaggctgcagggagctatgatcatgccactgcactccagagcctaggtgacagagtgagaccctgtctcttaaaaaaaaagaaaaaagaaaaaaagcagcctttcattgaatcctcacaaccttccaaggtaggaggactggggcttctgttctcgtttcacagatgaggaatctgtggctaggaagtcttaagggattatcccgaggcaacagaatctgggcagtattagaatgtgggggttttgctgtctaatctgttaatgcattcagtaaaaatttttttgagtgcctattacctgctgggcgctatgcagggtgctgggattgcaaggatgacttgacacggtccctggctagaggtgctaacattatggtggaggaagcacatggtggggagggaactttctggtgtgatagaagtgttttatatcttggtagggatgtgggttacatgggtgttgcatctgtcaaaactgatttaaatgtacacatgatttgtgcatttcactataaatttgacctaagcaaaacaaaacaaaaactgaatgctctggaaggactatgcctgggcacaaccttggagaggcctagttgtctggaagcaggccaggttgcccatggatccaaatccacttttgctatcgggtgtgcctgagaagtgttcccatgggcgtgtagatgcaggtggcccagtggcttgatgtccagaatacctggggagcactgcagagggagtttcagaggagggatatttaagctgagtctgcagagtgagcagagttggtcaaaggaaggcagatagtaggcagcgggaggtggtttccgaggactccttgctggagtgtgcttgtctgaggtcacccagatagaaagattgtttccttaccccaggccccacccatggacttcagagaaactcattctggttgggattttcgaagctgcctcccacaaaaggatcttaccactgtgtcacaaggccatggcctgatcctcatgctctttgtcaactgacatctctcatgggttggctatgccacattcaggagccaaggcggaagtgtggacccatcgctgtccaacacatttccagaaggcctggcctcctggtgcagatgcttgctggcctgttttcctctgaataaagaagagaagggtcaggtgttgcaggtcagatcagcctgggttagaatcctggttcagcagttgggtgcggtggctcatgcctataatgccagcactttgggaggccaaagcaggaggatcacttgagcccaggagtttgagaccaacctgggcaatagagtgagacacagtctctccaaaaaaaaaaaaaagtttagctgggcgtggtggcatatgcctgcagtcccagctactcaggaggctgaggctggaggattgcttgagcctgggaggttgaggctgtagtgagctgtgatcacagcaccgcactccaggtgccgcgacagagtgagaccctgtctcaaaaaaaaaaaaaaaaatcttagttctgctactgaactagcaatgtgacactctggacaagttagttaccctctctgagcctcccaaagacttcatgtttccagcaggaataatgatagtagatgtgaggacgcaccaagcacatagtaggctctcacagaacagtagctgttcacagggtgattgaggccgggggcctaacgattgaatggaagtgaacactgcaattctctcgcaaagtttacagcacagtaagcttgtccttagcttcccctataccctccttcccacgcccaattctaggaccctttcgggcgccccagcctcccataggggctccccgccagctcagaccggccgggcccctccctctgactcaccgggggcggctcctggccgcgcacctccagggggcggggggcggctgagacagcgcccagggcctcggagcaaggcgttggcaggcaagtagtgcgcttcggggtccggtcgccggggacctgggctccccatgtaggggtcgaacgggcttagccggttcgggggcgccccgctccctcctcttctcccacagccggggtcctctcttaggggcgcgccgtctc

SEQ ID NO: 23832 - DNA, 2300 bp, Homo sapien
acattgattcaggatgcttctagccattaaatttgatttgcaaatgaatttttctggatcacctcacaggccctggggaatggccaggggtctgggtggccatattttccgaataaagctcaaaaccaaaactttggttttgccttttcttaaatcactgctaggtgctcaggggcaaccagaacagtgacatgctggaattccttgtgacttcttgggaaagtgggactgtccagtacagcatgagtggcctggggagggcaccaggtgcctgggatggggggactagtcccccagaagacaagtttacccctgtacagccagcgtcacactgggtactcaacaccataacagctaacactattgtgtgctgccactatatgccaggtgctatccttgatatgattttctcatttaatccttgcatttactctctaacatggatcctcttattatcctcctttgacagatgaggaaacagagataaagagagataaagtaggtcaaaatcacttgttctaggtcccacttagtaagcggcagaggatagatgggagccatgtagtgggagtccatgccctccccactatcaccgcatgctagtgccagttgtgagtcctttcacatgcaaacagctatctcagctctttttttttttttttttttttttgagacagagtctggctctgttgcccaggctggagtgcagtggcaccatctcggctcactgcaaactccgcctcctgagttcaagcaattctcctgcctcagcctcccgagtagctgggattacaggcacgtgccaccacgcccgggtaattttttctatttttagtagagatggggtttcgacatgttggccaggctggtcttgaacccctgacctcaggtgatctgcttgcctcagcctcccaaaatgctaggattacaggcgtgagccactgcgcccggccataccctcccttttgaggtgaggctcttgaaggcccagacctttcctccagtgctttgaggtctgatcctgatgataataacacctcactcataacctggacttcacagtttacaaaacacccctcctcctcaccccctcccaaactcggtttatttttgtcgttaaagcagagttgtaggccagggtggaccataggttttcttggtcacgagagacttcctccctccctgggctcccctctgtagtggtgccaaataaaaatctgatcagtcaagcctgtaaggtaactagcgctaatgtgcagagccagtcctgggcaggcctgttcattattttgcacactcttacaccgaaagggcccaggaccctcgcctgacccagccttgcctgccaggcctgggctgggtctcccagcccaaattctcacaagagggccgactccggccagagcgcgcccctctttgtgcctcggtttgcccacctagaggtcagtcccgcaggcgtggcgggtacatctcagggtcggcagaaagtgccaccgggagcccagccggagttgagggcctcgcgccgggcccactgtccagatccagggctcacgagaaaaacgaggacgcaggagagccacacgccaggacgcgtgtaaggccccaacccggccccagcctgggccctagacccctaagaactacaaatcccagcaggcagtgggccgcggggcggggtctcggaagctgcggcctgtggtgcctttgctgagcccaggtccggagggccctcggggacgggagcaccacaacagacccccggacacacttacacacacagtctcacaaacacacagtcacacacgcacacacacacacgcgcgcgcgcgcgccttttggcccctcccctacaaactacaaatcccggcaggcagcgggccgttgggcggggccttgggtgctgatccggacgcaaagattgcgccagccagggtgggatcccggtagctaggtgggggctaccctgctggggaagagatggccttctctcctcgcaaacccagctccccacccctgcacgcgcccctctgccctggagtcgctggtccgagccctccttctctgcgaacctgagccccgccctgccctccctacgaggttggggccgtgggagatgaagatggtgggtggggggttgggcccacagcctgctaagcaggcagagtggcctcctgaacccttcctccatcgcctagagcaaactcccattcctggaaggaggagcagcccagaccctgagactggactaggtctgttagggtccctgtgtggccggcaggactcgtggtgaagcccgg

SEQ ID NO: 23833 - DNA, 2300 bp, Homo sapien
cggccgaatttttgtatttttagtagagacaagatttcaccatgttggccaggctggcctcgaactcctcacctcaagtgatctgcccgcctcagcctcccaaagtgctgggaattacaggcatgagccactgtgcccagctgctatgattttttgaacagtccaaagtcatttggagccaggcctgccaagtcagttgggaggtcaggaaaggtgacaccatagggctgtgcagagaaccatcaggggatgagaaaagctttctcctggggcttcaaagctggctctgagatgtcctcctcggaggcaccctaaggagactctgctttttcagcctcagtcccgctgaattcctttctgctccctgccgtgcatgacaggtggttctctccttttcctttcagagcagggtgcatcgtccagagtggtgagcagcccctccatttccacctcagtttccaggcttctggttaagaaactggcaggggtggggtggggcctagggagggccaggaaatatccctgaaaccaagggaaaaggcccagagcagggcccctgcccctcagccacaggcccctggcaggcaatgagccagctgtcctgagggtgccgcccagggatcctcctcacactctctgagagctggggcccatgggcgcctctgaaggggaaggtgctcgtgggatgccccctctgagacagaggagaaattgtaatcattcaagctagctcccagaaagagggtcaccatgtgaggagggagtgaggtgcctgccaccccttcaaatcgatggctcctcccccaaaaccccagtcctaaatggagcctcaggactggtcaaacccatggtctcacacacccctccctaccttaggtgccaggccctccaaagaaacctgatgaggacctctacttggaatgtgagccggatccaggtgagcccctccctcagctccagacccctcctgcccgaggccctcagctgctcacagcacaacacactctcctggctccatctgcttcccttgctgcctctcaccaccccccaccaacacgcatttgccttcagtcaccgcatggacatcacactcctgcctgtggtccaggctgacccacactgtgccagcaagggaggtgctccccttagagcatgggctgggtggggctccccagctgctgcggccaggacagcatctgcctctggttggaagcactcccagaaagtccaggctgcagagaagcagcaggccctgcagctgttctcagccctgccctggtcagcatggattccctgcctggtgctcagccgagcccagcctgcccctccctgtttcagtcctggctttgactcagactctcagcttccaagtcctgatgccctcaggccctctgcccaggacatcagtggtgcccaggtaagtgccccaccaggtgtgcacctgtgtgtatgtatgtgagacacagagagagacagcaccccagttcaggcttccccagccctgaccctgggatggaatctccttgcactgtcccatggttgttggcagtggtggcaggggcagcttggaatgctgggttcactggccctttctcttgaaaaacataaagaccctgagttctgtcccccgatttgcttcccacaggcctaccacagccccccaggaaactcggaatgtaagaggctgatggtcaggggagaagagagggaggcagggagggaggctcagggtgggacctggggcccggcctcttctgatcagacctcctgtatgccagggaacagcagatgctgcctctaaaggtgagtaaaggctggtccaaaggtagtgagttatcccaactgattgttcacagtcagttacagatcaaactccttgttctaccctttccccacttctcactactgcacttgactagacttaaaaaaaaaaaaaaaaaactaggtgaatgcaggcatcttcagcatgaatgcaggtggtcctgccagggcctgccccagccccagccctgcaggccagactccctcaggccccaagttactgaggatgtccctgaagctctgactccagctgagatcaggcctgaggggaccctcttgggcattttccggtgcctgcaccaaatcaggaagctcctagtctgtgccccaagatcacgcctcatttggaggtcacacgaggcctggctggtgggtcctgccagggcactggatctggagagtggaggaagcactgggtgccggggtttgggctcggggccatgtacgcctcctcctaccccccacccccgcagctgtcc

SEQ ID NO: 23834 - DNA, 2300 bp, Homo sapien
tatgtactagatactgtgctaaagactctacttgcactatttgaatccttgaaacaatcctatgatgtactattaatattccaattttacagaacgaggatactgatgcatagagaggtcgtgactccaaacccctactcttactgtattacacctacacactattcacaagtgagagaagtaggtaagcaactatgtacagctaaatctcatctccttggcaggcctagccccactgtggagttggtagcacaggggtatcaggatttaatgagccaatcattgactttacgctccttgttctgactccctaataaaataaccttctagttatattctggcttcccatatagatttttctgctgggagataatgcactgaccagcctacacacgcattttgttccagttgacaattttattacacattgtaagttaataaattggcattctcctttaaaaaataacaaaaaaatttaatagtcttatacagttactttcccatgaagggttagcttgaaaagtaaaaagcaacgaataaaaatatcatcacctattgtctcttttgtggtcgaaccttttcttgctgcctgctttgagcgaccgtggatgtggtcactgagtctggggaggagccctttatcttctttgtggatgcccccagcacagcccaagtgcttcctttgtttcccactgagcctttagcaaatcccacctttcctcctgcaccgacggagaggattgttcttgggaatgcaccttgttctactgccgccagcagtaggcagctggagactgttactaggggtctccttcacctccccagcgtaaagtacatcccatgctaggagcaggccgttccctgagaacctcattaaacccggcgttcttgtcacgcgctccgctcagggccaccaggccaccagcccgaccagacctgcaccgaggcccagccccagaacaggctgcagagacccccgcccccaaggcgggctccctccaaacgggactccatactccttgctggctcaagttttgtttcgctctttttccctgtaattcctttattgggcaaaactgggacaaacgcaggtggacattttaaagtgaaagcttcatgaaacagcccattccacgccgtcaagagatctgcttaagcacattcaagggaacgaatagcccccacccaccaaaaaagaaatgttcgttccatattctcctgaacagaggattgaaacatcgattcccccccccttcaaaggaacaggaaggccacggggcaaggacggacttgggagcggcctcctttctctctggagggaaaggctggagcgctgcctccacttttaagtccacgaaccacgaagggtgaggatccctcagaaactttagcgcaggggagcgggcaggagggcgattgtttaaatcgatggcagcaccttcattaatctgctttccggccatcttcagcagagccattcaccaggaaacgactagaaggtgggcctgcgcccctcagatatcccggggccggcaacgagccgggcagggacgccgaaggaaggccgtgaggagccctcgctggccggccaagatggccaccttcacatggccgaccgccaccggctccctgccacccggcatctagaggcgggacggccagaaagaccccagccgcagcacaaaacctccgcgattcccgccgcctccgctgggggacgcgacctccgggaaagctatcccggccaacggtcggaagggaggtgccatgtcaccgcacaggggagcgggtccagcaagccccagtcgctttttctcccacatcaaacaaggaagagcaatcccccacgtctcctcgcgtctgcatttttctcctagctctagcggctcaagatagctgaacggtctctggagggccggattgccacggcacctcccgcggccgcgcagtgtggttcagcccggactccgcggggcgagctgcccttcctcccccgacccccgcgcaagtggtgcattggcgcgcggcgccgaggggcggggcccgagccgggcgcgcgcgggcgctgctctataaataccgggccgcaccgcccgctgcttcgttcgctccgcgccgcccgcctgctacgagtagaacgctgtccgcagcttgcgcatttcgcagccgctgccgcctcgccgctgctccttcgtaaggccacttccgcacaccgacaccaacatgaacggacagctcaacggcttccacgaggcgttcatcgaggagggcacattccttttcacctcagagtcggtcgg

SEQ ID NO: 23835 - DNA, 2300 bp, Homo sapien
caaaaaaattttttaaaaaaacagctaggcgtggtggcacgtgcctgtggttccagctacttcggaggctgagacaggaggattgcttgagcccaggagtttgaggctacagtgcaccatgatcatgccattgccttccagcctaggcgacagagtgaaacttcgtttcaacaacaacaacaacaacaacaacaacaaacaacctagaggagtgtcttcatgggtggattatgtaccttaggcatctacccagccactggagtagccaaggcacattcgtgctgtgaatgtgctttgatgtgttctccagtgggctggtgcttgaactttctccatgtgtttgcagactgctgttgtctgaggagctgactagcctgctggtcgtgcactggggtgggctgctgcttgacctctcagctggtttcctgctcttttttgatgtctcaagatccattggactgttctttgtgtcctacttccactgcatgaattcccagcttttcagcattggtcagtacctgtagcctgggaggaaacaggaaccacagttttgcaggaagggactagccagaggcattgtttgggagtgggagagggtggtgtgagcaggagctaaattgaacccagggcagtcactatgaagtaggcataaatggggataagaggactggggcttctgggctcagttagtatgttgtacagtagggaatctccaggaagaacaaatatcttacagttaagaactactttgtggccgggcttggtggctcaggtttgtaatcctagcactttgggaggccgaggtgggtggatcacctgaggtcaggagttcgagaccggcctgaccaacatggtgaaaccccgtctctactaaaaatacaaaaacttagctgagcatggtggcgcatgcctgtaattccagctacttgggaggctgaggcaagagaatcgcttgaacccaggaggcagaggttgcagtgagctgagatcacgccactgcactccagcctgggcgacagagaaagactgtctcaaaaaaaaaagaagaactactttccttttcagtggaacacctgggagaagtctcctaagggaacggggttgaagaggcccagccaaactcctgaaatatgtattttctccctgctttcctaggtatgttctcctacgtcatgctggccagcagccctctcttctgctcccctgagtggcctcggaagctggtgtcctactgcccccgaaggttgcaacaactgttgcccctcaaggcagcccctcagcccagtgtttcctgtgtgtataagaggagccggggcaaaagtggccagaagccagggctgcgccatcagctgggagctgccttcaccctgctctacctcctggagcagctattcctgccctattctcattttctcacccaggtttgtaggggctgtggagtgtacagcaaaggctggacttagaaaggaacggatgacaatagttgggaaagaatggggctggttttgcagccccttcttggtaggggatggggtcagtgtgagaagcattgagctgattcccctctgtgctgccttcccagggctataacaactggacaaatgggctgtatggctattcctgggacatgatggtgcactcccgctcccaccagcacgtgaagatcacctaccgtgatggccgcactggcgaactgggctaccttaaccctggggtgagatgtctgatgctgacaatttactgttcttcagagcccccttgtgctttggggtctggttttgtcttacacacaccataaagcaaaacaaatttgagtctgctttgccttttctcaagagccagattgaactatcttttatgtgggttgagatagggcaatgcattcatttccttgaactgagattagattcaggaaaagtaagcaccactagcccaacaatgaaaaattcattcccaaaggcaagttccatttttttctagccagaatgggcagcaggcagggatctcgttgtgccattggcagtgcatgacatgtcttggaagttgataatgatgaggtgggactaatatgggggtttggggcaggtatttacacagagtcggcgatggaaggatcatgcagacatgctgaagcaatatgccacttgcctgagccgcctgcttcccaagtataatgtcactgagccccagatctactttgatatttgggtctccatcaatgaccgcttccagcagaggtgggcaaggggagcagagagtgggaaaaaatgaagcacagttctttttaccaagatgaacag

SEQ ID NO: 23836 - DNA, 2300 bp, Homo sapien
cgtattggtcaagctggtctcgaactcctgactttgtgatccacctgcctcagcctcccaaagtgctgggattacaggtgtgagccaccgtgcccggccttttttttttttttttttttttgagacagagtcttactctgtcacccaggctggagtgcagtggttcgatcttggatcactgcaacctccacctcccgggtacaagtgattctcctgtctcagccttctgagtagctgggattatagacgcctgccaccacacccggctcattttttttgtatttttagtagagacggggttttaccatgttggcgaggctgatttcaaattgctgaccttaagtgatccaaccgcctcggcctcccaaagtgctggaattacaggcgtgagccaccgcgcctggcctcaaaaaaaaaaattttttttttcaggacggcgtcttgctctgtcgcccaggctggagggcagtggtgcgatctcggctcactgcaagctctacctcctgggttcacgccattctcctgcctcagcctctcgagtagctgggactgcaggcgcctgccaccacgcccggataattttttgtatttttagtagagacggggtttcaccgtgttagccaggatggtctcgatctcctgacctcgtgatccactcgcctcgtcctcccaaagtgctgggattacaggcgtgagccaccgcgcccggccaaaaaaatttctaatacggcaaatattgaaagatataatccacataaacaaagcttttagggtcttctataatttctaacactgtaaatggttcccaagacccaactgtttgagaaccgcttctctgggatgccttcttcttttcctgctggctaatcccagtggagagatttaggtatttaattctgctccagactcacctctgagaaccttccctgatgggccacactctactcactgcccttgctctgtatcccctcttcagttatgttgttcctgtttccctggctgcttttaattttctttctttcttttcttcccgccttttcttttctttctctttctttttcgttttttgttttttgagacggagtctcactctgtcgcccaggctggagtgcagtagcgcgatcttggctcactgcaacctccgcctcctaggttcaagcgattctcctgcctcagcctcccgagtagctgggattacaggcgcacgccaccatgcccggattatttttgtatttttagtacagacggggtttcaccatgttggccaggctggtctttaactcctgacttcaagtgatccgcccgccttggcctctcaaagtgctgggattacaggcttgctgccgcacccggcttgtttttttttttttttttttttgagacggggtctcactgtgtcccccaggctggagtgcagtggtgcgatcacagctccctgcagcctcgaactactgggctcaagcgaacctcccacctcagcctcccgagtagctgaaaccacaggagcgcgccacgacacacagctaactttttttttagtgttttttctttttttgttgttgccttttttttttttctttatcgatcctcccgcattggccttccaaactgttgggattacaagcgagagcagtgcccggcccctactgctttgaaacctcggttctttgcaggtcctggaaaagaaagtgaaggggtcgtgcaatggctcaaaacccaggcaacatttccaggcgcgtcctcaactcggcgtcactctgacaaaaagtttgccctttgcgcccgatccctcacaccagagagcaccgcagggacgcagggacggagaggactaatggggtcggggaggacccaaggaagttggggaactcagactcttttcagtgtttaaaaagcagaggccccctcggaaggcataacaggcgagtctaacaatgcccctggagatcaacggcactaaggggtacctttgccccgctccaaggctccttgttccgccccctgccgccaagcaaggaatccggcgccgccggtcgtgggtagtatttacgacagtgctggcgctttgcggccggccgcacagccgctgacgcgtcgggaggcggagcctagggaagcaaattctcctggcggcctccgttcagacgcggcagctgtgacccacctgcctcctccgcagagcaatggcggtgtctgccgggtccgcgcggacctcgcccagctcaggtaggcttaggaccccgccctccggcggagagttcctaggagcgctggtctcagaggggcgggggcgggaggac

SEQ ID NO: 23837 - DNA, 2300 bp, Homo sapien
gatgacagagtgggaccctgcctctaaaaaaaaaaaaaaaaagctacaggggtccgaagtttgtttaaagcttttaaaaaggcatttgtggccgggcgcggtggctcacgcctgtaatcccagcactttgggaggccaaggcgggcggatcacctgagaggtcaggagttcgagaccaccctgactaacatggtaagaccctgtctctactaaaaatacaaaaaaattagccgtgcctggtggcatgcacctgtagtcccagctactagggaggctgaagcaggaaaatcgcttgaacctgggaggcagaggctgcagtgagccgagatagcgccattgcactccaacctgggcaacaagagagaaacatctcaaaaaaaaaaaaaattatttgtgtctggatgtggtggctcacacctatgatcccaacactttgggaagctgaggagggaggattacttgagaacaggagtttgagaccagcctgggcaacatggtaagacccccatctctacaaaaagttttaaaataaattagccagacatggcggttcgcacctgtagtttcagttactggggaggctgaggcaggacgatcgctgtagcccaggagttcaaggctgcagggtgctacgatcatgccactggactctagcctgggtgacagagggagactatctcaagaaaacaaaacaaaataaacaaacaaaaaaagtgtttgttggagaagctgacatttcctccttggaactgatttcttctggaatgggtcaagaatgttcgttcccttctgaatgtccctgttattgttcttctgtcttgataaacactgtcaaggaagatcagattttctctggcctggagccaggttagtggaaaaatcctttgccttgggccccctgctctggttcactggggcagtcctctgatcactgactgggatcaattacctctgcggtagcccctaaagggaaatgcagaattgctgaactctggaagggaaggagaggtttggtgagccatcattatagacactgtgctagtggcattgcactgcacatgctatctttttgcttctttttttttttttttttttgaggcagagtcttgctcttgtcacccaggctggagtgcaatggcatgatctcagctcactgcaatctctgtctcccgggttcaagcaattctcctgcctcagcctcctgagtagctgggattataggcaactgccaccacgcctgtttattattttgtatttttagtagagacagggtttcgccatgttggccaggctggtctttaactcctgaccttgtgatctgcccgcctcggcctcccaaagtgctgggattacaggcgtgagccaccacgcccggcctctttttgcttcttaccagcaccatctgagctaagcatcagcacctgcaaactccacagaggtgaaaagtttccctgaggggcctgtaactagtaacccagaactttctgaatcagagcccaggatcacagtattccagacttcagggattttagtgctttctgccacccagggacctgggaacaagtgttatccagcaatacattttcataactgcattttgtttccctgtgagctaggcctggcatggttgatctcagtctctagaaactggagtcagatattcaagacattacaaggagatggctggtggggcatcatggctcctaggactttgggaggttgaggtgggaggatcgcctgagcccaggagtttgagaccagcctgggcaacatggtgagaactcgtctctatttaaaaaaaaaaaaaaaaaaaaaaaggctgccctttctagatcaggaggtccagcctctggaaacctcggagggctgcttgatctttcttttctaattcctgacaagttagaagacctttggcttctgagaaccctattactttaagtttaagctcttgtttgggaagccactgggaggacagtgaagaatgcccgcctacctggggaaacctgagttaggtgtggctggagcgactcgagatgcgaggtgggcgggggcaggctgaaagttggagcaagcaggaagtgaactgagggccaccctgggaggaagccgactaggcgaattcacttactgaccggcctgggctgctctgagacatggtgagccaactgggaactaggaaagggctggtttaaagaggagccagagggggcttgggactgggggttggctgtgtcgggggaggagagttggtggcaaagttagagggctgggccagtgctgctatggcctctcttctttga

SEQ ID NO: 23838 - DNA, 2300 bp, Homo sapien
tttttaagtgttcccattgggtcctgccatggccctgtagtactcttcttctggaattgttagctgaggcatgaagctggttgaaatcctcctgcctcttccaccagagccatctctcttcaacgaccctgtagtctagagccgaggggtggaggaaatggactgctattcctttccttgtgcttctgcatgttttatttgtcttttctctgtccttgtcttctgggacttagcaaggcctctgggtctcagttgtcctgagggggcaagcatctctccttggcatcccatggctgggcacagtcagtcagtcagtgtcacaggacagggccaatggctcttcttcccctctgtgcacaataagcctttctgtcttcaggcccccctcctccctaccaggttccaccatcactgtcactttttccagtgcccagtccgccttggtttgcagggagggttcttgctatctctgttcctgtttcctccacaggctttccagaattggaaacaacctgttgtcaggaagaaggggaagggttgagagtcagggtttgggaccagattggcaagtcaggctctggaagaatcatgctctgaaatttggggagggaggaggaaaggtcagaaaagacccttgtgatatttttatttttattttttcagagataggatcccactttgttgcccagactggagtgcagtggtgtgatcatggctcactgcaacctccatctcctgggcttaagagatcttcctgcttcagcctcccctgtagctgggaccacaggtgtgtgctaccacacctggctaatttttgtattttttgtagagacatggtctcactgtgttgcccaggctggtctcaaactcctgggctcaagcaatcctaccaccttggcctcccaaagtgctgggattacaagtgtgagccactgtgcccaggcttggggtagtctttgctacaacatgttaatcctctctctcctggattcaaggtgtaaggaactgaagtgaagcttctgccttgggacccaggctgtccaaggtgggggtgagtgtctgtgaaaccctcttggtctgggacttctgtattcacagaggctcagccccagagagggaaactttcaattctgttggtcaagagaggcctcacttgagggaccaggcccagtggctcacacctgtaatcccaacactttggaaacctgaggcagaagaactgcttgaggccaggagttcgagaccagcctggtcaacatagtgagaccctgtctctctcaaaaaaaaaaaacaaacaaacaaaaaaaaaaaaacgagggaccttattttaagatgtccgaggcagcttggagtagtggagaacaggtagctggtggtttctctgtagcagtgagaggacaggatgggtagattcggctcaggaaggctctgaagtggtagtagatacaccagcctcccccatcctctgactgaggagcaagtgcatggcgggtgcatgacagcacagagctgcacttgccctcatggtgaggaaagacatacagaaaggctagagctagtactttgcccatgtggggctgctttctttttgaatagaggtgaaagtcacacaatgtacagtttgttattttaaagtgtacagatcagtgacatgtattcagaatgttgtgcaaccaccacttgtctttagtttcaaaactttttgggtgcctgtttttggttctgggtgagatgcactcaccagggtgataaagaccctgcctggcttgttcatggcgtctccaggacctagtatggtgcctgaccgtggcactcatagggtgtttgttgagtgaatgaatgatgccttttcagctgaactcgagctagaagactccagggctcactccactgtgcccattccacagatccggccccgaggtgtgcccgttcaccaggcagaggtgtcatccgaattcaggctcctggggcccgggagggtccgactctacggacccaggtcgctgtggcccatcgctttcgatttgacttggtttctgtcgccactcgcggaaggcgcgccccccgccctcgctcggcggcccgccccgccccgcccctgctcttcctccggggccgctggcactgcggccgctccgcaggcagagaagccgggagcgggcgaggcggcggcggcagcagcgatggtgagggcccaggcggggccggccagccctgcgacgggcagagggcgagtggcgagggtgggagagaggagtccaaagtccgcgggctggggcctcccctggggcccacgaggg

SEQ ID NO: 23839 - DNA, 2300 bp, Homo sapien
tctattatttttctgtcatcttggggatgcttagaggaccaatgagactgtagatgcgatgacaaagaagaaagcacttcaccaattttttttttttttttttgagacagagtttttgctctgttgctcaggctggagtgcaatggcactatctcagctcactgcaaactccacctcctgggttcaagcaattctcctgcctcagcctcccaagtagctgggattacaggtgcccaccatcacacctggctaatttttgtatttttagtagagacaaggtttcaccatgttggccaagctggtcttgaactcttcacctcaggtgatccacctgcctcggccttccgaagtgctagaattgcaggcatgagccaccgcgcctggcccaaaaaatttttcataaggctctcaccttcagataaatggtttcccctctgaacacttcccactcctcaatttctctttccacattctatctacctcaagctttacatcagactgcagatgggggaagtgacagcaagagatggggaccttaaagcactccttggtattcccatctccctccctcccttccttcctttttcgacggggtctctcctgtgtcttctctccctccctctttcgacggggtctatgttgccgaggctggtctcgaactcctgggctcaagcaattctcttgcctttagtgctgggattgcaggcgtgagccaccatgtccagcctgaattcaggcttttcaaagctacagggccatataggccagggaggcagtgccttcagggccatagcaaagatcattgggcaaaggcatggaagaaggaaataaagccacaccaagactgtggaaacagggcagcctctgcctgggctacttagctgcagttcaaactcaggtgtgagtggcaaggggaattcagggtcaagtgtgtaaaataagcagttccttgctgggtaaagtgagcgctactgacagaaaccagaataagcctgagttgtgtggagcttcaccccttacagagcgtgttagttttactgagcgcattagcgtcttcctctcttgggaaagatggaggaaagcacttggccctgcagctggtctgcaacaccacttacagactgcaaatttgggcaagccacttctgaggtaaaaagggcataatgacgcttagctcctgggtctattgaggggatgatcgagcgtgtaaaacatacatcagactaacagttctagatgctaaatagtacctatcatccaaatcattgagtgcagtggttcttaaacctgcttcacctgcataatttatacaagtgccattgcccaggccccaccacagatcagttaaatcagaatcttcgaaggtatcagacacgggtgtttctaaagctcctccgcgcccattctctcctctgggaattcatgtgtagccaggaatgaaaaggtcttagtacaagccagcagttttacagaagctagggatagcaacgggctgaaggtaacagtcccatgagctggttgaggccccaggttctccggcaaagagatctctctcagttggggaggcttgccccaccctttattattatgcctaacacataagaaatgcgcaggaatcaaacgcaaactggtgaaccaactagagggccgcgggggcagaagtgtccggcggggatccggacagcgcatccggaagcgccatgggccaacgctcgcaggaacctgaacccctgggccagcgccgcctttgctcgcagaggcctctagcatctgtactgtcgaagccctctgagcttcagggcagactgaagagccttacacaccagacacttggacgcgatcgcgccagaaatccccgggaattcagtcttggctccgactccaaaacaaatgattcctcaccagccagatctccatcattggcgttagtctctggtcacctgacttgttcaagccaatgagagggggccgaattagtacttccgctttccgtgctgtttaacgagccactatgcccgtccctcggatactctgattggccagcctctctcagctcgtcagtttattggccagcgccgctaggccgctatcgagcagggtccgagggctgtgtcagaaggctgggcagccatggcgtcctatttcgatgaacacgactgcgagccgtcggaccctgagcaggagacgcgaaccaacatgctgctggagctcgcaaggtgggtgcgcggggcttggggatagggtccaaccagcaggtttctgggctggggctggctggagaaggcggattaccaggggca

SEQ ID NO: 23840 - DNA, 2300 bp, Homo sapien
tgacctggatgaggaagactgagcctgtttcctcacctataaaatggtgaaaacaatacctgcctcactcctgggaggatgaaaagagacaatgcatataaagcactcagcagagtgcctgccccacagtaactgtcaagtagtgttgttattaagtggctcttaggatacttattgttcctgagacccaaggacagctctttgcttgaggggctgtctgggaggcccttagatctccctgaccggcccaatgtccaggccttacctgatgagggggacatcgtccagggtgcagcaggtcttgggacccccttgctcagcagggtcaggagggcaggactcgttgtaggacctggcaggcaggacagggagtagactgggggaagggactgcccccaggcccttggcctatagcctcaggcctcaaagaggactctctcccagacctcccctacagggacagaagatcccactccccagtgcccgcctgaagcagtaaccaaaggggcaaagggatagtgggaagtgggtaggtggcaagaagccatgcctggggaccaatttcagagaagagcagtgaggctcagggttgcagtctggctcgtggcagcctcaggcccaagaggggacagagatgaaggaagctttagagcaaggttgtctgcagagtccttcataccagttctccacagggcatacatggtggttcatcacagccatggcatacctgtgggaacagaactgtcaccctggcagccttcccgagccccactcaacccaccccatgacccttctcttcaaccttgatttctggccccattcagcctcattattgttgctggggactcaagttgaggtccctaaggcttgatgccacaccagcacctgcagcatgcccccagctacaggccctctggaaattgccctggctagaagtatatttgtcagggccaccctgctggacagcagtggtgccagcttgtcccaaggggctgtgtgcccaggcaccaagtcaggcttttgagacacccagagtgaccctgggtaccaccgtggctatgacaggacaagagactttgtgtgcgtcatcaagctcctgttgccccccgggcacccccctttactcacacagtccatatgccagtgatggagaacgctgacaggctgacaggcaggaggatccaggcggtcatgagggaggggagccagggtggtggtggtgttggggggaggacaagaggtagatggggaagtgggggcggaccagctaccttgagatgtttctgccacaaccatcagctgtcctggcctggtggagagagatcaaagtccaggagtgggtaactggccgggaagggggaggggaagggggtcaacaccttatccagcgctcccgttgggtctctgagcgtccaaagtttgggctgagcccacggcagaacgtgaacaccctctggcactgggggcctccgcggtcaacccaaatgccaccggcgtgctgagagacgcaggcggaccgtaacatctggaagggagttaccctccttctgagggaccagggctgggagaagggctggacaaccgaagaggccacgccaaggagaggctgggtgccggcccagtggagcggtggcgagtcggcggcgcgcaggcaaccacctgaccatcggcgccctgggcgaggggcgggttcacgcggaaagcccagcccggcccggcccccgctcgcctgggcgcggggaccccggctggggccggaccctgcggccggcgaccccccaggacccgggacgcgagagtccccaggtgattcctggaagcccggaggaagggaaggagcccagtacgcacctccccggagcgccccgccgccgccgcaccctgctcggccccctcgtggcgccgactctagctgcggccctcggagcagccctgaaaggtttaaagggccgagcggccccgcccctggaggccccaggcctcgccgcgccgcccgccgggacgtggagtccgcgcagccccggcctcggtgcccgcgccctgcccgagactacaactcccgagcccccgcgcccgcgtcacgggggaaacgtgggcggtgtcccaacttcggaggacctgggcgcggagggctgtggcgtgaagaccgctctaaaaccgagatgactagaggttccgtttaaccgattcctgccggggaagcgtcagcaggtggggatctcggggcagcctgcattccagctctacctgggattgtcgccgtgcacatggctggaggagcgtctctccgccactgcgca

SEQ ID NO: 23841 - DNA, 2300 bp, Homo sapien
atagtgttaagaattgcaaagcttccaattagggttcacagccccattgggcagataaggtgcctacgcagtgggaatgcagttgggcaggaagatggttcctgtcaattagcaaggaagcacacccttgtcctgaggcacaaagcatagccagcggcaggtgagctggattttatcccccactggtttattcagccaggtgtgcttgtacagtgatcactacacagccatacttcttggccctgttttaactacttgtcctaatgtgtttaaggacagggctctcccgctgggcacggtggttcacatctgtaatcccagcactttgagaggccaaggcgagcggatcacctgaggtcaggagttcaagagcagcctgaccaacatggtgaaaccccgtctctactaaaaatataaaaaaattagctgggcatggtggcaggcacctgtaatcccagctactcgggaggctgaggcacaagaatcacttgaacacaggaggcagaggtaacagtgagccgagattgcaccattgcattccagcctgggcaacaagtgaaactctgtctcaaaagaaaaagggctctccaacaggttttctgcttccatttctgctttccactgggtccaagaaggtttctccctcttcaagtcattgtgcagtttattctgctctacttctctaaagcacaggaccctgttgtttcacatagcctttgcctcaccagtgttgccaaacttcagctccccacgctgggcaacctgcgcctgtgcaccattcaggtgatgatctgtcatctcacaagggctccaacagatgctgggaccgcctttgagacagaatgccaggcacacttctgatatgtgaaagtatttccacccttgcaataatttaagaaacatccgggccaggcgcagtggcccacgcctgtaatcccagcactttgggaggccgaggcgggcggatcacgaggtcaggagatcgagaccatcctggctaacatggtgaaaccccgtctctactaaaaatacaaaaaaattagccgggtgaggtggcgggcgcctgtagttcccagctactcgggaggctgaggcaggagaatggcgtgaacccgtgaggcggagcttacagtgagccgagatcgcgccactgcactccagcctgggcgacagagcgagactccgtctcaaaaaaaaaaaaaagaaaaagaaaaagtaaaaaaaaaagaaacatccaggaatgcactcatagcctgtaagtttttggtgaagctggtcagtaatttttcccacactatcctgtttccttttcccagattcctccgggtctctcaccttcccctctttgcttaccaacactggccatgttaatccttacctactctacactgacacctacatgtgtctatttagaatggatgtcctctggtctctgccgtcttatttcaaataagtgttgatcagtcgggaaacacgtcttggacactgatttctggctagtacattgtgtacttgtatgcaggaaagcaaaaagtatctaatgaaagcagccctcctccggagtttgctgagccacaggaaccataagccaaatcccaggcgcttggatttcttaagaaacagccaagtctttgtgtctgcttctctggacccaccgcagccctggccagaggcaggcatggggcgccacgttgagagagcttcctagaggactcaccgttggccggtgcaggctgcaaaatgtgcgcagtggcggagagacgctcctccagccatgtgcacggcgacaatcccaggtagagctggaatgcaggctgccccgagatccccacctgctgacgcttccccggcaggaatcggttaaacggaacctctagtcatctcggttttagagcggtcttcacgccacagccctccgcgcccaggtcctccgaagttgggacaccgcccacgtttcccccgtgacgcgggcgcgggggctcgggagttgtagtctcgggcagggcgcgggcaccgaggccggggctgcgcggactccacgtcccggcgggcggcgcggcgaggcctggggcctccaggggcggggccgctcggccctttaaacctttcagggctgctccgagggccgcagctagagtcggcgccacgagggggccgagcagggtgcggcggcggcggggcgctccggggaggtgcgtactgggctccttcccttcctccgggcttccaggaatcacctggggactctcgcgtcccgggtcctggggggtcgccggccgcagggtccggccccagccggg

SEQ ID NO: 23842 - DNA, 2300 bp, Homo sapien
ggggtctgaatagggatccctttcctgtaacatatacacccatgaagccatcaccacaatcaagagacgggatctgggcccagtacggtggctcacacttataatcccagcactttgggaggcctgaggcaggaggatcacttgaggtcaggagttcaagactagccttggcaacatagagagaccccccccatctccacaaaaaaattttaaaattagctgggcatggtggcatgctattcaggaggctgaggcaggaggatcgtttgggcctgagaggtggaggctgcagtgagcagtgattgcaccactacaatccaacctatgcgacagtgagatcctgcctcaaaaaaataaaaaaataaaaaaaaatttaaagaatctacccagccccaaagatatcctcttcctcccagagaacccccacaaaaatcaactgatctctcggtcactatagattagtttgcacttcctagagtctcatataaatggaatcatacagagtccctggcctctttcactgggcatatttattttatgatccatccatgttgttgagctacagatcttcctttggattgctcagtaatattccatcgtgtggctggaccaccattggtccctgttttttgtttttgttttttgttttttgatttggaggttggactgcagtggctcgatctcggctgactgcaacctccgcctcccgggttcaagcgattctcctgcctcagcctcccaagtagctgggattacaagcaccggccatcaagcccagctaattttttgtatttttttttagtagagacggggtttcaccattttggccaggctagtctcgaactcctgacctcttgatctgcccgcctgggcctcccaaagtgctgggattacaggcgtgagccaccacgcccggctctttctttcttttttaatgtatttttttcttgtagagacgatgtctcgctgtgttgcccaggctggtctcaaattcctccctccagcgatactcccacttcggcatcccaaagttttggaattacagacatgagccactgcatccagccgtttgtccctgtcctaatcatgaattcctgattttgacttttgtaaaaggacttgagaattttacacgctgtgacgtgaacccagtggtcagaaaaaatagaaaaaaaaaaaaaaggggccgggcacggtggctcatgcctgcaatcccaacactttgggaggccgaggcaggcggatcacctgaggtcaggagttcgagaccagcctggccaacgtggtgaaaccttatctctaccaaaaatacaaaacttagccgggcgtggtggcacgcgcatgtagtcccagctactcgggaggctgaggcaggagaatcgcttgaacccgggaggcggaggttgcagtgagccgaaatcacgccaatgcactccagcctgagcgacagagtgagactccttctcaaaaagaaaaaaaaaaggaaaaataaataaaaaagaaaataatacacccgtaggtccctcaaaaaccctgggtcctcccgcggggacagttaagccatcggcgccgtgagcaggaggcaagccgggccaggagagccttcgcggcgcctgcggcctgggcgccgctgttgccctgcctgagcacttcaaggcctcacaatccatttgaggtaggtgctctaggtgttcccatttactaatgaggaaactgagaagtggcagcgttacacagtcagccaaagtcacgcagatggcgatggattgcacagcatcctattaccagaaaaaagatgggaaggcaccgccgtaagcatcgagttgtgttatagatgatttgcatttttctgaaggttctggtatcagctgtaagccgaagtccttgtttcctattgatatgttacgaaaaaacaaacaaaaaaaaacaaaaacaaaagccctccgtccggggggtggaagtcaagcataccctactccacccgacccgaccagacccgaaaactccgtgcgctgcatcgcttggccaggccggggcctcccagaccggaagtcaggatgcggggccggaagctgagcaaggggcggcgcggagctctgtgggcgggtggctgttgttggggccgtcgaggcggcggcgactctgcgtccccggctcctgatggaggcggggccgcatccccggccggggcactgctgcaagcctggggggcggctggacatgaaccacggcttcgtgcaccatatccgacggaaccagatcgctcggtaccgccccgccctgcgccgccgccgccacca

SEQ ID NO: 23843 - DNA, 2300 bp, Homo sapien
ataagtgtgagccaccgtactgggcccagatcccgtctcttgattgtggtgatggcttcatgggtgtatatgttacaggaaagggatccctattcagaccccagcagagggttcttggatcttgtgcaagaaagaattcagggtgagtccacagtgcaaagtaaaagcaagtttattaagaaagtaaagtagccaggtgtcgcggcttatgcctgtaatccctgcactttggaaggggaggcgggcggatcacttgaggtcagcacttccataccagcctggccaacatggtgaaactctgtgcctactaaaaatacaaaaattagccgggcatggtggcaggtgcatgtaatcccagctactcaggagtctgaggcaggataatcacttgaacccaggaggcagaagttgcagtgagccgagatctcaccaatgcactccaacctgggtgacagagcaagactctgtatcaaaaaaataaaatgtaaagtagtgaaagtacagctactccattgacagaatagggcgttcctgaaagtaaaaggaggaacgcatccaccatggctacaatgcttgtttatatataggataaaaagatcatggggagatgtgctctgctacaagggtttgtgataaaggattaattttattattatattttgcaagaagaaatattatctttaaagcaaaattaggaatgcctttattctccagatattgggatattaggacactcccaagtctggatctgtttagtaaacattatctctctgttcccttaactgtagacatctctaggctaggaatacctaacttcctgggaatgcagcctgtcaaggcccagcctcattttcctaaccctcactcaagatggagttggtctggttgaaacgcctctgacatataccgcaagtcagaattcagtaaattgcacacagtgtggtgtggtgtggtgtggtgtggtgtggtgtggtgtggtgtggtgtggtgtgggtatgacagagtttcactctggttgcccaggctggagtgcaatggggcgatctcggctcattgcaacctccgcctcccgggttcaagcgattctcctgcctcagcctcctaagtagctgggttaacaggctcgtgccaccacgcccggctaatttttgtatttttagtagagatggggtttcaccatattggccaggctggtctccagtcctgacctcaggtgatccgcccgccttggcctcccaaagtgctggtattataggcatgagccacagcgcctggcctaaattgcacactttaaacatgtagtttgttgtatgtcaattatacctcaatggaacggttcaaacaagcaaacaagttcaaggcaggtcctgaggttagagctttattagcttcatggtaaatctgcctttaccgggcatttgcgttttcatggtaccaagaaccttctaaaagtagaattagggctgtcaaggggatgatttgggaatgtcgcctagttttcctgtgcaggattgtcagcccccaagccgcggagactgtgggaaacgacctcacggtggtggtttcgaggcacaaatctggggccgaatgacagcttctttgtttttgagacggagtttcgctcgttgcccaggctggagtgcaatggcgcgatctcggctcaccgcaacctccgcctcctgggttcaagcgattctcctgccttagcctcccgagtagctgggattacaggcatgcgccacaatgccgggctaattttgtatttttagtagagacggggtttctccatgttggtcaggttggtctcgaactcccgacctcaggtgatccacccgcctcggcctcccaaagtgctgggattacaggcgtaagccaccgcgcccggcctgacagcttttatccagaaaactgtcgccagtaaaggttcccgtctcagtaaactgtaaacgacagtaggcccacagaaggttctaaggggagaggaagccagtgcaggaacagcaccgcccacaaattttctgcagcgtgatttgtccccagtggcgactcgtagagagttcggggctcgctaccagcccctctcctgattggccttgtgccgcgcgctcgagcgtgcttggcgcctgcgctggacgactcggccggtagtggagatgtccggccggtctaagcgggagtctcgcggttccactcgcgggaagcgagagtctgagtcgcggggcagctccggtcgcgtcaagcgggagcgagatcgggagcgggagcctgaggcggcgagctcccggggcagccctgtgcgc

SEQ ID NO: 23844 - DNA, 2300 bp, Homo sapien
gctaatttttttatgagagaacttcatgtggaggattcattttatgaatggcataatatttgttttttgcggatattaacatgttccggtagaaaataatgaaaggaaaagcaaacctgatctgtgtgttctagtatctgcccttctattacagcttttcacccttccctacaggccggggtttgaagtctcacgcctacattcacagtgtccagtttagccaccatgttttcctcaacctccacaccctcaagttttactgccttccagacaactatgagatcatcgattcctcattggaggatatcacggtgtgtgtctaagagggttggtttggggtccattctttaatgagccatcccagggctcccaggggactgccccacctgaggacagggaagaatctcagtccctttaggcatcgagaggctgctttctcttttgggaagaactggggaaactgagtaaggtcagaattcataattgcagcctgtagtctgtaacttaactgtcatttctacttgtaacattgagggctaggactgaagaaatatgggtgtattctgatggggtttaaagtgtttttgtgaaattattcttctacactgtgaagtagggatatgaattggtcctggtgtaggacagtatttaccaagctgcacaccggctcctggctgcttttaacatacgccgtggccagagcatccagccacagatatcttatctgtgggctctagtttgtgacctgtgccaagagacactcattgtactgagcatggaaagtcctcttgggtttgattagtgttgggcttttgattattattttccttttcagcacgtggggtgtattcatggtgccatgtgctctgttcttgtttttggttttttttttgagacagggtctcactttgtcgctcaggctggagtgcagtggtgccatcacagctcactgcagcctcgacctcatgggttcaagtgatacttttacttcagcttcccaagtagctaggactgtaggcgttaccatcatgcccagatacatttttaaaattttttgtagagatggagtctcactgcattgcctaagttgttcatgctctgtttatttttaaggaaaacgtggtatttagtctttgaaatactgctttttctacttgtaaaagttgtataagcctattattaatagttgagattaaaatagttatggacaggcttggtggggaggcccacacctgtaatcccagcactttgggaggccgaggcaggtgggtcatttgaggtcaggagtttgagaccagcctgaccaacatgatgagaccccgtttctactagaaatacaaaattagccgggcatgatggcacatgcctgtaatcccagctacttgggaggctgaggcaggagagttgcttgaatctgggagggggaggttgcagtgagccaagatcatgccatggcactctagtctaggcaacaagagcaaaactccatctaaaaaaaaaaaaaaaagttatggtcagtatttatagagggaaaaactgggctaaattcagtgtttcaaagtgagtttgcgatgatctctgtccagtctgtgacataatgactgtggtaactctgtgcctgggaagagtctgatcctgctcttccagtaccagggactcatggagatcctcattcccacccagagtggaggaaactctcctgctccaaagctaggtccatgtgctgctcccaggaggttctatctgagacttagactgcctttaggaacttgagtattgtatggtttctggcagtcagttttcatgagttgaccagacctgaggtcggcgaaaagacctgggattcagtgattttgggatagacacagagatccccttgtagattagccatgggagaggatctactccgtgttacttcaatctttacacctactggttcggactatttttctgtgtgtggtgggatgttcatggccaagtgttttttgtttttgtagaaattactgttacagacatttcttgtgaactcagctcttaaacaacttagcattttcttttgctttgcagtatgtgttgaagcccactttcacaaagcagcaaattgcaaacttggacaagcaagccaaattgtcccgggcatatgatggtaccacttacctgccgggtattgtgggactgaataacataaaggccaatgattatgccaacgctgtccttcaggtaagatcaagacgggaacattgaggaagagaaggacacccagaaggctgagcacagtggctcacccctgtaatcccagc

SEQ ID NO: 23845 - DNA, 2300 bp, Homo sapien
tcaaaaaaaaaaagaaggaaacatgtggctaggcacagtggcttatgcctgtaatcccagcactttgggaggctgaggtgggtggatcacctgagctcaggagttcgaaacgagcctgggcaatatggcaaaaccctgtctctaccaaaaatatcatagaaaaaaattagccagacgtggtggcgtatgcctgtggtccgagctactctggagacttaggtgggaggatcacttgagcctgggagacagaggttgcagtgagccaagatcacgccactgcactccagcctgagcgccagagtgagaccccatgtcaaaaaacaaaaaaaaaaagaaaaagaaacttgcatgaagcccatagactggagggctctctgttatggtagtgggaccaccctgaccaatacgcccctggaggcagccagccacaaatccccactctcttgcgcagcctgtcctgattgtattcaaacgagataccactcgctgatttgtttaatacatactgaataacaagcacgtttcagttccaccttcctgaggttctaccaaggtcactcagttcccagtctttggttactcatttttacacagtcttggtggactcccatgatggcagctgtgtttgttgtactgacaaggacttgaggccaacagaaactacataaatccttgggtaaccttgagtgtggcattagccaccttgtatctaattctttttttttttttttttttgagacagagtgttacctggccaacatggtgtcaggagactgcccatcccagggaccaggagccaggacaccctcagctcagtcacatgtttaatggccacatgtttaatggcctcacactcccattccagagtgcagcggtgcaatcatggctcactgcagccgcgacctggtgggctcaagcgatcctcctgccccagctttctgagtagctgggaccagagacatgcaccaccacacaaggttaattttttaatttttttgtagttatggagtcttactatattggccaggctggtctcaaactccagggctcaaaggatcctccctcctcggcctcccaaagtgccaggattacaggagtgagccaccacacccagccccatctcttttcatcatggtactaattcctgcccgtccacccacaaaagcactgtagtgcttcccgagtatagaggcctgtgagcctccactagggagagggctcctgcagagatcagataaattgatcacaatggctggggtggtggcaatgtgctaatgctctctttcttccactcaagatatcctctgtctccctcagcctgtgagctttttctccagtgtgctctgccagtgggggccctgcctgagagcccctgcagctgcagaggacagtttctttctgctgaaccatcgcagctatgccccagcccctaccctggaggggtccccaggggccatgggcagcacctcctgtatagggctgtctgggagccactccagggccacagaaatcttgtctctgactcagggtattttgttttctgttttgtgtaaatgctcttctgactaatgcaaaccatgtgtccatagaaccagaagatttttccaggggaaaaggtaaggaggtggtgagagtgtcctgggtctgcccttccagggcttgccctgggttaagagccaggcaggaagctctcaagagcattgctcaagagtagagggggcctgggaggcccagggaggggatgggaggggaacacccaggctgcccccaaccagatgccctccaccctcctcaacctccctcccacggcctggagaggtgggaccaggtatggaggcttgagagcccctggttggaggaagccacaagtccaggaacatgggagtctgggcagggggcaaaggaggcaggaacaggccatcagccaggacaggtggtaaggcaggcaggagtgttcctgctgggaaaaggtgggatcaagcacctggagggctcttcagagcaaagacaaacactgaggtcgctgccactcctacagagcccccacgccccgcccagctataaggggccatgcaccaagcagggtacccaggctgcagaggtgccatggctgagtcacacctgctgcagtggctgctgctgctgctgcccacgctctgtggcccaggcactggtgagtctcccccagcctcccctctcctaggcagctccaccactcactgagcactgctttgtgctaggcattaacccaagtctgtcctcattttaaagacaaggcagctggggttcagagagggttc

SEQ ID NO: 23846 - DNA, 2300 bp, Homo sapien
cctggggttagtgagggtgtgagactgaactgagagggaagaaatgacggacaccactcccaggcctcgtccctaaaacctcctccaccatcttccactctttctctcttctccctgttggccagatgcaggggacccaggggaggactctgagccctccaagcaagcagaagggggactccgagcacctgaatgacggtacggacctgagtctcaccacccggagccaacctgtgctgcactgtaaccgagtaagaaggaaacatgtgggccaggcgcggtggctcacacctataatcccagcactttgggaggccaaggcaggcggatcacctgagatcaggagttcgaaaccaacctggtcaacatggtgaaaccccatctctactaaaaaaatacaaaaattagctgggcgtgatcacgggtgcctgtactccccagctattcaggaggctgaggcaggagaatcgcttgaacccgggaggcagaggttgcagtgagccaagatcgtaccactgcactccagcctgggcaacagagtgagactccatctcaaaaaaaaaaagaaggaaacatgtggctaggcacagtggcttatgcctgtaatcccagcactttgggaggctgaggtgggtggatcacctgagctcaggagttcgaaacgagcctgggcaatatggcaaaaccctgtctctaccaaaaatatcatagaaaaaaattagccagacgtggtggcgtatgcctgtggtccgagctactctggagacttaggtgggaggatcacttgagcctgggagacagaggttgcagtgagccaagatcacgccactgcactccagcctgagcgccagagtgagaccccatgtcaaaaaacaaaaaaaaaaagaaaaagaaacttgcatgaagcccatagactggagggctctctgttatggtagtgggaccaccctgaccaatacgcccctggaggcagccagccacaaatccccactctcttgcgcagcctgtcctgattgtattcaaacgagataccactcgctgatttgtttaatacatactgaataacaagcacgtttcagttccaccttcctgaggttctaccaaggtcactcagttcccagtctttggttactcatttttacacagtcttggtggactcccatgatggcagctgtgtttgttgtactgacaaggacttgaggccaacagaaactacataaatccttgggtaaccttgagtgtggcattagccaccttgtatctaattctttttttttttttttttttgagacagagtgttacctggccaacatggtgtcaggagactgcccatcccagggaccaggagccaggacaccctcagctcagtcacatgtttaatggccacatgtttaatggcctcacactcccattccagagtgcagcggtgcaatcatggctcactgcagccgcgacctggtgggctcaagcgatcctcctgccccagctttctgagtagctgggaccagagacatgcaccaccacacaaggttaattttttaatttttttgtagttatggagtcttactatattggccaggctggtctcaaactccagggctcaaaggatcctccctcctcggcctcccaaagtgccaggattacaggagtgagccaccacacccagccccatctcttttcatcatggtactaattcctgcccgtccacccacaaaagcactgtagtgcttcccgagtatagaggcctgtgagcctccactagggagagggctcctgcagagatcagataaattgatcacaatggctggggtggtggcaatgtgctaatgctctctttcttccactcaagatatcctctgtctccctcagcctgtgagctttttctccagtgtgctctgccagtgggggccctgcctgagagcccctgcagctgcagaggacagtttctttctgctgaaccatcgcagctatgccccagcccctaccctggaggggtccccaggggccatgggcagcacctcctgtatagggctgtctgggagccactccagggccacagaaatcttgtctctgactcagggtattttgttttctgttttgtgtaaatgctcttctgactaatgcaaaccatgtgtccatagaaccagaagatttttccaggggaaaaggtaaggaggtggtgagagtgtcctgggtctgcccttccagggcttgccctgggttaagagccaggcaggaagctctcaagagcattgctcaagagtagagggggcctgggaggcccagggaggggatgggag

SEQ ID NO: 23847 - DNA, 2300 bp, Homo sapien
acctctgacaaggacttactgcagtgtttggtctcaccaagtttcccacaataaagagacatgagtcacctttcaagaccctttacccccaagaatgtggtcttcacacatgagaccaaggtctacaagtggtcaggagagagggggtctgctcagatgggggagtagtgcctgagctggcctcaagagggttaagtggccctgcactgaaaacctggacactgagttagggtagggctgggggaaaacttgggctttggagtcgtagggtctgggttcaaatccacagaccattcccttcctagctgtgtgttggtgggtaattcactggatctttctgagtcctggtttcctcatctgaggtaaaacgagtttgccggttggtctgagagctgttctaggcatggtggggagaccctgacaggcagaggcagccctgctctcaagcagttgatttacagctggggaaacaagacagccacaaatgcaatacctcaaactcaacttctcaccagaaagctccttttcctaattttcacagccagtccctcagcctcctgggccccaaatactagtaaaacctttgcctcctctctcttctttctttcttgtaatcatataggtacaaagtcctaccaattcttcctgaaatatgtttccttatcaaaaagtcctgcaaagccgtgcgtggttgctcatgcctataatcccagcactttggaggctgggaggatcgcttgagtccaggagttcgagaccagcctggacaacatatggagacccatctctaccaaaaattttaaaatcagcaggggtggtagtggcaagcacctgtggtctcatctacttgggaggctgaggtggggggattgttggagcctgggcggttgaggctgcagtgatctgtgattgcaccactgcactctagcctgaggtacagagcaagaacttgtatcagaaaaaaaaaaaaaaagtcctgcggtagctgacactgccattgcctatacgattcccattccctcatcctccctagcaggatatcaattttgttcgaagtgtcaatgaaggccaggtgcggtggctgatgcctgtaatcctaacactttgggaggccgaggcaggcggatcacctgaggtcaggagttcaagaccagcctggccaacatggtgaaaccctgtctctactaaaaacacacaaattagcagggcatggtggcgtgcacctgtaatcccagctactcaggaggctgagacaggagaatcacttgaacccggaggtggaggttgcaatcagccaagatcacaccactgcacttcagcttgggtgacaagagtgaaactctgtctcaaaaaagaaaaacaaaacaaaaacaaacaacaacaacaaaaagcaaagtgtcagtgaaggtccagcaaaagactcccttcctattgccctttgcagccagggtcatcatgtgacacagttcagatcaatgagatggaggctgagggtccctgggaaagatgtttttcctatacaggtaccacctctttcagcttcactctttccattttccacgtgaacaggccttgtagcctggaggagctacagctgcctttttgagatgctgaggcaccctgtctgaagaaggccctcacatcactcaacttgactactgggtgagcccttggagaggcttcccagcctctgctcttcaagccgaagtaccacaggggacacgagtcccagagttacaggaccccagctatggttcatgtgtaaagggaaccattaggcaaccaggggaaatgatgaagaagatctacatttacaaatgtggaaagatgttcgtggtatattgttaaattaaaaagctgtttaaaaatagtttttgggtcaagtgagatgactcacttatacttttagtataagtatgtcccatgcaatatctggaacgtacttgtactaaggggtttctccctccatcggcacatcccaggcatcctggcagctgctggcctccagcaaccccacattctagttgtgtgggagtggggtgtggcatggaccctgtgggctaccactgccctgagctgcttcttcacacactggtatttgtatctgtggtaaacccagtgacacgggggagatgacatacaaaaagggcaggacctgagaaagattaagctgcaggctccctgcccataaaacagggtgtgaaaggcatctcagcggctgccccaccatggctacctgggccctcctgctccttgcagccatgctcctgggcaacccaggtaaggccttcccctcggga

SEQ ID NO: 23848 - DNA, 2300 bp, Homo sapien
tatatgtagtccatctttgactgaaacgtcattgtgtggcacataactatgtggaaagagaaattgtatggaaagcttcagcgcttccaacctctttcttgtttccctcacatcaactgatatatgggtcaactttttattaaaacaattgggtactcatagaaaatttcactttatttcctaaacaatagctcataaaaatgtgtaccatttatttagggtttcctatgtgctaaacactttacgtacgttccctcaatcctcactgcactcctatgagctacacattgttattattcctattttgcagataaggaaggtgagactcagaaagattaaataacttccaacttccagagtttacacacttaaccaagtctgtcttgcttcacctttaaccttaacaacatttattgactaaaattacacaaacataaaaaaggcatccaaaatcctgaaactatctcaagtgcattccacaattaatcaaataagtaaatatgtggcagagagtgagaaccaggtttttcactgttgaaaaagcataacaaatatggaaagggggaaggttagaataccccctatggagctggattagaatcagaggaattggtgtgaatggatggtttatatacgtaggtagatatagaaactgttataggtatatatattaggtagatataaaaacagttatagttatagatataactatatatacatacacatacatatataactataacagtttatctactatatatatgtgttataggtatatatattaggtatatatatcagccattaacttcagtgttcatagatgattctgtggccggcaagaaccatcaatgaacactgaagttaatggctgcaaatgtgatgagaaacaaaatatttatatagtctcaaagcctcttcacaagagacttattaattgcaaagggaacaatagcataataactgtgcagtggaccagtctggtaggtaccaccttttccaagtgatcaaagttaagatcaccaggaacaagatgtaccagcatcctgtgcctcctgctgtgatgtactgagaaggactcactgtcccttctgtggtgttcttgccaaaaatgcgtaactacaatctaataatgagtaaacactatacacacccaaagtgaggaacattctacaaaataattggccaccactcttcaaaagtggcaccatcatgaaagacaaagactgaggaagctgtcccagattgaatgagacaactcagtgcaatgcaggatcctggaacagaaaaagaacatttgtgggacagttgacaaagtttgaataaagtctggagatcagttcacagtattgtatcagtgttcctatcctggttgtgagaattaggataattatacggtgcagtggtgcagctttttttggaaagctgggtgaagggtatatagtattctttgtaccacttttgcagtgttttcaaagtctaatattatttcaaagctaaaaactaaaacaagcttacaataaaaaatatgtaagtaaaaatcctttaaaaagacatgacaaagtgtgtcagatattagattatcaaaagctaggaactctctggggccagagctcaaattctcttgttttcagtctctttatcaaatgaaaacttctgtctgccttctacctttagcatgacacagaagtagaaagaagggaagtgtttgggcaaatgttgagcaacacacacacagcaaatgctcatttgatgttttggctgaatcgtagaacacagtagactgtctaaaccctctgttcctgttctggaatgttctgatcatagctgctggcttatgtctatcttatagcgatccccaaagctgcacccggcgtggtcctgaggatcacaggacttagcatttcctgcttccacaatgctggcccttaagggatatacttagggatccagaggaagcagattgtatctgttgagtgcttgaaataataatagtgatgatgattgatgataatgatgatgatgatgatgatatctaagctatcacatgccaggcactgttccaaatgcttcaatgcttaaaccatccctgggaggaagggtctgttactgcacacatttacagagtgagtgcatcgcttaggctctctcgcttctctacatggcccgtaagtagcggagctgggctctgaccccacgcagactgcctctggagcccaccttctgatgaatgagaatgcacatggggcagtgggctgagtcatgggacacatgcaaggtgagttggggattagcctcaaccc

SEQ ID NO: 23849 - DNA, 2300 bp, Homo sapien
gcaccattcatgctgtgtctgtttccactaggagagtttcctcatggcagtctagtttccactcttcctccctttctctaacgggtgccacacctactttggaacaatctgaacagccataaatagggactccagattcaggaatgcagagcttcatgtagcaagcatccaaggttccatcctatccggccaagaagcagctaatcactggcctgcagggctgtcctgtctgcactcgggtggtgtgtgcaccaaggaactgctgggcagattccacttgcaaggagggagggctccagtgcctggataccaagatctgggctctatatgcccttgccatctgaccctgactagaaggagctagaagtgcactgtgctggaccaagggaggccagtggctccagctgagaggttgacagcaagaagcccaccaggctggcagcacagcaggaagagctggcttacacaggccagccctataggtggcccagttatcacctcccagatgctagtcactgagctctcaggaggcagcggacacagtggttcagagcttgggttttggggtcagttggcctgggttcaaatcccatgactgttctttttttttttttttttttgagacggagtctcgctctgttgcccaagctggggtgcagtggcgtgatctcggctcactgcaagctccgcctcctgggttcacgccattctcctgcctcagcctcccgagtagctgggactacaggcgcccgccaccatgcccggctaatttttttgtatttttagcagagacggggtttcattgtgttagccaggatggtctcgatctcctgaccttgtgaaccaccagcctcggcctcccaaagtgttgggattacaggcgtgagccaccgcacccagtgactgttctttctgttggcaagattatttttttccccactaagagccttagtcttcttatctgtagagtgggtttacttccctgggtgatgataaggattagtgagatagagtttgtatgcactccttgcatggcagtattaaagaattaacgattgcctgactttctaatatctgttcccagtggcctgacccctaagctcttgctttgccttccctttttatctttattccttttccctagaccagccatccaaaggggtatggaatcttccagtgacaacatccctcgatcccagggtcacctcaaatggttaattcagtgggcgatgtttttaatgaagggcatagggtgtcgtctgcattgtaccatccaaaggtgtgagtagggccaaatggagccttgggagactttttatcctggaaagtctatgaattcatgaaatccacattactgtcattacagggccaccacaatgggcaaaagttcctcatggggagaccgcagtgttgtgtgcagtcccaatagtgtgataccaccagggggtgctgcccagctggtctctgccccaattctcagcaaggctgaggaaggcagaagtgagagcccttggaagacaggtttgacccctaggctggtggggcgtgggcagccagcctggacctggaaggtctgcaacctggcaggctgacaatggcaatagcagggactccacatcaatcggcctctttacaatttgtcgcctgttcccacacacaccattccatctcaagactcaagagatgatgcccagatagtgaacagaggctcagagaagtcagggagctgctcaaggtcacacacctggtacgtgacaaggtgaagatccctctgggcttgcctgttgccaactctggggccctggcatttggccagcgggagaggcagcatgttgaggagaaagagcctgtctggaagcctgtagcccggcttggagccctgctctacctccaccctgcatggctgatcattcctatccaatcccttcgcctcctcctgccccatgggatctcggtgaccttctcctctatttggggggaagttggcacggggcttaggatcagtatgagtggatcctttggtattcagccaagatgtgattttcccagacacagcttggcctctttaaggacaaaattcagtcctgctagagacttctcacacaacctcaccagccacgggcaccccagtcttcagctacacccaagtctgggatgcaagggggccttagcagctggctgacccaggatgcccaaggtcaccattccctagactctaggcatcatgccacatgctgcacatgctgcgtctttgagtccttgcagccgtgtgaggcacggtatcattactcccgttttac

SEQ ID NO: 23850 - DNA, 2300 bp, Homo sapien
gaggctaagttgcagcaggacttttgagcaagcatgcacacaggccagcaagagcaattggaggctatggtgagcagggaaggttcgcgggaggagggggaccggagctgttcatcgaagggtgaggaagagtgtgcgttgcaaaggggagccgtgggagacctgggagcaaaggccagaactttagggttcgaggctgagcagggaaacgacaggagaatgagggctcctctttggcagcacacacctggtctccaggacagagataaggtgcaggaatatgcaggtgtccagggaagacgatgtctccgggagcacatgctttatgatgctggcacccaccttggtggcaaaatgagattttgcatttactatattcagaaaactgcatgcctcagtgtgtgtgtgtgtgtgtgtctatgtttgaagtcttatgtcaaagtcctttgacatccatctctttgtcctttcccagctaccctgagaaggttggctggaaatatcctcaaagacagaaaagagtgacggtgggaggaaacgtcttgctcgtggtcatggggttccgtcgttgacaaaccaaggctcaaccggggctgctggctggagctccatgctcctgcccccaaagctatgcccagatccccatcccacctcccagcaccctgcgtgccatctgcctcctccacccctaggcattctcccatggaggagagaagcactccactctgtgtgagcccttgtgttttcatcagagttcaaggccagggtcaagggtccatcttctcccaaaccaccttgctggcttttagtgtccaccttccttaaggagtaacagtcacagagaagggaccagcaaggagtgaagccctgttctgagcctcggaagggagcggctgggaagcagtcctctggcaaggacatctgagggcctactagtttgaccccttctttccagaatctccagtggaatggcactgatgactgagggtctggggggtctacctctgccccttgccaataaccgtgggcacctgcaaagctctcacctggtgccaggcactgctctgagtgccttgcgcatacacgcttttcacaccgcctggggaggaaggtacgattatgaccctcgttttacaggtgaggaaagggaggcacagagaggttaagtgactttcccaaggtcattcagtgagtggcagagctggggtttgagcccaggaaatctgcctcaagtagctgttttgcctcaataaataatactaacaacaaccacagctaccatttgacgacccgttcctatgtgcctagtgctttaattcctcagagcaatgctgtgacttaggcgttgttctccgaatttctcatttcacagatgagtaaatcccggtttagcagggcgcctggagtgaggtgactgcggaggctcgcagacgttaggtctgcctaaatccgaagcttccaccctcctctgcctctgtgacttgctgcgtgactttggagctttcggaaactcagtttccctgtcttaagccctctgctcctcttgctttcccgctccagcaagtgagagtggactgggttgccgtgccgggcgggtgtgggtcgccgggcaactccggagtctccccttccccatcggcccccagcagaagtcccagctcccggcgttttctgtctcgtggcgagttggggcggagggagcggcgggaaggtgccgggtgggcaaggtcggagctgcgtcaccgagaggccggcaaggccagggagaaaaggccccgctgtgatttggggaagggccgggggcccataagtcacgtgctcggggcggttgtgcaggagcggactgtcctctgggaacatagaagcgcccccgactagagtaggggcggggagggagcgccggaggaggcaggttctgggccaaggggatgggggtgggggggaggtagggagcccgcggacaaaggaggcggccggcggcccagctgttttgaaaaatgcttcctgtttctttaaaggcgctcgcggctcgggcggcccgggctggggaggcggtggcggcgggagctgcctcctctccgggcggcggcgctgactgatctcgcgaactgggcttctgtgtaaactgaggctaaacaaacacagatggagcgcagcgggcgttctccagaaatgctggcaaggaggcagcgacttcagatgacactctgagcgctccgggaacggacagcccggcggcttcccgaagccggcggcgcagctgcccggggcgagggggagaaagggagagagggaggggg

SEQ ID NO: 23851 - DNA, 2300 bp, Homo sapien
ctctccaccagcctgggtgcctcctccagcctgagtgggctgccccctcctgcttgagtgccccctccagcctgggtacctcctccagtctgggtactccagcccgggtgcctcctccagcctgggtgcctcctccagcctgggtgccccctccagcctgggtgcccccttgagcctggatgcctcttctggctctgcagtgcggccatgggccttttgagctgctggcatctggaagagcagtgaagccaagtgcgatgaccggacagcatcgcaggatggaagcagatgggaagccgcagcagctgcctgcagcttcgcctgggccagctcgaccctcacaatgccccacgctgggggtgagctggggtggggggcaagaaagacagatagactgatggatatggagagaaaaacaaagaagaggccaaggaagagttggcagagacacacaggcagagcatggagagggagacagctcggcagccagagagagtggcctgcagcctgagaaggcgtcagcatggcatggctgcctctgcaggcccagtgggctcctctaagctctggccctggccctgggggtgctgggcctcccactgccagccaccttcccttaggctccaggagtcaaaggccaagattttcttagaaccaaggaggtgacagctggctggatggcttggggacctgccgttcctgtttgccagtgaggaaactgaggtctgtaggggttaagggtctaccttgccctgctgcatcctagcaatgtggcctagggcaagtgaggtcaccactcaggcctccatttcctcatctgcaacatgtgtgcagcggtaggcacctcccaggaattgcaaaagacaacgcatgcaaacaagtgtggcacggtgcctggcaaggagccgccctccgtaaatggtggcactgaacactaatgcacttgcttctgttcccaggccctgggaggatggggtgctcgtggtggaggtgtgtggggtaggtgaagggaccgtggcaatcacaccgacaaccattcgtggcgtaaggggatgtaggaggaattgggataaagagcttcgggagttcagaggaggcacctgttgtccccaccttgcggtgggtgtggggctggtgggggtaagagggtggacatgagcaggccctcattgtcctggactagggaggcagcaaggactccaactggcaacccccagccccagccctgcacttgtggaacctacattctagtgggtggaagtaactcaaagtaagggcctgcaacactgtggagtacatggtaggtgctcaagaaatgctagcctaggatacctgggacccagcaccacctctagcatcttagcacaagaagggctcccccaggttacctgctctcatcctcaacattgcctgatgcaacgattgtttcttactgataggaaagttcttctgcacggccttgactgactccgaggtttgcaaacatccactggcttcagtgaaggaggggtttgaccactggccctaccttgctcctgacctggggcctgtggggcagctgtctgcacagcacggctgaggcctgtgccagtcccctcctctctggtgagcagccttgagaaatacagaaaggactgggcggaatccacagcagcagccagcaacggtggtcctcagctttcccctagagttagactgtaagctgccgcagtgcctgggacaggactggcccctattaggaactaatgcatctttgttgaataaatgactttttctccccattcttggtccccaggccaactgtcctggctcactaaaggctctggccataactgaaactcttagacactcgggaccttgaagggccctccaagcccggacacagcactatcctcgattcatgccatgttcccgccccccgcaaatagcagccaattccaactgctcataaatttcctgcctgtcacccatggcacccaggccaggcaggcaggaggtgctggaggccgactggtccatacttgcttccaggtccctggggagcttggaggccagaagcccaggctttgcgcctgtgcccagaataacctctgcaaagtctgtcccttggagaagatgtgaaagcagatctgtcaaacgcaaggatgtccaggcttgagtgttaaagaaaacaccagtgcagcttatgatgcagcttgtacagcgtaattccacttttcgtaaaatactgtatgtgagtacgcatatgcatgggaatagcatatgggacaatagttaaccaaatgttatcagtggtttgc

SEQ ID NO: 23852 - DNA, 2300 bp, Homo sapien
aaccctacaggtctggtctagtctcttgtgcagagcagggtctcccatttgtggaaacgaattttcattggtggtaaatattgggtgattggtgacattgtcctcactggtgacttgtatgaaggaaaaagagaagccccagacagtttgtataaggaggcaggagacaatgtgggcatcaccccgtgttcctgacgtctgctgccaagcacgtgggggtgtaactcctctgcccacccttccccctacaacccccttaattgttctgtcatcagggcctcccaggagcccatgctgtctcaggtaatggcagaaacctcaggtaacggcaggtgtgtgagctcctggctgggcttccctataccagcagcctgcaaagggtttccattctgggatcagaggggctccaggcctgcccatgagccacatgatgccaacctcagtgtgggccatgccaggcctgagaccacatagtggatctcccagacctctgctgggcagctagagctgccatcccacttcccccaaacagcccaaacccccagtgcccacacccaagaggcacgacagtgtcatggaaataacatggcccttggaatccagagatctgggtgtgggtcctgatactgcagttccatgaggtcttggacaaatcacttaacattcctgtgagcctcagttcccccatggtggtaatcatgtatattttactttgggattgagagacaggagaggtatgagagcacctggaacactgtgggagctgaagtgttggtttaagtgggagtcacagttgtggtggggagctagacttgaggggtgacaggatgacccagtgagctggcccagcagtaagaagggaggaattgatgatggaaaggctggcgtcccctggtctggcctctgcaggactcgtagttgagtctccccaccccttagagtgggggtattcctggccccaaccacttcacacctttgacgcttgggggagggatgcatatacaggtggaggctgctgggagtctggggtgccatgtgggataccccagacatctggcagagctgcagtggtgccctatgggtgcagactggtttgggaccacacgtgagccaccccaggggcttccagaagggcgcagtgccaaggcagctgaggatcacgagtaaggagcctaagggggccagagaacttgggggcgtgttacttgtgtctaaaaattggcagatcgagggtcagggcatctggactgctccagtgaataagggagaatgcacactggccaccatcagctgctgggtacagccgggagagctggtggacttggaacaggaacagtctgcatggcgtgacagcgccctctgctgtccaggctgggctggcatcgatggtacaggaggagggtgatcctcacacctggcatgagcagaacctccacttcaagcagccagggctcaggagcaggagggaccccggtagatgggaaactcattcccattttacaaatgagaagacaggctaggaggagtgtagaaagttgctcagggtcccgtagctattaaatggcagagccagactcatcctgcaatgcccttccttctaccccagactgaatcattttatgcaaaatataacaggactcagggatgctggaaacagtacccttctttattctattaaaatcaaattagatctgactccgcctctggctgggctgcagaaaacttcattctgacttgcttttggagatgggagtgggtgctgctcctccctaggcctgtgcaagagccagggagtctaaggtgatgccagaaaatgggtgtgagggagtagtgtttaaatcttcagtgcgtcagcaccactgtgagagcttcgtgtccaagcctcagggggtctgtgctgcctccttgcccagtttggcagcctgggcctgaggccatgccactcgctcccctgaggccccctacagcttggctatgccatctgaggtcttgctcccccgcccccacctcagcaggtactgctgctcccagccatggagttctctcaaaacctttctcaaaccttttcctcccctccccaacccgcagcctaatccccttaaattgctccagatcctagaaaataaaagcaggaaaggaaaggttggctgaacagggaaggaaaatatgtcaagaacaaaagacaaatgattatctcaggaaaagttcctgcccctctaaactctgtgctgggcagccacacgtgcccgtgggaaagtgctgtgtccttggagtgccctgcacgctgcaactgaagccaa

SEQ ID NO: 23853 - DNA, 2300 bp, Homo sapien
ctatgtctgtgtacagctgtacactctgcatggatgggccagacctaattaagagtcgcatgaaaatggtgatcattgcttaatgggaatatccagattgtgaccaaaattgctgttactgaggttgttcacccaccttgttctccagacatgaacttgcatagcttttggctagttccagaaattagacttacttagatggatataagcctttttgagggtattcaaaagcatataaaaatcaaggaatactctaaagagctccaaaaatgctttggtcagtggttcccttgttggaataaattcatggcattccagaagggcagctatggaggagatggccctcacttggtcatattccttttgtctttattggtcacattactttatagtctcacccattatattcaaatacatttcagaggtcagctgtcgaggagtgtatgcacatgtatagacatatgcacaaactagctgtctgtgaaactaatgggacgtattcaacttttcacgtaaactccatgtgatgacaaatttgtatttccaaagctgattctatatcagtcatcatggtcttctggattttctattgggcagaagttctagttggaagatgaagcatatatgaaacgacttcatgggactaggaaatagagtaagtgagagaggatgcgaggtgagggcagtttcagcacttaatagccttaaattggacctattcacttgggcttccctagacaaaatgatggtgttagcaccattgaggaatgtctacctcaaacaaatacaagctggttctgcaattcatctctttgtccagtgccgcctgtgtgaagtggctatttcagagttacttttttgagttggagtgccggatttgcgtagcttttgcaatctataggagtagattgcttcagaaggcagtgcacagggccacatggggtcacacccacagccttggtctgatgagtgggaatgctttctcccctcccctagaaggatgactaacaactgcttgcttgctttccttagccattctgggtacgactcttcttttggaagcaggtggcagaaaaaatcccactgcagccaaaacatttcaggattttgaatccagttatcatcaaagagactgcctttgacatccttcagtactcagagcctcagtcaaggttctggggccgagataaggtatttttgttgctactcaaagttaatcattccctgtttgaggggcgatgtgtacaaatttcactttggctcaactgtatacccagaagcatctccagtggagaaacccagcctgtgattagatgctccatgtgtgtttaccactctgcacttggctgcagggctcctcattgtttaattggccttctctccagtgactcttctctttagtgtaggcagcacattaacacttgaatcactgagatactattttaaggtattcttactccaggactccatataactgcaggacactgaaaggcactttcatgatctgaaaagttatttacattttattttttaattttttaaaaatttaaaaaattttgtaccccagagaaaagtcatatttacattttcactctgtgggccattcaggtgagtattgatttttatcatcactttgtaggtgatagttataaaagttaatcctcaagaacagtgtttttcagttaatgcctgggtctcatctcagacattctaattgttttgtgttttaagattttctaaattccgtggacgatttttattttgcagcctaatttgggaactttgtgctctaggctgtttattgcagtagagattctttacctgcaattagcaagtgctgccaccaggggcgtgggggtgtgcatgcctttattacttgcggcttcttgatctgaataacttgactggtgtctttaaaacttaagacctgtgtggaaattatcacatgtacaatgagaataaacactctcagaatacaaagagctcttactaaatcaaagagaaaaagatgaaccaatagaaaatgggcaaaaaataggaatagacatttcacaaaagaagaattaaaatagccaaagaatacatgtaaaaatgttcaactttaccaataatcaaataaaagcaaattagagccacaatagtatttttgcccattttcttagcaaagacttaaaagtttgataatgtccttgtttggcaggaatgtaggtagaatgatcagctggcactttttctggaggatattttggcaatattaaaccattttaaatacgaatcatctctgacccaccaattttaca

SEQ ID NO: 23854 - DNA, 2300 bp, Homo sapien
tctatgtattttaggcacactcaacccctcacaggtccttgggtaaacctcttctcttctttccttttctcttttttttttttttttttgagacggagtctcactctgtctcccaggctggtgtgcagtggcatgatctcagctcactgcaacctccacctcctgggttcaagtgattctcctgtctcagcctcccgagtagctgggattacaggcatgtgccaccacacccagctaatttttgtatttttaatggagatggggttttgtcatgttggccaggctggtcttaaacccctgacctcgggtgatccacccgcctcaacctcccaaagtgctaggatgacaggcatgagccactgagcccagcttcttttcttttcagcagggcctcacgctgtcacccaggctgaagtgcagtggcccgatcattgctcactgcagcctcaacttcccaggctcaagcaatcctcccacctcagcctcctgagtagctgggactatagcatgcaccaccatacgtgcctatttttttttttttttttttttttttttttttggtagaggcagggtcttaccgtgtttcccaggctagtcgcaaactcctggactcaagtgactcaagtgatcctcctgcctcagcctcccaaagtgctgggattatagacatgagccaccatgccctgcccttaaaacatttttattgagatataattaacacaccacatagttcacccatttaaagcatacagtacagccaggcatggtggctcctgtctataatcccagctttttgggaggccgaggcaggaaggatcatttgaggccaggagtttgagaccagcctgggcaacataccaagacatcatctctattaaaaataaaaacattagccttgtgtggtgtctcacaactgtagtcttagctactccagagactaaggcagaaggatcacttgcgcccaggagtttgagattacagtgagctataatcatgccactgcactccagcccataaaacagaacagaacaagacactgagaaaaaaaaaagggatacagtgcagtgattttgtgcaatacactatggttttagtgatttacagaactgtgcaaccatcaccatgatctaagtttagaaggtttttagtatcccaaaaagaaactccatatccattcatagtcactccctatttccccctccccacaaatcctaggcaaccagtaatctactttctgtctgtatagatttgcctattatggacatttcatgttattcatttcatggtctcctgtgactggattctttcacttaggataatgttttgaaggtacacccatgttgtagcatgtatcggtacttcattattatttctggataatacctcattgtatggatatacctcattttgtttatccattcatcagttagtggacatttgggttgtgtccacttttggctattatgaataatgctgctgtgaacatgtgtatgtaagtatttgtgtacctgttttcagttcttttatgtatatactaggaatatagttgctgggtcatatggtaactatgttttgctttttgaggaactgccaagctgttttccaaaatggttgcattattttacattcttgtaagcaaggtaccagagtttcagtttctccgcatctttatcaacatttgttattatctttccttttttactactgtcatcctgatagatgttaagtgatatctcattgtggttttgatttgctgatagctaatgatgctgagcatctttcccatgtgctctcattgaccgtatgtgtgttttctttggaggaatgcccattcagatcctttgcccatttttaattgggctatttgactttttattcttaaattgtaagagttctttctgtgttctggataccagtaccctatatctggtatgtgatttccaagtattttctccactctctaagttgtcttttcactttctttagggtatcatttttagcacaaaagtctttaattctgatgaaacccaatttacctatttttcctttggtcatttatgcttttggtgtcatatctaagaaactattgtttagtcccaagttttcttctagtatgtttataacatactacctcttacatttaggtctttgattcgttttgcattaatttttgtatatggtatattagtccattttcactactgataaagacatacctaagactgggcaatttacagaagaggtttaattgtagttacaactccacatggcaggggaagcctcacaatcatggcagaagg

SEQ ID NO: 23855 - DNA, 2300 bp, Homo sapien
tgaggcttccacagaaagggagcaacccagttcctgcccgctgaggcaaactggacttgctgagtgctgacatcctttattttgcacctccataaatctgtttttttccagttcagcaaacgtgtggtcctttcttagtgaagttcctcatgatttgtttctgctttttaagcctaaatgcttaattttggggatatttttgtcccatactaaagagatgatcaagggatcctaaaaatattttatttgggtgattttcaaatgtcttttcatagcttaaatttcaatcgtagcttaaggatttcctccctaagtgaaaatagtttcagtttttcaaaaatagaactggtaatgtatggaattcaggtagtaaaaaaaaaaaaaggaatgcaaaaagaaataaactcactcacaattgcaccaccaggccatgcatggtggctcacgcccttaaccccaacactttgggaggtgaggcgggaggatcgcttgaggccaggagtttgggaccagcctgggcaacagagagagaccccatctctacaaataaacagatagctgggtgcaatggcacatgcctatagttccagctactgagaagaccaaagtgggagtatcgcttgagcccaggagtttgaaggtgcagtgagttatgatcacaccactgcactgttgccttggcaacagagcaagaccctatctctaaaaaaacaaagacaaaacaattgtactaactgttgatgacaggtgtactttcttccagatgcctctacgcctataattacctatggctacgtgaacactcttcccctgcagtctgatcgttttttgttggttaaaagtataattgccggctgggtgcggtggctcacgcctgtaatcccagcacttcgggaggctgagacgggtggatcacctgaggtcaggagtttgagaccagcctggccaacatgatgaaaccttgtctgtactaaaaatacaaaaattagccaggtgtggtggcgcatgcctgtagtcccagctactcgggaggctgaggcaggagaattgcttgaacccgggaggcagaggttgcagtgagccaagatcacgccactgcactccagcctgggcgacagagtgagactccatctcaaaaaaaaaaaaaaagtttaattgccagctgggcatgatggctcacaactgtaatcccagcactttgggaggccaaggctggtgggtggcttgagcccaggagttagagaccagcctgggcaacatggcaaaaccccgtctatacaaaaaaaaaaaaaaatacaaaaattaactcggcatggtggtgtgtgcctgtagtcccagctactcaggaggctgaggtgggaagatggcctgagcctaggaggttgaggccgcagtgagctgtgatcacaccactgtactccagccagggtgacagagcaagatcccatctcaaaccaaaaagcaaaagtataattgctattgaaatttatgacacagttattctagcaattaacaaagcatgcccctgattcaatgttcatgtaatccaaccttcaactgccaccttttcaccgaacagaaaatcgcaaacaaaagaaatgagtgaaaacagtccagatggtgtcaaggtgatcatgactttcagctgataagccctggcttctccaagggatcatggagaggccactctgccgtttgtctgttgttcccagcttggcccttctcttgtgatgttgagggacgtggaatccacatggtcccttgcaaatcagaagaagtaatgcctgctgagctgaagtagagggatttgatgaaacttcttgggaagtcaaactcttatactgtggaggctaaagcaatgccatcttggatgctaatctgccatgttgacttctgactaaccccagtcccaggaaggcttctaaggtttctactttcatatacttactgtaaatcttgcccttaggtcaaaacagtcttgccgttataccataagtcctgcccttcggcaaattcttgcattttcctgagggttggatgtcaatgtcctatacattccttcagtatggtatttaagacctgggtgtatacaccctcagtctggggagtaatagcatgggcaaccattatcctgtctcgccgccacccaggacatggcttctgttcgtaagtccccatcacacgtttctttctgagaaactggattcgtcagcctcttccttggcctttgggggtgggtttgcatatgcctgcccaccacagagcacatacctttaatagatatatcccaggaggtaact

SEQ ID NO: 23856 - DNA, 2300 bp, Homo sapien
agcagggaagaactagaggagcaaaccaaagaacaaagagtgtgttcttattctgccacggatatatccttaacgttcatcaccaatctattttgataacatgcaacaatttacaatttatgccaaaattataagaactgtccaaatagtcgtaaatgtgagctctcaaaatttctgcctgtcagccctctctcttccatgagccccttcatgccttcctatctcacctgtttcttttctcgcctagacgaagaaatgctgatcataacccagaatatccaagggtcatttcatcttacaaaaacagcagcatccatataacaggcacatgggtaaaagactcaagacatgctggttatatgctctcgcagttcgtatgaatctctccttctccaagtgacagctggaattcaggtgcttctaggctctgttactagcaatgttagacactcctcgaagctgtcaagctctcaggattacacaagtgaaaccacaacctgtcctgactgtattcaagtctgtgccccttcatgcagcagaaatggattcctcttccacagtttcagcagctgtatccttccgtggaaaaggattagcagccataagcccgggggagggcagctaaacaccagagggcaggagatgagtctccttcctctctgtgacacccagcacggccctgccacgaggagcaggcaaccactggtgccagatgaagcgcagcacataaaaccattttccccttcaaatgaacgatgcctaattaagcaaaagccgcatgcatgacttaagacatgaggatataaaattcgtcttccgagtcagctagagattctgcaggatcctctaccctcgtaaacgtatttttttatgattagaaaaacccggggcctggaagggacctcggccatcggcagggtaagcttctcaggagagaccatgagcccgagccccacagggggatcagtgtctgccaaggtcaccaagcgggtgtgaggcaagggcagggctcctcggggatgctctcggaaaaccctgcgttacttacacacgcaaggcgtacaatgaatgcacacccgcgtcaagccacggcttacaattcagaagaaatcaaaaggtcgccaaaacctgtcttctccgcaaggctggctgcagagagggtgcagggaaggtcaccggcaaatttctaccagcggccccacatcacgcctccccgatggatgcagagagaggtttcaggagctgctagtaaccttgcagggggttccctaagcccatcccaggaaaacgagttaactcggctctgctaactccgaagcttccagcaatgaattaaatcccgagctgcagcggaaagcggcggggaaagggccactgcggcgggacccgacacccggcggtccgccccaccctctaccgcgtacacacctgcgtgggaccccccgcccggtccacacggcccgggaccacgaccctccgcccgcgccccagccgggctcgcctgagggtgtcgtgccctgggcgctgcccgcggggttcgaggcggaaacgccgcgcccagccggcccgggaagagacaagtcgccgccgcagcccccagcccgcgggcccccgcgacgccgaggagggggctgcgccacgtacctcggccggcaggtgccgccgctgcctcggtccgcggctgcaggggacgccgctccgcgcagcccgccgccttcgtccgcatactaatgagggggcgccggccggccgccagcccggtaccccgcgcccccacccgcccccagcgccgctctcgcgcccattcagctgggggccgccgctcccccgctcagatgcggaggaggggcgcgtgggcggggtctgacgtcacgaggacgcggacggccaatcggagagcacgatgcctccgcggcggcccccgcccccgggcgcgcggccagtcagccctgcggtgcggtgggcattgccagagcagggcgccccctgcagggacgcacccggggcgggggccaggctggggcgagccccccttggttctggagaggaaatgacatacagtttgtgaaagcataaatattcgtgaaaataagaaaattcaggaaggaaacaaagcttaaggcagtgattgataggttatttcttggacacagctgaacgtatactgtgcgcctgcaactttccggtggtttcggaccggacttcagtgaagccagtgaagtcggtcgacttgcagaacttcctttcagaggggcgtacacagcaccgcggccgtgtgcctgtgatctccttctgagttt

SEQ ID NO: 23857 - DNA, 2300 bp, Homo sapien
tgccccaacctcgatcgcccaggcagcacattttttccggcacccccaccaagggaagaacagagacatctccaaaccagctgccctgcgccaagctgttacaaaatagagccacaagtctcccggtttatgcaaacatatttggctcggtgtctaggatcttctttttcaaactcagaaggagatcacaggcacacggccgcggtgctgtgtacgcccctctgaaaggaagttctgcaagtcgaccgacttcactggcttcactgaagtccggtccgaaaccaccggaaagttgcaggcgcacagtatacgttcagctgtgtccaagaaataacctatcaatcactgccttaagctttgtttccttcctgaattttcttattttcacgaatatttatgctttcacaaactgtatgtcatttcctctccagaaccaaggggggctcgccccagcctggcccccgccccgggtgcgtccctgcagggggcgccctgctctggcaatgcccaccgcaccgcagggctgactggccgcgcgcccgggggcgggggccgccgcggaggcatcgtgctctccgattggccgtccgcgtcctcgtgacgtcagaccccgcccacgcgcccctcctccgcatctgagcgggggagcggcggcccccagctgaatgggcgcgagagcggcgctgggggcgggtgggggcgcggggtaccgggctggcggccggccggcgccccctcattagtatgcggacgaaggcggcgggctgcgcggagcggcgtcccctgcagccgcggaccgaggcagcggcggcacctgccggccgaggtacgtggcgcagccccctcctcggcgtcgcgggggcccgcgggctgggggctgcggcggcgacttgtctcttcccgggccggctgggcgcggcgtttccgcctcgaaccccgcgggcagcgcccagggcacgacaccctcaggcgagcccggctggggcgcgggcggagggtcgtggtcccgggccgtgtggaccgggcggggggtcccacgcaggtgtgtacgcggtagagggtggggcggaccgccgggtgtcgggtcccgccgcagtggccctttccccgccgctttccgctgcagctcgggatttaattcattgctggaagcttcggagttagcagagccgagttaactcgttttcctgggatgggcttagggaaccccctgcaaggttactagcagctcctgaaacctctctctgcatccatcggggaggcgtgatgtggggccgctggtagaaatttgccggtgaccttccctgcaccctctctgcagccagccttgcggagaagacaggttttggcgaccttttgatttcttctgaattgtaagccgtggcttgacgcgggtgtgcattcattgtacgccttgcgtgtgtaagtaacgcagggttttccgagagcatccccgaggagccctgcccttgcctcacacccgcttggtgaccttggcagacactgatccccctgtggggctcgggctcatggtctctcctgagaagcttaccctgccgatggccgaggtcccttccaggccccgggtttttctaatcataaaaaaatacgtttacgagggtagaggatcctgcagaatctctagctgactcggaagacgaattttatatcctcatgtcttaagtcatgcatgcggcttttgcttaattaggcatcgttcatttgaaggggaaaatggttttatgtgctgcgcttcatctggcaccagtggttgcctgctcctcgtggcagggccgtgctgggtgtcacagagaggaaggagactcatctcctgccctctggtgtttagctgccctcccccgggcttatggctgctaatccttttccacggaaggatacagctgctgaaactgtggaagaggaatccatttctgctgcatgaaggggcacagacttgaatacagtcaggacaggttgtggtttcacttgtgtaatcctgagagcttgacagcttcgaggagtgtctaacattgctagtaacagagcctagaagcacctgaattccagctgtcacttggagaaggagagattcatacgaactgcgagagcatataaccagcatgtcttgagtcttttacccatgtgcctgttatatggatgctgctgtttttgtaagatgaaatgacccttggatattctgggttatgatcagcatttcttcgtctaggcgagaaaagaaacaggtgagataggaaggcatgaaggggctcatggaagagagagggctgacaggcagaaat

SEQ ID NO: 23858 - DNA, 2300 bp, Homo sapien
ttgctagtcactattcagaagcttctctgagatcagccactgacttggagagataacagtaaggctttgagatctagaggctgatcttagtctgctgtttggagatctctgccttaatccagaataatagctgaggatgtctctgtggctgatgaagaaaaggaagtttgcaggcctgcttgtcttgctgcccaagtgggtcaacctaatgtgagtggagtgaatgaggtagtaagggcttaacagatgtcttgtgattctgggacaggaggcagcttcaagttccttttcttcctcacccccaccttacacccatccttggaagctgggatactgctgactctcatggcagccataacgctatcagcgcctggctttgccgacaaggggaatctggaagagaaggggaaggacaggggagacaaagagaggtaaagagtgttgcatcaagcacatgtgtcagaagtgttcaaaccagagcgcctccattttgagtgagggctagaaaaatgaggctgggacttgctaggctgcatttcctgaaagctaggcattcctagcctctaggtgtttatggttaagagaacaaattaataatgcttactaaacagacccagacttgagagagtccagatatcccgatatctggagaacaaaggcattcctaattttgctttaaaaataataatattgattattgcaaaatatagtaattagggaaaattaatcctttatcacaaacccttgtagcagaagacatctgcccatatatacaagcattacaagcattgtaccttagttggatatgtccctcctcttattttcaggaatgccctgctggagtgcagtggcgatctcggctcactgtagcctctgcctcccgggttcaagcgattctcctgcctcagccccgtgagtagctgagacaacaggcttgcgccaccacgcccggccaatatttgtatttctagtagagacggggttttgccatgttggccagctggtcttgaactcctgacatcaggtgatctgtccgtctcagcctcccaaagtgctgggattacgcgtgagccactgtgcccagccaccactttactttcttaataaacttgcttttactttgcactgtggacttactctgaattgtttcttgcgtgagatcgaagaaccctctcttggggtctagatcgggacccctttcctgtaacacatgggccttgggctgatctccaagattaagagggcaagatactcagctgcaagggtcagctgtcgctgaccccagcagctgctctgccttggccaacttaccggatttaaatcgcccagtgacagcttttcctccagtattttcaaaatgctcccaatatcctcacgttagaacaatccagaaatagtcttatggtaaaactcttttgggaaatgtgaaagtagagtcctcccaccttttcctttgcaacgcttttgccccaacctcgatcgcccaggcagcacattttttccggcacccccaccaagggaagaacagagacatctccaaaccagctgccctgcgccaagctgttacaaaatagagccacaagtctcccggtttatgcaaacatatttggctcggtgtctaggatcttctttttcaaactcagaaggagatcacaggcacacggccgcggtgctgtgtacgcccctctgaaaggaagttctgcaagtcgaccgacttcactggcttcactgaagtccggtccgaaaccaccggaaagttgcaggcgcacagtatacgttcagctgtgtccaagaaataacctatcaatcactgccttaagctttgtttccttcctgaattttcttattttcacgaatatttatgctttcacaaactgtatgtcatttcctctccagaaccaaggggggctcgccccagcctggcccccgccccgggtgcgtccctgcagggggcgccctgctctggcaatgcccaccgcaccgcagggctgactggccgcgcgcccgggggcgggggccgccgcggaggcatcgtgctctccgattggccgtccgcgtcctcgtgacgtcagaccccgcccacgcgcccctcctccgcatctgagcgggggagcggcggcccccagctgaatgggcgcgagagcggcgctgggggcgggtgggggcgcggggtaccgggctggcggccggccggcgccccctcattagtatgcggacgaaggcggcgggctgcgcggagcggcgtcccctgcagccgcggaccgaggcagcggcggcacctgccggccgaggtacgtggc

SEQ ID NO: 23859 - DNA, 2300 bp, Homo sapien
aacatgtgtattcagaagctcttggcttttattaaatgcaactctgctgctaatacattacagaatttaatcttgtgccagccacaccctggcactgaacccagctgggcagggggccagatttgaagtgaggttctccctgccagtgattaagtttggttaagaggtgagatagtcactgccagatgcaaaaactccaggaggcatttccagctgcatgtagaactctgtagtttctgcctctggtgatggagtttgggggtcatctgaatggggagtgatgagaggtaggagctgaaatagaaagatgcggccgggcacggtggctcacgcctgtaatcccagcactttgggaggccgagataggcggatcacgaggtcaggaggttgagaccagcctgaccaacatggtgaaaccccgtctctactacaaatacaaaaattagccagccatggtggtgtgcgcatgtaatcccagctactcgggaggctgaggcaggagaatcacttgaacctaggaggcggaggttgcggtgagccaagatcatgccactgcactccagcctgggtgacagagtgagactccatctcggaaaaaaaagaaaagaaaaagaaagaaagaaaaaagaaagatgcaaataaaacagaggtgaggacagcagcgggtgaggagtgggtcttcgatgttggtagaaacttctctaatcttttacacctctaactctatctccctcctgaaagccctcatctggcctggaattggctttgagggttgtaccactatgcattttgataacacatgatgagtttttagatcaaagcacactagggtagttgttgttgaatacatgcatggctaattctatagcctcctgtggggtcaggttacccccaagccctgtgcctcagccatgggacacatggcgatggttgtggatggatcctcatgcaccattcccttagctcttgtgttcgtaatagaatccttatttgagaacctgggtccctatcagtacaagtaaaaggaaaagaagaaacacccagagtgagattcttcaggtagctttgaggatgcccaaggtgaaacattaatcaatcaataacaacatgatggagaggcaggtgttccctcttctgtaccccctttcctggagtgtgggaactactgaggctctcacaatgcaactcaaggctagggaggagatagataccattttgtttttgttttggttttgagacggagtctcactctgtcgctcaggctagagagcagtggcatgatctcggctcacggcaacctccgcctcccaggttcaggcaattctcctgcctcagcctcccaagtagctgggactactggtgcctggccaccatgcccggctaatttttgtagttttacagaattttttttgtagagataggatttcaccatgttggtgaggcttgtctcaaactcctgacctctggtgatccaccaacctcggcctcccaaagtgctgggattacaggtgtgagccactgcacctggcctagacatataccatttttgaataacaaggtatagtagaaacgccagcgggaagtttactcttcataggttgaacacgtgatgttgcagatgcattacctcaatgctgatcaccacgagggctaatgaaatccaaaggaactttctgccagcccactcgtcactccccctgcccactaaccagtcatgcagacagaaatggctaaaaaggccccaacatccacaccaaagactgggcacagaggctagtgcttgaaaaggaccaaagggcagaggtgcagagagagtgggaaggagagaacctggcggagcgagggtgatctttgctagtgaaggtggccacacacttagtcttccagatgggtacatggtcacggagacacattcaacagggcagaagagccacagcaaaccctggctgtgtgggttttctatggagagggcttgaagcgaggcttctgggggttccctgtgtgaccaaaagaccagctaccagaaaggctgcttggcatgggtctggcactgccttcccttcccaacaagggtcaaaggaggggctacttcagcctatgctgaatgcttcctaggtgccaggtgctcgaacacacataatccccttggcagagagagcccagtcaccatccaaggtcccagggattagacaccgggcctgtctgacttgggtctgtggtcttcctataacacaggaaaatggcagcagctgacaggcttcttgttttaagcactggctggggtccacctctcttctgag

SEQ ID NO: 23860 - DNA, 2300 bp, Homo sapien
acttagatcagacccccgacctgtgttgggatgtgagggatgccctcctgccccacccatccacatggttcctgggcagctctgttttattcctgtgtctttcctgatggatgagtattaagacagcatgtctggtttttaaacagacatttgggagcttgcacatcctgatgagcagggactcactgtggtggccttagggaattacacgctcactttggtggttctctatgctcggaagcctctgagagtggccttggcagcttaagatggcagaggctttggagtcttcttaggactgtaagtgcccattgaggatgcatttgagttttggaaagtaggcccaagtcaaatctgatggatggattcaagaacatggactaatctgcgttgtcatttttaatcaaaatgtaatggagattgatcatctggtggggttcacaaacttttcatgagagctgtgagttctttttttgagatgcacttttgcacttgttacccaggctgagtgcaatggcgcaatctcggctccactgcaacctccatctcccgagttcaagcgattctcctgcctcagcctcccgagtagctgagattacaggcatgcgccaccacgcctggctaatttttgtatttttagtagagatggggtttcaccatgttggccaggctagtctcgaactcctaatctcaggtgatccgcctgcctcagcctcccaaagtgctgggtttacaggcgtgagctactgtgccggccagagctatgagttctttcagaatcctcagatgccattagctagccactgtttggacatccttctcaccttgccctttggggtgatatccatacctacttgcttgcttctaacagtttttttatttgttttgtagagacgggttttggtttattgctcaggctggtttcaaactcctaggctcaagcggtcctcccactgtggcctcccaaagtgctgggtggtgtgagccaccgtgcctggccagttaattttttttagtgtctcttttttgggttctcaccagaaacactatcagcattcccacagatattcctgtgagtctttgaaacattttctatcctgcattgagtaagaataaaaccgaggaaggggtgaagcaccttgtctcatccccagtctggaacttgaaccttcttttctcttcactttgccctacccccaaataatatgtacaaatgtctgtatccattgagcactaactccctattccttccacctccccagcccctggcaaccactgttctacgttctgtctctacgaatttgacttctctaggtccctcatacaagtggaaaagtacagcatgtctttttgtgaccggcttatttcacttagcataatgtcctcaaggttcatccatgctgtagcatgtgtcagaattgccttcttgcttgaggctgctgatacctcctcatgtgtatataccgtattttgtttaatcactcatctgttggtggacacttgggttgcctccacctcttggctgttgcaaataacgctgtgaacatggatatacagatatctgaggccaggccaggcgttcacacctgtaatcccaatacgttgggaggccgaggcgggcagatcatctgaggtcaggattcgagaccaccctggccaacatggcaaaaccccatctctactaaaaatacaaaaattagctgggtgtggtggtgcgcgcctataatcccagctactcgggaggctgaggcaggagaatcttgaactcaggaggtggaggttgcagtgagccgagattgcgccactgcactccagcctgggtgacagagtgagattccgtctcaaaaaaaaaaaaaaacaaaaactcagaccctgctttcctttgaatatatactagaagtggaattgctggatcatatggtaattctttaatttttctgggggaactgctgtcccattttccacagcagctacaccattttatgttcccaccaacggtgtacaacaatttcaatttctccacatccttgttcttgttaatagtagccaccctaatgtgtatgaggtgccatctcgtggtttggtgtgggctgtgtttcaatcagatgttgggacccttaagtgttctgcacctggggagagttaggaaccacttaaggagtgtctgttgcttgccaatcttaaaatttttagtttgcacctgaatcaggggctgtcagagtccagactgctcttgaaatagaaaagactggtcgttaaaggctggttcgttgagtctttcatcgttgagtgataccacc

SEQ ID NO: 23861 - DNA, 2300 bp, Homo sapien
cccggagcctgggggccgagcagtaggcctcccccaccgaggttagagaactggaatgcgctgagctttgcaacccagtccaagtggccattggaaagtagagtgggaagggtttataagacaccggtcagtgccctgaaacacttgacaatttcaaagcctgtgaactttcatcacttgaggtggctggagggcacgagcacctctggaataatacctactctttggggccatttgccgtgtgctgggccctcagctaaagcacactatcaatactatccgttttcctcctcactgcaacccagggaagtaggcattactctgccgattttgcagctgaggcaactgagtatcaaagcataagtaaacagtcggtgagtggcagagccagcatttgaacatgggcccgtcagacacaaactcatgattttcattgtataccttaatgcccttgtagtgaccatcactgttgactgggcagtcaccccatttgcagatagggaaactgaaaccgatgtgacctgtctaaggtcatcaagctgatggtagaattgagggttgtgctctggtgctgagtcctttccatcctggttcctatccctgagcttggccatcactcttcccctcttcctttcttcccagaaactcccttgtgctcctggaggggctctgagtgtgctgctttctttcctgtgtctccctctgctcccaagaccattggttcccaaatctggtttgcacaaagtgagggccctgattaacaatggatgctcagcctctctgagagtggtgctcggccccatcatgagggctccacaccagccacctgggtcccctgaatttgtgctccatggccctcttgtcacgccctcatctctttgatctcatgtgtgtgatttgtttgtttgtttttttgtttgtttgtttaggtgataatgaaatcacagcatctccatgaagttttatccagagcagatcccaaaaaagctctccaccacttcagagctatcaaaaaatggcaaagcaagcaccccaacaccctgctgagaagaggcgccttcttgagttattcccagaaaattcaggaagctgtgaaagccctgaaacttgagagtgaaaaccgcaatggccgcagccctgggactcaggaggtgatgcagggaggtggtgtccttaatgtccagcacgtccaggcttagtcagtgggtgagggatgaggggctgttttcctaagagaaggtagaatcatgaactccagctttgttcaccgtcagtcagaacagaatggctctcaaatgggaatgtaaggtggggactcttaacaagggtgtaggcagggtttggggggactaactggggcctgtgacttcggggttccccgcgatcccaggtgtgaaggaatggggagcagtcatgagaaacggagaggacgactatgtgctagggccactggacagagccctgggtagagacccactagaggggggttgaggataaataccaggatccccttcctcctgcctttccctctgctgctggtgcctcccatcagccaagcacacctgggagctggaagcaggggatctctttgaagcagtcactttgggacagccttgagggcacagagcgtgtgaaagagcctggatccagaaataaccatggatccagcacagtgactgcatcctagctggcctgagacagtcgtggctttgcctcttgtcctagcctaatcataacagtctcctgtttcactctaaaagaagcccagtttgctcagtaaattacatgcttgccctccctgggcttgaatgggccaggatgaagagctgctaggcttatagtcaagcagggtgccctaggacaggttgaagtctctccccattttaaatggggagatggtttctcattgcaatcaggtttctttctgtctccctttattctcattggaagccaatgcttttgatccctcttatgctactgggtatccctcccacatagctgagacccatccttctgttcagatgctgaggatgtggtatgagttggatgaggaaagccgaaggaaataccagaagaaggcggccgcttgtcctgaccccagtctgtctgtctggcgtcctgacatctactttgcatcagtgtcagaaacatttgaaacaaaggttgatgactacagtcaagagtgggcagctcaaacagagaagagttatgagaaatcagagctttctctcgacaggtattgacagtgatttgttgcacaacatgtgcaggagaatctgcctcctagcccctgcctccta

SEQ ID NO: 23862 - DNA, 2300 bp, Homo sapien
aagggtgacagtagcatgactacatttgcactttgcaagaataattttgacagcagtgtggagcatgcacttgagaggtgtaaggggagggtggaaggaaaagacaattcaaatatgagataagggccagaggcaacacagtagcaattgggagaaaaaggagactaagaacaaatagacatgtaggtgacacaaagtaagagcccaataaataagttatatgtcaggagagatctagaataattttccagtttctagtgactattttgcactacgtacaccattttggaggggtaagtaacccctccctttgaagagggatgccgtgttgagtttttttttttttttttttgagacagagtattgctctgtcgccaggctggagtgcagtggcacaatctcggctcactgcaacctccgcctcctgggttcaagcgattctcctgcctcagcctcccgagtaactgggactacaggtgcccgccaccacgcccagctaatttttgtatttttagtagagacggggtttcaccatgttggccagggatggtctcgatctcccgacctcgtgatccgccggcctcggcctcccaaagtgctgggattacaggcgtgagccaccgtgcccggccatgttgagtttctgatatgcatttaggccatgttgagtttttgatatgcatttaagatctctgtgtgaaattcaattaaagatgtacagacagctgaacaaatgggtctgaaaatcagggaaataaatttgcgttggggatttaaatttgagactataaatcatgaaagtggtgagattgtctagggacaatatttaccatgaagaaaacattactagaatagaatcttgaagaacatcaacatttaaggagtaaaatgaggtacagaccttgctcaccaatgtgtcattaacgcctagcttggtgcctggaaaaaactggatgctcaataaatgtttgtgaggttatagatcgatagaggaagagagggaggtagaagtatttgtcataaaaataggagaacttgaagacaaataaggttctggaagaaaggaaagtttcaagagagtgcattggagaatgtcaaatgctaccttgatcaaaatgaagactaaagagagttcccttgatttaacaaccagaccgagaatatagcagggtcctagcaaagagaagttaacgcctgaactgacacttgaaggacaatcattttacaaacaagaggaaacttactacgtgcctaattaaccatgtcaggtacactatggttaattccacaaatgcttgttagttaacgaggagactggcagatgataacgctgcagaccaggaccctccccacccttatattcccctacctcagcgcaaactctttcccccagcaccaccggcctcttatccaggcagtccacgccggcccaggaacgttcccagaactacggctcccagcaggacaagcgccagacaagcctggactcaagaggatagactgggcaaaagcgcttctgggaatcgtagtttagggcgccgacctcaagatccaggctgggcacgctacccgaccaactccttacttgagctcttcagccgaatacatcccgaaggaaatgccctgcagccgccgccagggcatgttcttggagatcaacatcctccaggtccgttttgaattccgacaccccaagagacgttccactcaccacctgactattcttaattcaacctcaagcccggagtcaccacgcgattcaacgtgcgcttgcgcgcggaagcggtcgcaggaacgacatttacgtggatgagatcacttctacatggggggggaacaaatagttgtacgactctctgctcgctcttttgttttgaaaacaatcaaagatatataagacatcaaaataatcatttaggaaaattcctccgaggcaaatcgggtgtatagagcttttagcttccgtgacgaagtctttcaaaccatgagcttgcaacctcccattttatgattgctttcgtcttcttccgcttcagccaatagcggagctgttccctgctccccgcccactgcgccccaccttcctgaaggtcgaggcacgctttcccaacatgctctgcagagaaatcaaagatggcggttgtatctgctgttcgctggctgggcctccgcagcaggcttggccagccgctgacgggtcggcgggcgggtttgtgtgaacaggcacgcagctgcaggtaagagacgcttagggtatccgcgaagaagaccgcggagtcaccttagtcctatgtttccca

SEQ ID NO: 23863 - DNA, 2300 bp, Homo sapien
aaagttttggaagcaagcaatctcattacataaatggcagagagggaggaaagtttttaatagcacttgaacaatctggtttgaaatgaagaactttcaacttcaggaacccaaaacactatgatgtttaaaagaacaattcagtgagctcttgcttctatacagatactgccctgatcagaaaggactacctcacttaaagcaattacaacatagggaagatgacccatggcttctcattccacttctttcaacaatcaagaatgtaccaaatacataaggcctgatttagacttggaattgctgatattttctattttcagaggttcaatatgaaatcctttttaaaccaaaatatagaatcattggcccatgactgagtttttaagtgttctgtttaagtgttctgatcacactaaaaacacagtcaacacaccacagataatgtgacggttagtattatcttgtgtttccccttactaaatggcatcagtaacattcagaaaattgtcaagatgtgattgcacagacagatacttcctccagtagtatctggtttcaggtatcatttaaaacaagaatacccctctacgttaaggacatttcagaaagagatcaactctttcaagtttctgagatcaactctttcaagtcacactatttgtttctcatgaccttaaaacagagatcacagttattttgagaacggatgctgaggaagagattctgcttcaggcaaagaaaatgagtagaaaaatgctaacgatggctaccaggaaacggaggactggcattgaatggcagcacaaaggtttctgcagtatcagatggagtggtttctctttcttgaggggaactaagggagagtacatataaaaacatattgtaaattacataccccacttatacctcacaaacttttcggatggttattaccaactctagtctgcagatgaggaaatctgtctattatcatccaattaagtgaatggcaaacactaaacctaaaattaggcttttagcaagttttcactacaaattactgcctctcatattcccacaatgccactgtttgtactgagtgaaaaaaaaattacacagataggtcatacatgttccaagctataactatcacagatcaaaagggcatagtcagatcttttagacttttctgcttttacgaaaacctgataacttctttagccaaagtccccacggtggcgaccagagactgccttttatttgggaagatcttgtacgttctcctcgctcctcctgattgggttaaaatgagtaatggcggataatttttaatttggggtagtgttgctaatagccacactcactggaacgcaagcttcatgagagcagggtcctagctttgcggatggtgttaactacagaatattgcaagcaaccaataagtatttctctaatgaataaatgcgttgcgaatcctatttcaaagggccacctccgcgtacctggtcttaagggcacgcgaccgttaagggcgcgcatgagcaaaccatttcatcgtgcctacttccacagccagctgggaaacataggactaaggtgactccgcggtcttcttcgcggataccctaagcgtctcttacctgcagctgcgtgcctgttcacacaaacccgcccgccgacccgtcagcggctggccaagcctgctgcggaggcccagccagcgaacagcagatacaaccgccatctttgatttctctgcagagcatgttgggaaagcgtgcctcgaccttcaggaaggtggggcgcagtgggcggggagcagggaacagctccgctattggctgaagcggaagaagacgaaagcaatcataaaatgggaggttgcaagctcatggtttgaaagacttcgtcacggaagctaaaagctctatacacccgatttgcctcggaggaattttcctaaatgattattttgatgtcttatatatctttgattgttttcaaaacaaaagagcgagcagagagtcgtacaactatttgttccccccccatgtagaagtgatctcatccacgtaaatgtcgttcctgcgaccgcttccgcgcgcaagcgcacgttgaatcgcgtggtgactccgggcttgaggttgaattaagaatagtcaggtggtgagtggaacgtctcttggggtgtcggaattcaaaacggacctggaggatgttgatctccaagaacatgccctggcggcggctgcagggcatttccttcgggatgtattcggctgaagagctcaagtaaggagttggtcgggtagcgtgcc

SEQ ID NO: 23864 - DNA, 2300 bp, Homo sapien
aagcctgtattgctctacgtcagcctcatcccagaccttggtttataaataaagacaagatttattcttgtaagaagtcttgccaggtgcagtggctcatacttgtaatcccagcactttgggaggccgaggcgggtggatcatgaggtcaggagatcgagaccatcctggctaacatggtgaaatcccgtccctactaaaaaaaatacaaaaaattagctgggcgtggtggcacgcgcctgtagtcccagctactccggaggctgaggcaggagaattccttgaacccaggaggtggaggttgcagtgagccaagaccacgccactgcattccaacctgggcgagagagcgagactctgtcttaaaaaaaaaaaaaaaaagaagtcttagtttgcttgggtgagtgttaggcattaactatatgttgtttatcttgctttcaccctaattatgacagtttatctgtatggatcaagccagatgtagtctctgagcaaataggctgtgttgtttggttttcctctttctgtctgaggaccaggccatacagggaactggcttcatcttgtctccacgctgtcacttgttgctttgagagtcaacttggcctttcatctgatttgcacttaagaaattaactgtataggtgtaagcgtaactgggcttcctctttgccttctgctggatctatgtttcctttatttttctgagttccctttgcctttctgattttgagtagtctgactgggaaatgcattccattgccttaacttttatttcttttgatgattattcatttcaggaagaggaaaatgatgagacatctaggaggaaagctggtcatcagtttggagttacatggcggtatgtcacacgtaattagaaccttgaattacagtgtcttacagtgcatggaatatgccccatcaccctgtgaagatgttttcttgtgatgttctaaaataattgatttttattgtgcaatataaatttcactatttgtattcatacacatttagaccgtttttcaataaggtctttatctccattcaacaacacaagaatctgttgagactttgacccttttttttccctcatctgtttaactcagcataactttcatatggtatggttcctttggtagtttcattaacagtgctaccttggaatatatacctctaattctgaaagatttaatacttttgtttactaaaaatatcatggacactagagtgtactgctaaattaagaccactgacaacatgtagacatacacagcagtttgaatgaaaggtaataacttaattatattggagaattagctgggtgtctaaaaggaagacacttcatgtgaatgtctggagagggaaagctaccatgattatctaaaattgttattgaagtgatgaatttgataggatgaaagattaaattccttggggtaggctggacgcagtgcctcacacctgtaatcctggtgccgtgggaggccgaggcaggtggatcacttgaggtcaggggtttgagaccagcctggccaacatggtgaaacctcatctctactaaaaatacaacaattagctaggcgtggtggcacgtgcctgtaattccagctactcgagaggtggaggcaggagaatcacttaaacccaggaggtggaggttatggaatgagagaagagttaaaagtacatatgctagaatatgaccagaaggatccaaaagaaaccgttttgcctctgggaagtagtatctgaagattgaagaaaggtgaggaaactttactagggactttgtcatacagttgcttcttgtttttaatagcacagatatttatatacttgtttataaacttttcattttcaattgtaattctgccacttaacctgcgaagccctgacaacacattaagatcgttaagtcttgattttccccattttcaaaatgataataaccataataccctgtaagaattgagataatgtatagaaagtacttggcacattgcctagaacataataaaccgtcagtaaatggtggtagctctcattggtatttcttattgcctgggttcacatttactctcttgtgtctagagcaaaaaacaacgctgagagaatcttttctctaatgccagagaaaaatgaacattcctattgcacaatgatccgaggaatggtgaaggtacatttgttttatttatttttgtctttcatttccaccgatcagggtgtttcagcctcagaactactaacattttgggtcaggtaatttgttgtggggtctgtcctgtgcattg

SEQ ID NO: 23865 - DNA, 2300 bp, Homo sapien
atttcaggaagaggaaaatgatgagacatctaggaggaaagctggtcatcagtttggagttacatggcggtatgtcacacgtaattagaaccttgaattacagtgtcttacagtgcatggaatatgccccatcaccctgtgaagatgttttcttgtgatgttctaaaataattgatttttattgtgcaatataaatttcactatttgtattcatacacatttagaccgtttttcaataaggtctttatctccattcaacaacacaagaatctgttgagactttgacccttttttttccctcatctgtttaactcagcataactttcatatggtatggttcctttggtagtttcattaacagtgctaccttggaatatatacctctaattctgaaagatttaatacttttgtttactaaaaatatcatggacactagagtgtactgctaaattaagaccactgacaacatgtagacatacacagcagtttgaatgaaaggtaataacttaattatattggagaattagctgggtgtctaaaaggaagacacttcatgtgaatgtctggagagggaaagctaccatgattatctaaaattgttattgaagtgatgaatttgataggatgaaagattaaattccttggggtaggctggacgcagtgcctcacacctgtaatcctggtgccgtgggaggccgaggcaggtggatcacttgaggtcaggggtttgagaccagcctggccaacatggtgaaacctcatctctactaaaaatacaacaattagctaggcgtggtggcacgtgcctgtaattccagctactcgagaggtggaggcaggagaatcacttaaacccaggaggtggaggttatggaatgagagaagagttaaaagtacatatgctagaatatgaccagaaggatccaaaagaaaccgttttgcctctgggaagtagtatctgaagattgaagaaaggtgaggaaactttactagggactttgtcatacagttgcttcttgtttttaatagcacagatatttatatacttgtttataaacttttcattttcaattgtaattctgccacttaacctgcgaagccctgacaacacattaagatcgttaagtcttgattttccccattttcaaaatgataataaccataataccctgtaagaattgagataatgtatagaaagtacttggcacattgcctagaacataataaaccgtcagtaaatggtggtagctctcattggtatttcttattgcctgggttcacatttactctcttgtgtctagagcaaaaaacaacgctgagagaatcttttctctaatgccagagaaaaatgaacattcctattgcacaatgatccgaggaatggtgaaggtacatttgttttatttatttttgtctttcatttccaccgatcagggtgtttcagcctcagaactactaacattttgggtcaggtaatttgttgtggggtctgtcctgtgcattgtaggatgttagtagctccctggcttctacccactggatgtgagtagtgtactcctcccccactttcagttgtgacaaataaaaatatgtttaggcattaccagtggatagaaaatcccactgcactagagtatgagcttcatgagaacaggagcctgatctattgagcctgagctatattaccaaactctaggacagaaatgtgcaaggacttcttaagtaaatgaatttgatgatgcttaatttttccttttccagcaccgagcttatgagcaggcattaaacttgtacactgagttactaaacaacagactccatggtgagtttgagaactcccctctgtccctttctccatttccttcttttaattgtctgtgtgaaggctttggatcgtgcctcagtcattggcctacactttaccttttcctgaggcgtagatgattgaagcaagagtagagatccagagaggagagtagttttccagttttgtggacatgtgattagtcaagggacacataggaatgactgctttgccttaaactcagccatttagggattaatcttcaaccccaaattttatcattttattattttacagctgatgtatacacatttaatgcattgattgaagcaacagtatgtgcgataaatgagaaatttgaggaaaaatggagtaaaatactggtaaggaggaatcctcagtttattttttaatagggcttaaatactctttaccagaaatacatgggctggccaggtgtggtggctcaaacctgtaataccagcactttgggagg

SEQ ID NO: 23866 - DNA, 2300 bp, Homo sapien
tgtttaaagtcttttgttttgggtattaagagactaaagtctttttgttgtgcctatgattcttacacaaagccatctaaatagatataaagtagaattatgtcacatgataaatctgaattggatatttttggcatccgaatgctctcaggaatgaaaatgtttcatcaagtgattggaatcctatagatgtgaagtgtgtgtgtgtgtgtgtgtgtgtgtgtgtgtgtgtgtaatatggattgtaactgattactttggagaatttcaaacattaaaaagtaagaagaaaactaaagaacttccaggacccatcactcagttttgtagccatcagcacatgaccagttttgtctcatctattcccactcctcctcagcttatatagaaagcagactcaaatatcacattctttcacttgtaaatactttcagtatgtttcaaaaacatcaccatactattatcacacctaaaacttagtaacaattccctagtcaccaaatgtccattcagtgttaaaatatcccctattatttcatagaatgagtctttacagtttttatttgaatcgataacccatagacgttccacatgttgagtttagtcaataaatctcttgcccctttttgttttttgcttttcaatgtatttattaagaaattgagtcattagtcatatagaatttcctacattccatattttgctgttggagccataattcttcacttcatcttagccaaaagactaagaagtgatggagtcataattcttttttttttgagacaaggtcttgctctgtcaccaggctggagtgcagtggcacaatttcagttcactgcaatcttcgcctcctgggttcaggcaattctcgtgcctcagcctcctgagtagctgggattacaggcatgtgcccccatgcctggctaatttttgtatttttagtagagtcagggtttcaccatgatggccaaactagtctcaaactcctggcctaaagtgatccacccgtctcggcctcttaaagtgctgggattattggcatcagctactgtgtctggccggtggagccataattctctcttttttttttttttttttgagatggagtcttgctctgttgcccaggctggaatacagtggcgcaatttcggctcactgcaacctctgtctcctgggttcaagtaattctcctacctcagcctcccgagtagctgggattacaggtgtccaccatcatgcccagctaatttttgcatttttagtagagacggagtttcaccaggttggccaagctggtctcgaactcctgacctcaggtgatctgcctgccttggcctcccaaagtgctgggattacaggtgtgagccactgtgcctggctggagccataattcttaatctgtgtatgtgttgctacatttttggattgagattttaaaaaaaaacaaacattggtttaagcctagatgagaatctttgggtgtattttaaaaagctttgcagtgattctgatggacagctctggttgctgtgttgggatttaatctagatcatatgtgtttaagaaaagtaaaaaaacttattaaggaaaagtctgagagaatttgaatttgatttttagttttagcagaaaagaatcttcaattggatgcctgttataactaatcagagttatgcctgaaagaaaatatagaagtgattgtatatataagttttgtctttaaaggcaaagttacagtaaatgagaaagtccatttataattagttcagattaaaagagggttcctggaaaacaactgattatctgaaggcctacctgaattttgccaggggttgaaaataccttattggacactagccaatttctgattgaactggggaatctaaatctcttttcatgttagctaagttttactttcgtttactgctcttaaattataatcagttgatgcagattaccttgtaatgaggtataatttcagtgacatcattaatattttaacatgctcttttgcttagctgacaagctctctactgatgatctgaactccctcattgctcatgcacatcgtcgtattgatcagctgaacagagagctggcagaacagaaggccaccgaaaagcagcacatcacgttagccttggagaaacaaaagctggaagaaaagcgggcatttgactctgcagtagcaaaagcattagaacatcacagaagtgaaatacaggctgaacaggacagaaaggtaagagaaatgagaattgttgcctaacatttaaagtgactctaacttgattgtttac

SEQ ID NO: 23867 - DNA, 2300 bp, Homo sapien
ccaggttcaagtgattctccttcttcagcttcccacatagctgggattacaggcgcgcaccaccaagcctagctaatttttgtatttttagtagagacggggtttcaccatgttggccaggctggtctcgaattcctgacctcaggtgatccgcccgcgtcagcctcccaaagtgctgggattacaggtgtgagccacagcgcctggcctgcctgataacattttaaagcaaaaatattgacaacttccaagtggagagtgaggactctccacgtaggttatgaggggttgggaggctaattttgaggtttgagatcttgaagctagagaggttgctaatgatgttcaggcgcaagttgtggctgtgacgtacatgactgaagcaggatgaaaacattcactggcattgacaaattcaaagccaagggtgttagaaaagtcatcacacgggcaccacatgactgaagcaggatgaaagcgttcactggcattaagaagttcaaagacaagggtgttagaaaagtcatcacaccggcaccactgggcatgacagcagtgggcagggaggcagcaattcaattgctaaaattactaaagaaaacgggagactgctctggaagctaagtgaaagagatatgaaacatatgtaattactgtagtcccctaaaaaccatagaacatagaacatatacaaacataactattgctttcagataattttcaagtccatctctccatgctacaagtcatagcgcagtctacctctagagagaatacatattgtaataaattacccagttaagacttggaatactttgcaaatccaatagaagatagaaaagttagtttccacgatattgcaataagatgctaatagtattaatacgaacatattaattctggagtatacatggagtattaataccatgcttaatatttaacgtgttttattttgattacagaatcaatggaatacttttgttttttgagacagagtttcgctcttgttgcccaggctggagtgcaatggcgtgatctcggctcactgcaacctccgcctcccgggctcaagcaattctcctgcctcagcctcccgagtagctgggattacaggcacccgccaccatgcccagctaattttttgtatttttagtaaagacggggtttcactattttggccaggctggtctcgaattcctgacctcaggcgatccacccgccttggcctcccaaagtgctgggattacaggcgtgagtcatagctcctggccctacttttctttttaaattttttgtttgtttatttttctatatagagacgaggtctcactgtgttgcccagcctggtatcgaacctctgggctcaagcgatcctcccgcttcggcctcccgaagtactgggattacaagcgtgagccaccgcgccctgcccagtggaatactttcaacggtgcttctgcattgacttcccatcttccaacccatccacaaactgcagccaaaatgatgttactacagtaacaacttggagaaagcagtgtggcttaatctggaaggagcagaagctgtggagtccaaaggacccgtgttcctatccttgttgtgccacttgacacgtttagcacaagggtccccacagtgttagttcaccgtctccagcaatcactatgactccctggagggctgtcaaacgaaacaaaggcgcaaactgagacaattccattgtttacgtaactttcgccaaatcggctccttcctacgaaatatccagctcatagagcaggctgagatgctttgttgctttaattctctttaagagtcacagctgtccattttccacgtgcggctgaagaatggatttcagagcgctctccctccggcagtgttcacctagtaaccccttccggataaggacctgcagcccgggcgcgacccggaaagggaatccgcccttttcgcctccttcgcgccaatcgcctggagttggcgtttccgcagccgggacacagcccaccctctaagagccgcggagtcggggacggtagaaggggccgcgcgtgcgcagtggcgtccgctgtgcttccggtgcgccgggcgcggacgcgggcacgcacacacgcaagcacgcctccacttaactcgcgccgccgcggcagctcgagtccaccagcagcgccgtccgcttgaccgagatgctgcgggcctgtcagttatcgggtgtgaccgccgccgcccaggtgagcactggggctcccggaggcgcgtgaggaggctgaactagaaccgtcagcgaaaaacgg

SEQ ID NO: 23868 - DNA, 2300 bp, Homo sapien
tatcaggcaggccaggcgctgtggctcacacctgtaatcccagcactttgggaggctgacgcgggcggatcacctgaggtcaggaattcgagaccagcctggccaacatggtgaaaccccgtctctactaaaaatacaaaaattagctaggcttggtggtgcgcgcctgtaatcccagctatgtgggaagctgaagaaggagaatcacttgaacctgggaagcagaggttgcagtgagccaagatcacaccactgcactccagcctgggggacaaagcgaaactccgtctcaaaaaaaaaaaatttgttaccaggggctgggtgtggtggctcatatcccggcattttggcagactgaggtgggaggatcacttgagcccaggagtttgagacctgcctgagcaaaagagtgagacctctcccagcactttgggaggccgaggcgggcggatcatgaggtcgggagatcgagaccatcctggctaacacggtgaaaccccgtctctactaaaaaaaataataataatacaaaaaattagctgggtgtggtggcaggcacctgtagtcccagctacttgggaggctgaggcggagaatggtgtgaacccgggaggcggagcttgcagagagccaagatcgcaccactgcactccagcctgggcaacagagcgagagtctgtctccaaaaaaaaaaaaaaaaaaaaaaaaaaaaaaaaaagtgaaacctcatctctataaacaatttttttaaattagcaggggatgattgtgcatgcctgtggtgccagctacttggaaggctgtggtgggaggatcccttgagctcaggaattccaggctgcagtgattgcaccactgcactcagaccctgtctctaaaaaacaaaatttaaatcaagtcactcacttgttcaaaaatgtgcagtgaggccaggctcagtggctcacacctgtaatcccagcactttgggaggccaaggtgggagacctgtttgattccataccaaataattgagaccaccctgggcaacatagtgagacctaggtctctacaaaaaatttaaaaattagccaggtgtgtgcctgtagtctcagctactcaggaggcttaggtgggaggattgcttgagcctaggaggtcgaggctgcagtgagctgtgatcgcaccactgcactcaagccttcgcaacagaccaagacctagtctcaaaaaaaaaaaaaagtgcgcaatgactcccgttgccaattcaaagagcttttatgaatgtttcaatatacttgtctagcgtatgtgcctgtttttggactcaaagtggccaccataggtgggagatcaagttggcaacaatagtgttccaaggtaatacaccctatatcttgctctgtaccccaggctggagtgcggtggctcaatcttggcttgctgcaacaaccgcctcccaagttcaagcgattctcctgcctcagcctcccgaatagctggaactacaggcgcgcgccaccacgcccggctaattttttgtaccccttagtagagacggggtttcaccctgttagccaggatggtctcaatctcctgacctcgtgatctgcccgcctcggccgcccaaagtgctgggattacaggcgtgagccaccgcgcccggcaagaattttttttttttttttgagatggagtttcgctctttcgcccagactggagttcagtggcacgatctctgctcactgcaacctccgccttccggtttcaagcgattctcctgcctcagcctcccaagcccggctactttttgtatttttagtacagacgggggtttcatcatgttggccaggctggtctcgaactcctgaccttgtgatccgcccgccgcggcctcccaaagtgctgggattacaggcgtgagccaccgtgcccggccccaagaattttttttaataagaaattttgtagaaccttctataggcagtcgttttacagcggcgaagaacggaacccggcagatgacattgaataaatgttgagtggacaactttgttcttttcctcttccttgactccgcctccttgctttcccttcattctcttttgctcttgtgcttttaaacccaaagcggccgccgtaggcgaaggtgaagatggctgcctctgcctttgctggtgcagtgagagcagcttcaggtcagtggagagcgacatactccatgcatgccttcacagaaggggaaactggtgcgggatggaatgggcgtttagactggaggttaacaagcaaaaagggtcattatttaagttaagaaggtt

SEQ ID NO: 23869 - DNA, 2300 bp, Homo sapien
tcctctgtgctgggtgctgtcctgatctagctttggtgttctctttgcctagtaagtatggaaagcttttccccgtggagcattgttttacccgtataaccttaccttgagtgagatatggtggggccagacacagatcaagagagagaagctagaaagagttttagagctttttatatccacagtttcctggagagatcacagcacaccatgcaggtccactcagggccagggtctgtcacagagagagggagagaggggaattgtggacaaacatctttatcatggtttctgagggaaggaaagagtgaaataaggcaagcagatataggataggctaatttggataatttcagcgggttctgaagtacaggggctgtaactagttgtttggtgcctagccctggacaggtgtatagtgtcccgcgtgtgagagcctgctaacggaagtggttgggggtatgcagttaatagactgctggagaaggggaactgaccagcctccagcctgagcctcaaaactgggtcaaggcagcatgaaaaaactgctacattacagctattttatgggttctttggagacctgagatatgagagcatgtctcatctgcagtccctttgttgtccgtgaagtctttcttctgactatatcaggcacacgcacgcacagattctgctacatctgagagtactaagctgtctcctgcgcttctcacatctgacactgaattatacatgacaccatcatcagcaaaggacagggcgctgggagcaccacgcagaacctaagctattggagggtgggaaaagcagcagcagagcctaggagtagaggacaaagcgtttccagtgtaacagaataatgtactatctgcggccgggactagggtgagcagagtgaggcgctcagtgagggtgcaacatttaagaggtgccataaaattcagcaactaaaatacataataggtggctcactcctgtaatcccagcactttgggaggccaaggcgggcggatcacgaggtcaggagtttgagaccagcctggacaacatggtgaaaccccgtctctactaaaaatacaaaaattagctgggcgtggtggcgcactcctgtaatctcagctactcatgaggctgaggcagaagaatcgcttgaacccgggaggcggagcttgcagtgagccgagatcgcgccactgcaccccagagcgagactctgtctcataaaaaaacaacaacaacaaaaaaaaccaccataatatttaatacggtattttaaaaaatacataaaaacgtttatatagggtgcacaagttcccttttgcctaagagttcaacgtggctcagcggggcactggtgctaagcagtcgcagcttctagtctcctcctagggcccggagcagcccccaaggaaaggccttccctaggaagaagtagcccttcagcccagcctagaagaaggagctgaatcaaaccaaggcaggacgatgaggcgtggcgtgtactgacagggaagaagaaacagcaaatatttgagtccaagatgcctggagggaaaagagctagaggactatttgggggaatggtcttggcaacacggttctaggcaggtaccacgatcatatagggactctgtagaattttaagtagggaggcaagcgcccaggtttgtttcttatgcagaaagtgctgagcaacggacagactgaagaggttaggtctggatccaggtaaaccctttatgaggctaacgcactagctgaatgagggatgacagcatcccacctagacaggtgcagacagattcccgaggttcaggttcggacttcagtttctccgctggaacgctgagggtggggcagcacccgggtccctgccctgcaaacggggccgctgcagggttcctttggcggggccggtgccccggggagcgcgcaggacgcgcccgccttcagccgggggccagggcgagcgggacggggcgggcccgcgggtgccctgaccagctcaccgcccaatcgctgcgggcccgccgagccccggggggctggggccgccgccgccgccgccagaacgtgccgcggctgcgccaacgcgcgaacgccgggcagggcggcgggcgcgctcagtctggcggcggctgccgtgagctgactgacgttccgggaacgccgcagcagcccgcgccgcccgcagcctagccgagccgcgccgcccgggcctcgcccgcccgcctgcccgccatggtgtcatggatcatctccaggctggtggtgtaagtggccttctcccccgcgcc

SEQ ID NO: 23870 - DNA, 2300 bp, Homo sapien
aaggtgaatatacgatttttcttttttaacctgtcatggtgaattttagtaattttctaatcttgaagtatctttgcattcatataacactaattaatcatatcaattacctaaaaaaaatgctgctggatttaatttgctggtattttataaaagaatttcccatctatgttcctaagtataattgaaccatagtttttctttcttatactcgcccagttcagaatttgtgaaacggttttataacttttataaaatgcattggatatctttccatcttttctaagctctgaaataatgaattcaacatagaaagtatatgttccttcaggttcaatagaatttttcccttgagttgtttttcaaattaatatttaattacataatctaagttctccatatcttcccttatattttacatttgagttgcatatttctgagatatttatgtcttctactctgaaaacaaattgtcaaatttgtaaaatttctcatcgttcatagcgtcaccttaggataggccatgtttttagattcataacagttcaggagaccatactgtcttcatggactttatctttaatataaaatcctttctcttttgatacttttaattgtattaatattgctatactgctttcatttggctaccatttgattaaatattttagcccagtattttcaagcttcctgttttgtaagcatttgcttatggtcaatttatagctggattgtccttttattcccaactgtcttttaaaacttgtgagtgaaattaacccatttacatttattgtaaatactgatgtttggacttttcacatgaaaaacatttttaccatatgttctggtttcttttgcttatctcgttcccatttctgccttctttcagctggataggttttttcttctcatttagcagcccccttcctttaaatggtctacagattataaatccaatttaattcttgttactaactttaaaaacttaaaatcacattcagaatatgtatattgaaaatcaacatccagagttgatttgcatctataatcccttatatgtttccaaacattctctgattatacgtttccacgcttgtaaaatgggaggcatgagttcttcttaaggattaaatgtgatgtaatgtcaaacactagcctttatgaacatatcttcaatttcttcattccatttctttttcattcaatcaaaatacttcaggtccagagcacacaatcacctctaaactcctttgtccttcaaagtcaccttctctttcatctcttccatcattcattatggccttcaactactttaaatttctttgtaagtatctgaataccttctcaatcccactttggagaaaaaaaaatctcattatacattgtatttaaaggtctcttttgctctaaatttaatgaacgtcattatccagtaactccacgcctttcttcatttatccttcaaaatggcggactttagacgttccacgatcagtaccacgtgcgcctgcgcctcccgcagccatttcgcccagcagcctaagctcggcgaggcgcctgcgcacgagcctccagagcactatcgctcctccctctagctgagtacgcctgaaaccgcacgttctcttccctgccctcccccgctaaccctgcaccgccctcaccctttcctgtgagattcttccgccaagtggaaggctcatcttcggtcgacagcctacgcggttgaagaacaatccagtaggcacttatagctcagggtctcgccattcagtcttatctatgcgccacagcaattttcctccgggccccaaagttgataaccgatttcgcgggactttttttttgcatactgtgaggcaacaaatggaaagaataggcctatggcggagggatcactcgcttattctctgtgtactttaacctaatgggggtcgcccgggagtcggaagggggaggggaaagggaggaggcagccaaggaattgtttttttctctggccccgccctcgcccggggggccaatggtgatgatctgtttcccccggagcctcgcccagctcctgtgtttcagccaatgagcggcggaagcggctccgaggggggcgggtccgggaggctgtgcgtgtcttgtgagagctcttgaaccaagtcagcgctggagtcggctaggcggctggaaacggcggctgccgccggtgactcagggaggcgggaggcggggtaagagcgccgcggcctcggctgcggggagaggggagagaaaggtgaaagcgccgagcgcgcggccccgtcgcc

SEQ ID NO: 23871 - DNA, 2300 bp, Homo sapien
ggtattttataaaagaatttcccatctatgttcctaagtataattgaaccatagtttttctttcttatactcgcccagttcagaatttgtgaaacggttttataacttttataaaatgcattggatatctttccatcttttctaagctctgaaataatgaattcaacatagaaagtatatgttccttcaggttcaatagaatttttcccttgagttgtttttcaaattaatatttaattacataatctaagttctccatatcttcccttatattttacatttgagttgcatatttctgagatatttatgtcttctactctgaaaacaaattgtcaaatttgtaaaatttctcatcgttcatagcgtcaccttaggataggccatgtttttagattcataacagttcaggagaccatactgtcttcatggactttatctttaatataaaatcctttctcttttgatacttttaattgtattaatattgctatactgctttcatttggctaccatttgattaaatattttagcccagtattttcaagcttcctgttttgtaagcatttgcttatggtcaatttatagctggattgtccttttattcccaactgtcttttaaaacttgtgagtgaaattaacccatttacatttattgtaaatactgatgtttggacttttcacatgaaaaacatttttaccatatgttctggtttcttttgcttatctcgttcccatttctgccttctttcagctggataggttttttcttctcatttagcagcccccttcctttaaatggtctacagattataaatccaatttaattcttgttactaactttaaaaacttaaaatcacattcagaatatgtatattgaaaatcaacatccagagttgatttgcatctataatcccttatatgtttccaaacattctctgattatacgtttccacgcttgtaaaatgggaggcatgagttcttcttaaggattaaatgtgatgtaatgtcaaacactagcctttatgaacatatcttcaatttcttcattccatttctttttcattcaatcaaaatacttcaggtccagagcacacaatcacctctaaactcctttgtccttcaaagtcaccttctctttcatctcttccatcattcattatggccttcaactactttaaatttctttgtaagtatctgaataccttctcaatcccactttggagaaaaaaaaatctcattatacattgtatttaaaggtctcttttgctctaaatttaatgaacgtcattatccagtaactccacgcctttcttcatttatccttcaaaatggcggactttagacgttccacgatcagtaccacgtgcgcctgcgcctcccgcagccatttcgcccagcagcctaagctcggcgaggcgcctgcgcacgagcctccagagcactatcgctcctccctctagctgagtacgcctgaaaccgcacgttctcttccctgccctcccccgctaaccctgcaccgccctcaccctttcctgtgagattcttccgccaagtggaaggctcatcttcggtcgacagcctacgcggttgaagaacaatccagtaggcacttatagctcagggtctcgccattcagtcttatctatgcgccacagcaattttcctccgggccccaaagttgataaccgatttcgcgggactttttttttgcatactgtgaggcaacaaatggaaagaataggcctatggcggagggatcactcgcttattctctgtgtactttaacctaatgggggtcgcccgggagtcggaagggggaggggaaagggaggaggcagccaaggaattgtttttttctctggccccgccctcgcccggggggccaatggtgatgatctgtttcccccggagcctcgcccagctcctgtgtttcagccaatgagcggcggaagcggctccgaggggggcgggtccgggaggctgtgcgtgtcttgtgagagctcttgaaccaagtcagcgctggagtcggctaggcggctggaaacggcggctgccgccggtgactcagggaggcgggaggcggggtaagagcgccgcggcctcggctgcggggagaggggagagaaaggtgaaagcgccgagcgcgcggccccgtcgcccgttggcagcggcgcaggcccgggagacgggcgcccggggttcggggccggggagctgggcgccggggcggggcggcggggcaagtgcggaatcgcgggctcgcccaccctcccccgtggggccgcccggggcggggaccc

SEQ ID NO: 23872 - DNA, 2300 bp, Homo sapien
ctacttttattctgtcctttcagtgacaaataatcattaaacaggtggctaagagatctaagagtactttctgatgaaacagtctaatccaggtgtccaagatgaagttcataaaatctcatttgtaagatgcctaaagctatatgaattgtgccctgtgcaatacattataatgtaatggcagaagttcattcagcagttggattgattttgtataaactaaagcttggtcatttgggttgtgttcagtctgaagaaggaatgagttaaccccaaactggattaggaaaaagatgttctccatagaacaggagtgcagcagctttgatccagtgttgttcaggagagagagagactgactgccaggagtctcctagtcaggagaccttgggcttttctgtgacccacagaaatgtcctccctttgctcatacttctgaaagcttgctgataacctggtttggttccctgatttggcactcctccatctaggggaagggttcaatggcccatccagttttggaaggcctctccctccagttattaggtcttggccactggaacagaaaatgctgctttgtggaatccccggtcgtgccttaatctgctggatgtttggttagtgtgagttagtcctgggtgcctgcatcattcctggcactggctaaatcgaatttctgactgactggtgaagaaactgatcttggaccattgtgcctgcacaaagttaatgtgcaactccctccaggccccctgagaaccttggagtttttaatgggcagtctgagtggatgtagggtatctgaataacctgatactcagtgcagattactgggtttgtggatctgagtaaatttttcttttttcctttggagaaagcctggaacatgctgcctttaaattctgaaagggactcatgactcagaggttaagaaccactgttgtgtgataacctgtgtctgagctccaacttgtgtaactactgctgcacagtctgaatagggattctgcttggagttcattctcctagagggaggtgagactgtgcctgaatacataaagtgagaagaggcatgaatctgaagtacaaattcaagttactaggagtgctgaggggatccaggaacacttcatggggtggaggacagcatttgcaatgaagcctgaacaaagttaatttgaagtctagtcacagggaggaatgacaataacccctacctttcgtttttggtttcagaagccctctccttccaaagactaagtgatttactgatttttgcaggacaggttgcttggaagcgagctgtcaaaggtgttcgagaaatgtgtgatgtgtgcgacaccaccatcttcaacctgcactgggtgtgtcctcggtgtgggtttggagtatgtgtggactgctaccggatgaagagaaagaattgccaacagggtgagaaccgatttgattctcctccagcccctctacacagttaaatcaagtgtttttgttgatttgtgtttggcgggtttcttgaagcatgtggagacagagtctgtaaagaacagttactacaaatcagttatttgcaggtgctgcttacaagactttctcttggctaaaatgtgtgaagagtcagatacatgaaccagagaacttaatgcccacacagatcattcctggaaaaggtatttcatgtgctgcagtgattttctttccccttgtcttggttaactcatgggagctggtagttttgttttcctttattactcgttaagtttattttagtgtgtattgtaagttgtccagaaatatattagataattcctccaacacttttcgagtcaagttttgtgggatagttttgtagtagaaaagaaaatgcattttggggaaggcctctggagcaggatgaaaaggagggagtgggaaaagtaatcctgtggggaatgccagcttctgctctgtaatgttgaggttgaaagttcctaatatccttgttcagatgtttgcctctgccctttctttagcactctatgatgttggagacattgttcattctgtaagagcgaaatggggaataaaggcaaactgcccttgttcaaacaggcaattcaaactcttttcaaagccagcctcaaaggaagacctaaaacaggtatttactgcttatgttaaattcaacatctcttgtaattgtcatttgtctgtttttcaaataacccaaggatttctatcagtgcatttgaaaggaacctggggatagctatcaagtggaaagagagagagaaagaattcatacagttcatgtgacagtt

SEQ ID NO: 23873 - DNA, 2300 bp, Homo sapien
aatatttgatggctgtcagtctgcatgatcacagatggatttgttccttttggtgtagaaggaacaaaacaggttacacaataatgaattagaaaagcaatctaactttgcaaattcctggttctgttgttctaggtttgatgatctgatggccaacattccactgcccgagtacacaaggcgagatggcaaactgaatttggcctctaggctgccaaactactttgttcggccagatctgggccccaagatgtataatgcttatggtaaggaggagatggctaactttaaaatggaaataaaacaattcaaaatgtttggaaaattgattttgtgggagggagaggtggaaaacacccataatcctaatgcgtaatacagccacagctttcatttttacatatttcctttcgttccctggccacatgtttgtgtgtttcttttcatagttgcagttgtagggcatatgcaattttgtgtttttccctttactgtacctaattttacattgtaaaatctttacatgttacttaatagtctttagatgacttttaatggtgtgtgatacatcattgagagaatgtacttttattagtgatttcagtgttcggacatttaggtcaatctgctggcattctagctgtcttaacatctgctacaattaaatgcagtgttctgtgttgttgagtagaagttagttacttaggattcaaagtaccctttgagttggacttttattcttttgacatgactcaatactcactgtctaacaaggaggatgcctgggataaagattggtttctccatttaccagagctttctttcatcatcattataactgagatcttcgtcagttttacacatggcctttaattagggctggattcgagttggccattttgaaggaagtatgtattgttgaatgcagttctagttgtttgaatatttcagtgaattttatttactcatttttactatttggcccctacttttccagtcctcctggaaattacttatttcttcctgccataattacttccatgtcattttccatttctagccttagacctgtgggtgtctttctcaaaaaggacaaggtctgttgttgtcttcgctatgttctccaaagactgttgggggagggaagggaaggaggggcaaggactccagccccacaattctgttacggttgagtcagctcagggaaccactaggagtgtagttggggactgttgtgacaggggagtgtttttgtgtgcaagctcccagcagtctccatgcccaagatagttctgccagggtaggggtaccagagaaattgtgtgtgggtgagaagacccggtgggcacaaggcctcttgcctgttcctcacttctcaggtctctgttggtgagtcctccatgtgctgtgggtctgcagtgtgctctctcgaggtcctgtccctcgagcccctcagagactgattaaagcagctgcatggttgggatcttgggcaaacttaagtatataagagcatttttccaataaattgtatagtttatccatgctttatagaaatcctgaagctttaaaggtgggtatctgagaaattttcaaaagaattgcttgcgtggtttaactagcttggcagcgggtctttccccctagacactaatagatggcagtgttactctataaaagcttttcctatgacaaaatggttcccatccagaagcaagcattcagaaggatgaaaataatgatgtgttcattttcaaacaccttatatcttattgtaaacatcattaaagagtggtcttttcaaaggttgtgtgattgagctgtgactcttccatgagagtaagtgcaaaggctctttggagagatcatataatccagcctctcttcagttcctgcaacaccccccattttgcaaatgaggaccaggacttgcggacagtagaaggggcattgacttgttcaggatctccaaggggcagctagtggcaggtctgaaactagtacttagatctcctgatttccaagctagagcccatttccctactcttcccccactcttaactccccatcacccaacagcccctactgtttcagctttttttcccccttaaaagtccatggtgttttgtttcaggatgttttgttgtctagcactcctttccctttgaccattatgtttttacaattttggtttcatctcagtttaccatggtttagagtctggttttatcaatgtacagttacccatgactgggatccagtggactttgggccagtggctgggcagcagttatttcctt

SEQ ID NO: 23874 - DNA, 2300 bp, Homo sapien
aggaaaaaagcccagccactgtctcacagattgttttttgtatattgtagcaaaatcctgaaacaatggggtccttccagtctcatcatacaaaatggcaatcttggctgggtgcggtggttcatgcctataatcccagtgctttacaaggctgaggcaggaggctctcttgagaataggagttcaagaccagcctgggcaacatagcaagatcctgtctctccaaaaaaaaaaaaaaaaaaaaaaaaaaatttcatttttgagtccagaggaccctcctattactcttgatttcatcttcagagtgtagttaaaaaattattttaaataattatttttttaaatcagttgtaggttcacagcaaaagtggacaaaaagaaatttctcatatatcccctgccctcacacatgcatagcctcccaccactatcagtatcccacaccagagtggtacatttgttacaatcaataaacctccattgacacatcattatcacccaaagtccatagtttacatgaagattcactctggtgttgtacattgtatgggcttagacaaatgtatgatgatatctacaattatagaatcatacagaatagtttcactgccctaaaacttctctatgcttcacctgttcatccctttcttccctaatcccctggcaaccactttaaaaaaaaaattaggttcagggggtacatgtgcaggtaaactcgtgacaagggggtttgttatacagattatttagtgacccaggtactaagcctagtacccaatagttacttttctggtcctgtcccttttcccaccctccaccctcaggtaggccccagtatgttattcctttgtgtccatgttatttcactcccacttgtgagaacatggaatatttggtttcctgttcctatgttagtttgttaaggataatggcctccagccccatccatgttcctgcaaaggacatgatctttctttggcaaccactttttactgtcgccatagttcttccttttctagaatgtcatattggaatcatatagtatgtagccttttcagactggcttctttcacttaataatatgcaattaaggttcctccatgtcatttcatggcttaatagtgcatttatttttagcactgaataatactccattgtctagatgaatagtttatccattcacctattgaaagacttcttggtggtttccaagttttggcaattatgaataaagctgttgtaaacatctttgtgcaggtttttctatgggcatgtttttaattcatttgaataaataccaagagcttcagtgctggatcatatggtttgtctcgtttgactgtcaaagtgtaccgtttgcattcccaccagcaattaatgagttcctgttgctccacaccctcaccagcatttggtggtgtaagcgttctgggttttggctatgctaatggttatgtggtggtacctgattgattgacatttgcagtcccctcatgacatatgttgaacatcttttcatatgcttgcttcttggtaagttgtcttttcaggtcttttgcctgttgtttaattgggtatttctgattattgaattttaagtgttgtctattttggctaacagtcctttatcagatgtgccttttgcaaatattttatcccagtctgtggtttgtcttctcattatcttgacagtggctttcacaaagcagaagtttttatttttattgaaatccagcttatctgtgtttttcatggattgtgcctttagtgttgtattttaaaaaatcatcaccaaacccacagccatctagattttctcctgttatcttccaggaattttgtgttttacatttaggtctgtgatctactttgagttaatttttgtgagggtgttaaagtctgtgtctagattgatttctttttttttttttgcatgtgcatgtccagttgttcaccatttgttgatgttgaaaatacttcttttgagacagggtctcactctgtcgacccatgctggagtggagtgatgccattttggcttactgcaacctctgcttcctgggctcaagtgatccttcccctggtgcatgccatcatgctcagctaaattttaaaggtgtttttgtagagatgaggtttcactatattgcccaggctggtctcgaactcctggacttaagtgatccttcctctttggcctcccaaagtgctgggattacaggcatgagccactgccccagccaagactgtcttttctccattgtattgcgtttgcttccttgtcaaagatcagttgacta

SEQ ID NO: 23875 - DNA, 2300 bp, Homo sapien
gcattcaacatattgttaacacagtgggacgcagtcactaccctgatgccatttatattttagtatataatgtgtgttcttggtttttgaatgtggtattttaagattaagccacccatgcctattgaatgtgaatccactgtggtcttaatgggtttgtacagtctatttgaggatagttttatactttaaatagcacgtgagctcattagaatgctatctggcaaaactatgattagagttttgttcagactttagaattagtgttacatatacttcataaaatataatggatgatatttttgctttcttttgttatattaactaaggaatatgttcagcagcaaataacggaaaacttgaccactgtggcttatattagaacagaattgtggaactaggcctctttcacctctcattgcctgtccctgcttcgagctggttatcttgtacatgggacatgggcctttccatcagtgctttctcagagtcaggagctgaccagcagcacaccaaggtgtggtcatgcatcctaaccaactctcactcatctgggacattcttaagatatatttataaactgcttcagcagtagcactttatatttgtatgtgtgtgagagtttacaaagctctttgacatatgtgatctcattcaatcttcacgaataaggaaaataattcagcttgcttaagatggcagtgaggaaatggcggagctggggttcaaacccaattatctctagtctaagtcatatgtgcactaaaacaatcaggcaggaaaaaagcccaacggctctctggcaggttggttttgtagattctggatggaatgcctgatgccaggtgttgctgcagtggagtcctttcagtctcatgatacaaatggcaatcttgaatgcagacgacccttctattactcttgatttcaccttcagggtatagttgtttttattttttagtaaacttattttttgagcagttttaggttcacagcaaaattgaatagaaagtacagaaaatccacatacccctgccctcacacttgcatagcctcattcactgtcaacatcccacacaagagtggtacatttgttacaatcagtaagcctctatttacatgtcattatcacccaaagtccatagtttacattaggattcactcttggtgttgtacattcgatgggtttggacacatatataatgatatccacaattatagtatcatacaaaatagtttcactgccctaaaaattctctgtgctgtttattcatcttttttccctactaactcttggcaaccactgattttattactgtctccatagttttgccttttctagaatgtcatatagttggaatcatacaatatgtagccttttcagactggcttctttcacttagtaatatgcatttaagtttcttccttgtcttttcatggcttgaaagctcatttatttttagtactggataatattccattgtctggacgtaccagtttgtttatccgtacacctgctgaaagacatcttggtttctgacaagttttggcagttatgaataaagctgctataagacatctgtgtgcaggtttttctgtggacatatttttaattcattatgataactaccaaggagcacacttgctggatcatatggtaggtgtgtgtctggctttgtcttccaaagtggctgtaccattttgcattcccatcagtaatgaatgagagttcctgttgctgcacattctcgccagcatttggtattgtcagtggtctggattgggccattctaaggggtttttagtggtatctcattgttttaatttacagtccccaaatgacataagatgttgaacatcttttcatatgcttacttgccatttatattaatatatcatgttggtgagttatctgttcaggtcttttgcccatttttaagttcagttattttctcattattgagttttacgagttttttgtatgttgtggatagcagtcctttatcagatatgtcttttgcaaatattttcctgcagcttggggcttgccttttcattcttttgaaggtgtggctatttttattatgaaataatttttacctgccacaccttttttcgtttttccttttggaacataggaaatacattttttaaatacctgtcttagtttcttttgtgctgctatagcagaatacctgagactgagtaatttattcagagtagaattttatttcatgcagttctggagtctgggaagttcaagattaaggtgctggcagggttggttgtctggtgagggc

SEQ ID NO: 23876 - DNA, 2300 bp, Homo sapien
ttcacaatagtgcaatgtatatggaagatactggtattaagtttaaaatttttaactgtgcctatatttgcaggattatttactagggaaaaactagaaacaatcttatataatagggaaatggttaaataaattatggtacattcttgctatggactgccataggtattgacactgatgaaagtctacataaaatgtgtttaaaaggaaattgtaggacaacgtatataacataatatcaattaaataaaaatagggctgggagaggtggctcaatgtatataatataatctcaactaagtaaaaataggcccgggcaaggtggctaacacctgtaatcccaacactttgagaggctgaggtgggaggatcgcttgagcccaggagtttgagacccgcctgggcaacatggctaacccttgtctctacagaaaaattaaaaacacagtgggcgtggtggctgacacccagctactcaggaggctaaggtgggaggatcacttgaatctgggaggtagaggctgcagtgaggcaagatcctgccactgcactccagcctgggtgacaaagtgatacccggtctcaaaaacaaatacataaataaaaataaaagtatattttccaaaggaaaaggtttcagaagattcacactatatttaatagttggtgtgaatcctttgagaccttttcccctgaggaagtgagaatgagggtttaacttttcacaatgaacaggcagtgcttttttaaaaacaactttattgaagtatgattggacataaaataaatcgcacatacttagtgtccaacctggtaagttttgatattgtatacatctgtgaaaccatcatcacaatcaagatattatccatcatccccctaaacttcgtgtctctttgtaatccctcttttctgcctctttctgaccccactcctatccgctagcaaccgcccatgtactctctgtcactatgtattagtttgcattttccagaatgttatgtaaatggaatcatacggttctggcttctttcacttggcagaattattttgagattcatccatgctgttgcatttatcaatagtttacttttttattgctcagtactattccttcgtatggatcaatcacgactggtttatccattcacttgttgatagacatttggattgtttccagtttatggctattacaaatagagctgctatgaacatttgtgtacaagtctttgtaagaacatatgcttttttccctcttgggtaaatagctaggaatggaaggctggctttgtttagcattttaagaaattgtcaaaatgttttcaaagctgccgaaccattttatgattccaccagagacaggagtatggggctgaggtaacaaatggtccccttcaccatcctcggatgagttaatgacagtaaccatcagctcaccgtataggcctaatcaggaactgtccgtgctaaaatgtgtctagttctctttagtcagattcctttgagagtgtgattaagctcacggtcagtgtggcgtgtaggacgggacacacatggacaaatgctaggcaggaatcgcccacgctggaaagggcgatggcctgaaaaaaaacgaccgcagttgggatggaaaggggagggttgaagttcagacatattgaagttagaatggttgggacttggtaagaggggagagaggacgatgcctagggtttagtgaccaggtgatggtggtgcaagcagaggggaggagtgggttggcgggaggaaaaagaggttatttttggtttgtcacctgtgagttgcctactggacacaaagatgaagctgtcgggaaagtgatgctaagtgtacacgtctgcgtggagatccagacttctggtgcaacatctaggtttaggtgaagtattagaagcagttgtagccaacaaattcgtatctttcagagcaatcatttctacaccttacgaaaagcaccgaatccgtggtctcccccacacagacatgaccagaacatgtgcgatgacgtcagcctttttgactagtctcccactcactcgattctgcgcaggcgtatggcgcatgcgcaacatcccctagtgccgccgctccctactctgggggttgggactacctccttttccgcgggccccgcccaggcggctgcccgtgacctgcctgggcgcggggaactgaaagccggaaggggcaagacgggttcagttcgtcatggggctgtttggaaagacccaggagaagccgcccaaagaactggtaagggctacggcggcggcagataa

SEQ ID NO: 23877 - DNA, 2300 bp, Homo sapien
gttgcagtgagctgagaccatgccactgcactccagcctgggcgacagagagaggctccatctcaaaaaaagaaaaaaatgataaaagaaaaataaaacagaacaccagagagaaatcaaagaagagtctacttttttaaaaagggggcaggggcctagcgccgtggctcacgcctgtaatcccagcactttgggagccggggcgggcagattacctgaggtcgggagtttgagaccagcctggccaacatggagaaaccccgtctctactaaaagtacaaacattagctgggcgtggtggcgggtgcctgttatcccagctactcgggaagctgaggcaggagaatcgcttggacccgggaggtggaggctgcggtgagctgagatcgcgccattgcactccagccggggcaacaagagggaaactgtctttaaaaaaaaagaaaagaaaagaaaaagaaaaaaaaggggtggcggcagggggaattactctagaggaaaggatgaaaaggaggagactaaacttaatgtatcgactatgtctgagttcacaataaaaataaaacaaaaacatttagatataaaggatatttcaggagcaattggggagtatcgattttatatacattagctattattgagtcaatgttaaatttcttgggtgtcataatggtatagtggttacataaaagaatgtccttgttcttagatatgtggtgatatatttagcagtcagtcatcatgatgactgaaatttattttcaaaaggatcagcggccgggtgcggtggctcatgcttgtaatcccagcactttaggaggccgaggcgggcggatcacgaggtcgggagatcgggaccgtcctggctaacacggtgaaaccccgtctctactgaaaatacaaaaaattagccgggcgtggtggtgggcacctgtagaccctgctactcctgtgaacccaggaggcggagcttgcagtgagccgagattgcaccactgcactacagcctgggcgacccagtgagactccatctcaaaaaaaaaaaaaaaaaaaaagaaatatacacataagagataggagataaaacatataacaaaatgtgaacacttggtgaattagataaaaagaaatggatgttcactgtactatgtttacagctttctgtagctttaaaaaatttcaaaagtcagaaaaaacataatttatgtgtggctaatatgctatagttgattttatttagatgaatgtgctaagtactgataaattatttagtactttttcaaaagcccaccatgaaactctttcccatcacagctaaccaagctaaaaggtgaactgtcacatctagcaagtgccagcaacattttgtcttcctccccaacgtgagtcaagaatcatgtttgatctatctgtgaaattaacaaaccagcaaaacacctatatcattcagccaccttatcaaaaaaatttaacattggaaaatctgtaatcttctggttttaaaataatttatttcataggtctgttttaatttcatgtctcacagcatacattatttaaccaagaggtgctggacagagattgtaaaaagggaggaaacatttaggataagaaaccggctcaattccattagaatttgatcctatcttgtaaagtcttgctaggataaatttctataatacttcttttgtgcttacaaaaaaacattaacttctgaatttccaatgttgtaaataaaaaaattttacaattaggtatgcattcaattaacacacaaggcaaccaaataaattctgtcatcaacattagcataatgtgtatttcccgtcactgcactaacattaaactaaacttcaaaccacaaaaacattgtgactaacattaaaaaggcaagctgtaagatactcaaagcttataaaggacaaattgcacatggttaagatgggacatcatttgacaagggctggtgttgtgcatatggctgcttttttttataagaaggccaccggcaaacagggcaacaatgtcggcccccagccaaccacatcacaatgcaattctgatgaaacacatgaccacaaggcaaccccattagcaaacatccattttcaaaattctctaggcaaacaacacattcagtacagtgcagcatatcagcaggccaagttaaccaatcaggttccatatcttcattagtgttatatgatccatatgacctccccttcctttcacatgggctggtctgacaatatttattggcacatgaacaagcctcagcatcacagtgacttgctgttcct

SEQ ID NO: 23878 - DNA, 2300 bp, Homo sapien
gtcatagttcaaagaaggacatatttgttccctactggctgtgttacatcatatggaatttaaagtcactggaattgaggtagcagtgagaagcatcatatgatttaaaataaagctttgggtcaatatttactgaagtattacatcaatatatttcctgtttggctgacaagagttaatagctgattttaaacttgtttatctttgctcctagacaaaagttttgttcgaggagattctaaattacgtatttctttcttgatactgctatggaggtgaagcacatagcaagccactttatcttatattttgtattggtaaaaaattttataaattctatgtaagaatacaaaaaaattaaaagaccactgttttttgtcaatcacttgtccttactcttaatggttttatatagtttgcatgtatatactaggttggcttatgattttgaaagtagagactccctattataatgaaatactgagaatgcagaaaatatcatagcacaatactctcattgttccagggagttatgttacttaactaaacctggatgtcgttgtatggagattaacagtattaaaaggggtatgccacatggtttgatcagtaataaacctcacctctaaataatgggcattttaaaatgcactgaattaaacatctttatgtctgactgaggtcaagaacattaatatgcagttgcttagcagggtaccatttatgccactgtttgtccagaaaacatcttggtacaggttgctggggaagggactttgattataacagaaatcaaaagcttaagagtttcctttagagactctgtgtaatcagaactagaagaatgagttattaaactgtaagaagctgaaattgtttggtttgacataaatacttattgagcacccatatgagttgggcactgtattagctgcagggactacagtggtgagcaagtgtggggatgccagaggcagataccctgggaaagggaatggaaagattgcttcacttctagcctgtattgccaggtctgttccacacctggaactcaagctgtactttgtccagtttttttgtagtctttaaaaatgttccccacatacagtgttccttcctgagctgctgaggaaaatgtctccccttttaatgagaccagccatatgaatgccactcagaatcatcatgcatccttctaggatatgagctataaattggggactcttactggtatgacatagtgtgtgtgtgtatatatattatatatatatatatataaggcatatgtatatatatatattaggctgagaatattttgttgtgctgtgtgactcaaccagatgagttattttgtgaaaatattagcatttttatagtggttggttaatttaaactccaccaaatttaatttatgctaaaccttcagttgaattatataactatgtaggacattggacacatttttaattgcataaatataactataaagtaatataaaatgctttcatgcaatgcctacaagatttttcatttttgtgtagctctgtcagtcagggatccttaaactcttcaaaaccaaatgctagaacacgttgctgaataaataaggccctggcattgaacattgtcttgtacctgccccaggtatgttcccaactcttttcactcacttctactatctctgctataaccaagaggtacctgggaagaacccctctcattcctccttcttttcctaacattggagctcttatcacatgtctcaaagatacctgtgcagtgaacaagatcttcactgaaagatgcctccagacttaggaactaaatatttacactggcgaggcaacctctaaactccttggagcagtgtcattctgcacacagacctgaaatgtttgggttatttgcaaccttgatcaagaaatgggataatgcctgaaaagtgagttatttttaaaagagggcaaagagtagagagtatggtagtatgattgcacagatacttcttaatcttcctaaggaatctgaaaaataagttaaacttgtctttgattatttgaccaaaagaactaccagattgactcttgagtggtagcaataaaaataaaataaaataaagaacaagaggcaataggcgcctgctttgcttgatcttcctaattttctaggtacaacttttttttctctcttttttttgagatggagtcttgctctgttacccaggctggagtgcagtggcataatctcggctcactgcaacctctgcttcccaggttcaagcgattctgctgcctcagcct

SEQ ID NO: 23879 - DNA, 2300 bp, Homo sapien
tcccgttcctcccttgctccatgacctgggatcatgatccctttcttcctaaaactttcacccctagtttcagatagttgacagttttgcacaaatagtaacatttccccgtaattactgttttttttttccttccttatcaaaaggggctggtcaaagccaaccttgttcagtttatgaacccaactccttcctccctcaagactgacacagagattgacgtaaagagtacgctcggcccggttaaatttataagcacagaaccaggtatcgcatgcttgtccatgtgactcttttttttcttttctttctttctttttttttttttttttttttttttttttttgagacggagtcttgctatgtcacccaggctggatggagtgcagtggcgcgatctcagctccctacaagctccgcctcccgggttcacgccattctcctgccttagcctcccgagtagctgggactacaggggcccaccaccacgccggcctaattttttgtatttttaatagaggcagggtttcaccgtgttaaccaggatggtctcgaactcctgacctcgtgatctgcccgcctcggcctcccaaagtgctgggattacaggcgtgagccactgtgccaggcccatgtacaaaataaagcacccggaactttgcacctggacttatctacactcgacaatctttgtcctaggaactcagggagtccacaccaggcttttaacacccttgagactgaaggagggaaaaggctgtaactggcagcgacaactgggcctagtataacgcgaactccagttttggccaaacctcctccaacacacatgtgcaaagccacattctcatgaagagggggcaaaacatttgctttctgggtttaaccttctaccatctcaaaccaactgtgccaaaaatttccctgttcaccaggattcatcaaaaaacgtacatttctattttcaccgattttaagagaataattaactgctctatttttacaaaaaatacacaaagtgatacaatctaaagactaatcctcagacaaaatcaattgctaaacattggaggggcaaaaggggagaccacgccgcaaaagcacggagaggcaactttcggcaccgcgggaaggccccgaccacgctgcggctccgcctctcctcccgcccctcgttcggtagtccggtagccccgcggctccccgaattccccgccctcggcccctgcgggcgcaccctgcaggccccgccccggccccgcctcatcgcgacgtcagttgttatgtctcggctccggccgcggccgccgctgatacacggttgtggagggtacggccgcggtctccggaggtggcgggggtgttggggacgggtgctgcgaccggcactgcccatccgagcgggacgggcgctgagtggccgggaggcagccgggtagccgcctggaggagcagtctcggggcctattattggttttttccctccgagaccgattccatctgcagagaccgcgacgccccatcctgggccgggccgcagtgcccgcccgcctgagaggcgccgcccgccagccggcccgagcgaacctggagccgccgccgtgcccgccgctcttctcgcggagcctgggcggtcggcggggcctggggcctgggcttcgggcgcggcgttgcggcggccgctcctccccgcgcagaacacgctgggccccgggcctggcccggccgagcgccgcgccctcctgacccgcggccgcgggagtccggcccccacggcccctcgggccccggcctgccgcccggatccccgcctcctgggcggatctgagttattttttggtctccccctcccccttgagatcgcggcaccggagggccgaccccgccacctgggtcagtgcccgccccgggggaagcgtccctcgttttgttcttccccgcgagctctccccgcgcccctctcctttctgtgcttaatggatgggggttttgagtttttcccctttatttttgtcggctcttgactgggaggcccggcgcgaggctctgcgtctctgcgtccctcgtcgccgcctcgcgcccgcgcggatcccgtcacctgcttccccgccggggatggccggccagtgacggcgccgggtggcccgcgcgtggacacggggccctcgcccaagctgccaccgagccgcggcccccgccctcgacccttctctctcccgtattccgagctctctggaaagagaggaaactccagggaagatgtggctgaagctttttttcttgctcctctatttcctggt

SEQ ID NO: 23880 - DNA, 2300 bp, Homo sapien
ctatacacacatctttgtgcccatgtccaattattcctcaagataaatttcctgaagagagattactgtgccaaagagcttgtattttatggggggcttctaacccacattgtataccccaccaacatagaatgtgcttgtccatactctcttattcagatgacccaatgtgttctcttatcaatgcttttatccctcctgtgggttaaccatgaatgaaacaaagcaagggggttgggatgggaggcagttgaaacaaacaagaaatttaaaaagagttctttaattccttctttctagtccctcccacactctaatgtttttttccaatttggaactctggcctgactggttccaccctcagctcacacaccaactttccctgcccatgcctattctgtatttttgagattgggtcagtctctcctcactagcgagtacatacattcctttgaggtgagggacatcaccttcagtgtcaaggtttggacaatatcatcaaagggtcaccaagacatgcccaagaattctgaaatttcagaaccaggcttgttagaatcagttgtttaacacagtctcccacactgatctgccagccacgagaacaaagccacatggaagctaaagacacaggggcagtgtccagttgctggctggacattcctacacctcctcctctgattctcaatgctccctgggcccatccccttccaactcctcccccactagcccggcactgaaatgcccttgttcactttattttaaatgggcaccattcggaggctacattctcacagtccattctttgcttcccgttcctcccttgctccatgacctgggatcatgatccctttcttcctaaaactttcacccctagtttcagatagttgacagttttgcacaaatagtaacatttccccgtaattactgttttttttttccttccttatcaaaaggggctggtcaaagccaaccttgttcagtttatgaacccaactccttcctccctcaagactgacacagagattgacgtaaagagtacgctcggcccggttaaatttataagcacagaaccaggtatcgcatgcttgtccatgtgactcttttttttcttttctttctttctttttttttttttttttttttttttttttttgagacggagtcttgctatgtcacccaggctggatggagtgcagtggcgcgatctcagctccctacaagctccgcctcccgggttcacgccattctcctgccttagcctcccgagtagctgggactacaggggcccaccaccacgccggcctaattttttgtatttttaatagaggcagggtttcaccgtgttaaccaggatggtctcgaactcctgacctcgtgatctgcccgcctcggcctcccaaagtgctgggattacaggcgtgagccactgtgccaggcccatgtacaaaataaagcacccggaactttgcacctggacttatctacactcgacaatctttgtcctaggaactcagggagtccacaccaggcttttaacacccttgagactgaaggagggaaaaggctgtaactggcagcgacaactgggcctagtataacgcgaactccagttttggccaaacctcctccaacacacatgtgcaaagccacattctcatgaagagggggcaaaacatttgctttctgggtttaaccttctaccatctcaaaccaactgtgccaaaaatttccctgttcaccaggattcatcaaaaaacgtacatttctattttcaccgattttaagagaataattaactgctctatttttacaaaaaatacacaaagtgatacaatctaaagactaatcctcagacaaaatcaattgctaaacattggaggggcaaaaggggagaccacgccgcaaaagcacggagaggcaactttcggcaccgcgggaaggccccgaccacgctgcggctccgcctctcctcccgcccctcgttcggtagtccggtagccccgcggctccccgaattccccgccctcggcccctgcgggcgcaccctgcaggccccgccccggccccgcctcatcgcgacgtcagttgttatgtctcggctccggccgcggccgccgctgatacacggttgtggagggtacggccgcggtctccggaggtggcgggggtgttggggacgggtgctgcgaccggcactgcccatccgagcgggacgggcgctgagtggccgggaggcagccgggtagccgcctggaggagcagtctcggggcctattattggttttttccctccgaga

SEQ ID NO: 23881 - DNA, 2300 bp, Homo sapien
gtagttttttccaatcctgtgaagaaagtcattggtagcttgatggggatggcattgaatctataaattaccttgggcaatatggccattttcacgatattgattctttatatccatgagcatggaatgttcttccatttgtttgtgtcctcttttattttgttgagcagtggtttgtagctgtccttgaagaggtccttcacatcccttggtggattcctaggtattttattctctttgaagcaattgtgaatgggagttcactcatgatttggctctctgtctgtctgttattggtgtataggaatggttgtgatttttgcacattgattttgtatcctgagattttgctgaagttgcttatcagcttgaggagattttgggctgagatgatggggttttctaaatatacaatcatgtcatctgcaaagacggacaatttgactccctcttttcctaattgaatacactttattcctttcttttgcctgattgccctggccagaacttccaacactatgttgaataggagtggtgagagagggcatccctgtcttgtgccagttttcaaagggaatgcttccagtttttcccattcagtatgatattggctgtgggtttgtcataaatagctgttattattttgagatacattccatcaatatctagtttatagagagtttttagcatgaaggctgttgaattttgccgaggccttttctacatctactgagataatcgtgtgttttttttcgttggttctgtttatgtgatggattacgtctattgatttgcatatgttgaaccagccttgcatcccagggatgaagccaacttgatcgtggtggataagctttttgatgtgctgctggattcgatttgccagtattttattgaggatttttgcatctatgttcatcatattagagatattggtcttaaattctctttttttagtgtgtctctgccaggctttggtatcaggatgttgctggtctcataaaatgatttagggaggattcactctttttctattgattggaatagtttcagaaggaatgacaccagcttctctttgtacctctggtaaaattcagctgtgaatccatctggtcctggactttttttggttggtaggctattaattattgcctcaatttcagatcctgttattggtctattcagagattcaacttcttcctggtttagtcttggaagggggtatgtgtccatgaatttatccatttcttctagattttctagtttatttgcatagaggtgtttgtagtattctctgatggtagtttgtatttctgtaggatcagtggtgatatcccctttatcattttttattgcatctacttgagtcttctctcttttcttctttattagtcttgctaatggtcgatcaattttgtcactcctttcaaaaaaccagctcctggattcattgattttttgaagggttttttgtgtctctatctccttcagttctgctctgatattagttatttcttgtcttctgctagcttttgaatttgtttgctcttgcttctctagttcttttaattgtgatgttagggtgtcgattttagatctttcctggtttctcttgtgggcatttggtgctataaatttccctctacacactgctttaaatgtgtcccagagactctggtacattgtgtctttgttctcattggtttcaaagaacatctttatttctgccttcatttcattatttacgcagtagtcattcaggagcaggttgttcagtttccatgtagttttgcagttttgagtgagtttcttaatcctgagttctaatttgattgcactgtggtctgagagacagtttgttgtgatttctgttcatttacattttctgaggagtgctttacttgcaactattttggaataagtgcaatgtggtgctgagaagaatgtatattctgttgatttggggtggagagttctgtagatgtctattaggtccgtttggtgcagagctgagttcaagtcctggacacccttgttaaacttctgtctcgttgatctgtctaatattgacagtggggtgttaaaatctcccattattattgtgtgggagtctaagtctctttgtaggtctctaaggatttgctttatgaatctgggtgctcctgtattgggtgcatatatatttaggatagttagttcttcttgttgaattgatccctttaccattatgtaatgaccttctttgtctcttttgatctttgttggtttaaagtgtgttttataagagactaggattgcaa

SEQ ID NO: 23882 - DNA, 2300 bp, Homo sapien
ttttgttgagtgccttaaatggaatatttcatactataacaaccctttgaaggagaagaaaaaaaaaagactgagaaaagggtgactgagcttatcaaggagatccttgaagaaaagggaggaataaacatagatttgtctaggcagtttggcagtgaaagaaatgagtgcttgaggagggttaaattaagtttcctcccccaggtaggtcaaacccatttgggctgaaagtagaaaggaagaacctactgcagagaaagagggggaagatctggacaggggtgagaggcagcccgcaggccccaacggctgtcttggaaagggagaagggactcctggtcctttgggtacatgagaatgttcacaaaatgggtggtacacagcaatacttggagaagagtgatagaagttgctggagctagattttttttttttttttaatctcagtgaagaatcagagacatctgccaagagggaagaaaaatggggtggggagaagggagatctgaaataataccagttggggctgccctaataatgactactaccacctttatcatgtggttatcatgagcctattatgggtatttacatatattctcctttatctaacaatttagttaagtattaattccaattatttctcagttatacggaagttaaggctcaaaaacgttatcacgttaatttaagaaaaagaattgcctaccacctcacgccaggggctgttctaggcaaaaaatttagacaagcagggggcctgccgtcatggttttatgtaagtggtgcagacagaaaaataaaacatcagatcatttcagagtttaagtggtgtggaaataataaaatgtgttatggtattaacggtggggaggaagtacattagtgtggtcagccaggggaggaccctgtaaggggacaagtgagctgagaagaacttcaggatgaaaaaggtaggaggaagagttttctgggccaaggaaagggcaagtgcagaggccctgaggcacgaactagctgggctcctgaagaaatgcaaaggtagtgcagccgatgctgatcaaggaggtctaggccaaggctgcagacgccatagcaagcgatgggaaggatttacccgagggggtaaagccgatccgatccgatagcataaggcttcctagggagcaagggccaggctgcccggctctccagcgcgtgttctttccacccggctaagctgcccggcacatggctctggggcgaggccaccgtcaggagaggttccaggccaaggggccaaagggccacggtccgcgggggatggggacatgacctcctgggtgtcgcaagcccggggcagcgctgacagccggcgcgggcctttcgcgagcagcaagcggctcccctcacccgggcccaatcacccccgcctttaattcccattagggaccccccgccgacgcagaaccagcccccgggcggcctggcttggtttttcattcccgggagatggatccgtcgcccaaaagttcggaatgacggtacccctttcccttaagatcgatgaggagacgaaataaattgggatcagggcgacgtcctatggaaaacagccttttgtatttttgtctagttttcccccaaggctttccataaactactcgtttctcggtacgctctccaagtcaccccctccaacagcgagcccgttggtttggcccctcagcccggattggctgaaggcttacgcctcggccagggattggcttcttaccactccccgcgcccattggttggggttccccgcttctgggcggagtggtgagggccggtttccgcctccttgtttatggagcgcgtagttgttgcgctctccgagcgctggggctgtctccaaagttccctatttagctcctcaggccaattggggcctcgctccaccctcgccctctccctcgcacgccttccgtgtggtacggcccacaccattagagtggcggcgcgtgtgggcgcccgtcgcgttcctccgcccgttctcgccgggtcgcaccccccaccccgagggtgtacttggtacggcccgcgccgcctcctttcctcgcccgggtggccatccccctccccccagtcggcggcgcttggtgccgcccgggagaaccaggtcatcggtcggttcccgtgaaaacaaaaacaatcggccgcgccgtcgcaggcacccgaacgtcgcgagcggggcctggggacgcggagccgagtgcagcgagcgaacgggagcagcggcgactcgccggggggctagggcgccatggggcaggcgg

SEQ ID NO: 23883 - DNA, 2300 bp, Homo sapien
gagaatcgcttgagcctgggaggcggaggttgcagtggtgagctgagactgcaccactgcactgcagcctgggcaacgaaagtgaaaccctttctcaaaaataaaaataaaaaatagaaaatcacactttcctcccatttaacactatatcatgaacatattcctatgaaaatgagtttttttgtgaattgtctatttatgaatttttcgtttttttctattgacttttttaaaattaaaatttgtagttactctattagctccagtctttgactttacaagcccttacacatacatctcgtatcagaaagagaaaaaagaaaaatcttactgcctttccttacttgctagtaggaaaacatactcatgcttatatgattgaaggggtgtataaacttttgaaagtgatctaatttaaatgcactacttggaactggaaatctgtaaggtgcctggcagactagagactgcaaaaagcacagtgctgttggtactgttgattgatgtggggcattcacgaaagaccactgccagaagtattttgctggttggccaggcacggaagctcacacctgtaaccgcagcactttgggaagctgaggcgggaggatcacttgagcccaggagttcaaaatcagcttgggcaacatagtgtttacaaaaacaatttttaaaaaaattagccaggaatggcagcatacacctgtggtcctagctacttcagagactgaggtaggaggatcacttgagcccgagaggctgaggctgcagtgagccacgattacactactgcacagaagcctgggtggcagagtgagaccccgtctccaaaaaaaaaaaaagtacattattgtcagcaggtttacctgacttggtgttaccacttgactgcatcattttagtgccaggcaaggaaccaaggcttacaaatttaggtaaatatttccaagatccagatgattaatatttttaaaaatcactttgactttgaagtcaaagaagcctcatgatttgactgtaaggtgtgaatacatcagcaagttaattagaatgtttacatgcttgtgcagccctttctgggaaggttaggacccagtaaaagtgcagctctgtgaagtccaatctcaatcagcaaattcattataaataatttgaaagattttactcttgtggtttatggagttactgagattttgtattcttacccagttcagattctagtggtctttggtgaattaggttaggtggggagtatttgtctaactgatggtcaaattaaataatataatgctaacagcttctatatattaatatatttagagaaataaagtactgtttccttattgccttattgcaaaatttgattttaacagctggctatatactttcctgcctttgccctcacctgacttggtagttccagttcaagattgattattccaactgttctatagaagcccgaggggctgtattttggctcatttaaaattgaatcttgttttttcccttattagaactatgtttgtacaaatcattttgcacagtaagatttactgtatgatacttgtctagctttatcttcctgatcagattgaaagcaccttgaggggaaataatggtatttactgtttttaatcacaaagtgaacaaaatcttgcaactattgaaagtttaaaagtatagttccctttcaggatctttgattcatgcttgtatatattaggccagttttgtaggaaaagagcagtggatctaggcaatttaattgtgaatctcgtggctgacaccgcttcaaagtgtggtcctatgcaagttcagatgcatcatgtgacacatgagagtcattctagtgattgtctatcttaatgctttttctttcactggctgaagggcctctgcaagtgtagttattggtggttactttcctgacaaaggtctgggccctagggattgatgttaccatagacttccacaagatggcagaccaagccccttttttgttttactgggtttcaaatagtttttaagacaccttgcttatgcttttgattcttaaagtcttttttgccttttctttaggtgggcagtgtcaaaccgggaaatgcttatagctcaaaacagctccttggaatttaagctacacagactgtattttattagcttgttaatgggtggaaccacaaatcagcgagaggcattacaatatgctaaaaattttcagccatttgccctaaatcatcaaaaaggtgagtctagagtcagatgttattaatgtttgaaacagggctatagccaccact

SEQ ID NO: 23884 - DNA, 2300 bp, Homo sapien
acattcaactgtaacagtggttttctgtggggagcaggtgacagtgaggagagttgagacagggaactttgtgtttgttttcgtacaagaatatattgcactgttgtcacttaaaagacatttttaaaaatttctgaatataaaatgttacatgttccatgctagaataagcatcttggatgctttgagggagctggaaggaggtactgaaatcaaaataattaaaaaaaaaaaaaaaagcccatccaggccctgatatggtggctcacacctgtaatctcaacactttggaggccaaggcggggcaaagcgcctgacctcgggcattggagaccagcctgggcaacatggtgaaaccccatctctaccaaaaatacaaaaaattagctgggcatggtggtgtgctcctgtggtcccagctacttgggaggctgaggtggaaggatcacttgagcctgggaggtagaggctgcagtgagccgaggtggtgccacactgcactccagcctgggcaacacagccagaccccatctcaaaaaaaaaaatagcaacaacgacaaagaacccatccaacacttaagtttgtacttcacaaggacaaggagaatgcagttcaacaagcacagctcagcccatgctgtgtttctggggatggaggacacatcatgaagtctcggcatggtcctcgcccagcagaactaatgggtggggcagacacatggaacacagaatgccaggtgtcttgtctctaggatcaagcagtagcaatgtgaggtgcagccactatgggattcaaagtggaaagactcagaaaccctgaagaaatgggaagagggcatgccactggagctggaaggtttcaggacagcaacagtcaaaaaggaaagatgagcctgtagtcccagctactcagggggctggggtgggaggatcactggagctcaggagtcccaaggccagcctgagcaaaacagcgagactccagtcttttttattttattttattttttaaagaaacaaaaaggaaggggacacacatgtgttagggacagaaaagagaaaaccgcctctacccaagcattcacccacatcacccacacctccctgcagagcacccagagctgggggtgaaagaaatgaggtccaaatgagacagcacaggagctgcctccagggcttaaacagaccagcattccaggccgagggaccgcaagtgcaagggcgtgaaagcacagagcgcaggggttgaatgacttcaagcctgtgaagctgcagctgcaggtgtatgggaaaggcagggcagggggctgtgcggaggctgggaggagccagcacccaagggctggtcaaccaagctgggggttgaatttccatccagcaatgcaggccatgggaggctgcagcagtgacgctgtcagatcccctttgtgagaataataatttttataacaacgtggctggaggactgatcaggagagagactggtgtgaattgaaggctgttgcaatggctccaagaagagatgaggctgtgtggtgagtttagccgctggatgaaaggccggaagaatgaggtcagcagcgcactgacaccgacacccaaagcttcggctgctgccgctctcatggaaatctcctgggggaagggagagggtccttcctcggtgaaaactggggctgctctagcgagttcctcagaagcgggcaggtcgctagttcctcttccttttcagccctcagtgcccattttgccaataaaaagtcccaaggtgacagtacaagagacgcctttagtgaaggcaaaggaagggacactcccctcctttgctgcctactctcgccctcacttcttgaaatctttggtctcccttcacccactctgtcactctcacaagacaaccatttccaaggactatttccaagcccttttcctcatccccaaacccgcagttttcagctgcccccagttgcctggccaggctgcctcgacggccctattcacgggccccagcctcctcgccgggctggaaggcgacaaccgcgaaaaggagggtgactctcctcggcgggggcttcgggtgacatcacatcctccaaatgcgaaatcaggctccgggccggccgaagggcgcaactttcccccctcggcgccccaccggctcccgcgcgcctcccctcgcgcccgagcttcgagccaagcagcgtcctggggagcgcgtcatggccttaccagtgaccgccttgctcctgccgctggccttgctgctccgtgagtttgagacgcccgggaaggcaggggat

SEQ ID NO: 23885 - DNA, 2300 bp, Homo sapien
ctaattgtgcaaagtatgagtggaatattatgcagatatcagataagattcatgaagaacgtgttataaaagaaattggctgaaataaaatttttatggaactttatgattaaaaaatttttaaagcaggctggagacctgaataggaaatatgatgacagtgatggaaaaaaattaaaaatatataagcatagaatagaaacaaagcaaatgcaaaacaatataccaaaatgttaggagtgactataattccatattggcactataagccattatttttgttttgttctgttttctattctccaaaatatttttaacctaaaaaagacagcaaaagtgaggcagagaggaatttagggacttgctaaagtcacaaattcaatgcacggcccaggccacccccagcttccattgctgtgtctaatcagcccgggacttcagtaaacgacaacaacaacaacaaaaaacgaggattcacatcaccaggagagaaacgggctcggcctaaggacttggtagtagctggcagcaggacgcgcttcgactaaggggctctggttccaagcacccccagagccagcgcaggagaggaccttccaggtaaactaaaaccaagagcggaatgaaatcggtgaataagccaaacgaacctcagagggaccttggcacccgcacccccgccccgcaccttagttctgcgagcctttccccgtctccaacgcgggcaaggctgtcagatcctcaagccgacccttctctgcaccgcgacctcagtgtcctgcgcgggacatcagaggccggacgctccacctgccccagggcacgccccgagcccccaagcccatctccttcctgtcgggtgctcacctcttcctccctgcgggcccagggccttcttgaggggctgcggatgcgaatgagccagcgaagggccgcccgcggcccctcggcacctctgcccagccgtcccgaccaggggaccagctcagccccggtcggggccccggcacccaggaccgctcaggatctccattccagtcccttcgcactttctgacggggaaggagagttgggagaacgagactctcaagtctggggacttctacccaccattaaagctttggcattctggccatttctttctttttaaaaaattattattattattttttattttgagatgggagtctcgctctatcccccagcctggagtgcagtgactcgatctccgctcgctgcaacttccgcctccagggttcaaacgattcttctgcctcagcctccccagtagctaggactacaggcttgcgccatcacgcccggctagttttttttttgttttttgtttgtttgtttgtttgtttttaaagtagaaacaggatttcgccatattggccaggctggtctcgaactcctgacctcagttgatccgaccgcctcggcctcccaaagtgttggaattacagcagtgagccaccgcgcaccaagcccggcccattctggccatatctatagacggatgcattgcacaggaggctcagcactaatcggtagatactgcgagatgctgggaggttaaggggcctacccgcaatatctctggccaatgccttgggctagaaatgccataattagccgctcttttgatcccttgcaaaatgcgaatcccaccgcacctccaccccacccgagtggtaatctcctagtggtaatctaagtgagcctgtgataagataagtagctcctggtggtgagggtgagaaattggggagctggagccccagccagggacgaggctgtaggggctagggcgaagatggaggctgctgggcccccagatggaagacggtaacgtgcgcccgcttcgtttttgctcgaggtcagtcaggtgcagactgaattcgaagtcgctccctcctccgctcaaccccgaccaggccaaaactaaagcagcaccgccccctgctgggccgacagggcatcagattttgctggacgcgggtgacaggcgagatagggagtgtccctgctgctagtgcccctgctgctagtgcctagttacctgcagtacttaccctccctgggcctcagtttttcttcctctgtaaaataaatgcgctgggccggatcttttctgagttctcttctcccctacgaattctagatccctcctctgtcctccctgcgccagggaccttcgggcgacccttccctgtacccccaccccaccctctctggaccccgtttctgcctcagtacggcgcgctgagctctgccccctgcccaggccctgaccccct

SEQ ID NO: 23886 - DNA, 2300 bp, Homo sapien
tcctcctacttcagcctttcaaagtgctgagattacaaagcgagccacaagcctcggcctgcacaatcattataaaaagctctctgaggataaggaccaaggccctgatttgttttcattgtaaacataatgttcatttgctcattgatttgatattgactgtgcacccacacgtgtgctgggcactgttcgaggcagggtttaagaaacgctcaagaagcacatgtggtctctcaaggggacggtgtagtggacagagataacaaagaaaaacacagagaagaaagaatgacggagagtgagaagtgctgtaagtgcagtgacagacaccgccccagggcctcctggacaggctgcatgtttgtaggatgatggggagtggtcctggagaagactgaggaggagccctggggggtccaggcagagagaggaggggcacagagctggaggacggaagggcctttgtacagcatgtgtgtgtgtgtgtgtatgctgggggacacgcagggagatggcaggcctcagcactggggagagctggagtgcattctagatgcagcagggagctggagcagggaccctcttctccctgcctggcctgagagcagggaaggaggccctgggctgtggctgattgcagtcaacactgaggaacaagtgccaatgcttcatgcagggcacaacctctgccacacttttacctatgtgaccttctgggccaggtactgtgaggtgcttcatttctcagatagcaaggctgaggctcagatcaatgctgctttgcacacagctggaagtggccaaatcagcccgaaacccccattttgttctgcatctttgtgcagggctgggtggctgtgtgtgcaatgtctgttgtgctggacatgcaacaggaaagcaattgttacctctaatttttaggaggccaaagggcaagaagccacgtgctccaggccaaagagcagctaagggaatgaagagtaaatctgtgattgaatgaatgagcagatgaaaagagaaaaagcctccccctgcacaaacctgcaacccattcccttcctggggtcctgtggggagggggcttttcatcagtgccctgggtcagggaagagagagggaggccttgtggtggagggaaggggaggagagctcaccatcagaggtggaaagaaggttctagtccctccagagcacactcagggatgctttcttgtgcttctgtcccaaggccttgtctcgaccttgcttactataaacacagtgctacatcctgcttttcctttacttcattgcataaaccttccctgaatcgcttccagaatctttagaaccaccgtttttaaggtttgaatacttgtataccaagtaaatgaccacagcttattgaaactcctctttatagtcaaccacttaggttgttctattgttatttctagaacacataactaatgccaataaataatgatgatggcacagattagtatttcctgaggatggatctcttgcgtgggttccaaagctctaagcaatttatatgggccctggagtttcctccacagctcctaaggcagctctggcacatgaggaggctgggaaaagagcaggggtgatgggtgcatctgccttggtaagtgaacttgttggttctgtcccacgcagcttgggtgtcggtgtggggggtgtgctgctggggttggagaggggccgccctacataacgtccccacataaaaggggcaggtgtgcaggtggtcccagggatggcggcagctctgtctgactcccccctactggggggctatgggggctgtgggagtggagggtgaggatcaccgtcctccaggatcccccaacccctccttggccattccctttgacttccttgggaaagagtccaggcttcagaggattctttgctcatttcaatctgaccccatttgaatccccaagggtcgcagtaaaccccaggcacacaaagacagaggcttgtggctggcttgcggttgctgtgatcacgatggaatcagacaacggctgccctggcaggcagcacccaggcacctctcaggtgggaaaagactgagccaggtgaatgtcccagagctccagccagctcaggctcctatgggtgataactgcactagacacctctccgaagaagccaacagaaactgcatgcagcggcaacatgagcaaagataagtgttgggacccgttcttcgctgccacctccaagtctgaacagcaggctctaaggggggcatgggagcccctcagaaagggccactgcccatgcctcac

SEQ ID NO: 23887 - DNA, 2300 bp, Homo sapien
caccccctacactgccctggtgaaggcagtcatcctcttttccctttgcacagtgatctctggagccatgagttgaagatgggggaaagaccctggtcccctgcaggactgagtggagcaaatactccttactccctggcacaactgcacttgaatgtcacagaacaatgcaggggatttgtattgagttaaaccactaatatttagaggttaatttatcacagacgcaagagtttccataactaatgcatccaggggttccctgtctatgattttagacaatacctgacaaagcagtgagtaacttttaatcatttactgagaaagttgttccttttgcaatgctgtggcgcccatgagagagtggatagaaagaggtagcttgtgttttctaaacaacaaatactttgaatacacatacaaagaagaaatacaaatggccaacaagcacatgaattgatgcttaacatcatttctcattcaggaagtacaaatccaaaccacaatgagatatcacttcacacccactaggatggaacaaaacaaaaacagaaaataacaagtgttggcgatgatgtggggaaattggaaccctttcattgttggcagaaatgtaaatggtcacagctgctatggaaatcagttggttagtccctcaaaaagttaaacatagaattattgtatgacccagcaattgcactgcctgagtacatacctgaaagaattgaaaacaggcacccaaacatatatttgtacaagaatgttcacagtagcattactcacaaaagtcaaaaagtagatatagtagcccactcaaatgtccatcattagatgaacagataaagaaaatgtggtatatacaggtacatacacaaaatattactcaacaataagaagaaatggtgctataatggggatgaacctgaaaaacattgcgctgagtcaaagaagccattcgctaaagaccacacattgtatgggagccaaggcagtatccagcgagactctggcctctggctgggctgagtgacttcttttcccccagtgcctttgaactctctgcacccaactcagccatgagcaatgctgtcaccagcaatgggcagaggggctggggcaagagtgggatggaaagaatactggatgtggagaccaaatgtgacagtgtccttgcccggctgcctgctttagatctcaggggacacgccatttcctctccgataaactctaagctcttagggtaacccatggacctgcctggctgggtctttgttgacatttacaaggagcctctcccgcagccctccaaggggtccctctcccctgcaggctgcatgcccagttctccctggacctccccaaccccctctctactaacccccgtttgaacaggaagacacagcctgagccaggtctcccctcacaaatctccccaccagggctggatcgcgcaacaaatagagccagccccagggcactcgccggcagggcgcagccggtgatcgtcacagtccttcgaaattcttaagatctaggtcttgctgcacccccacaacctacaaacagcgtcggggccttctctgcacctccagttcccagctcacctccctcagtgtcacagccggttacctttccttcctccctggcaagggagggcaagacttggggcttgctgactccaggcccagcccagcccggggcacccaggagcccctcaattgctactcaaacaagacaagaagcggcccgagttagtggccagctccaccatgcactacacatcctgacctctctgagcctctactgtcactcggggtcacaaccctttcctgagcacctcccggggcagggggcgatgacacacatgcagctgcctgggggaggccggcggtgtcccctcctttctggaaagcggagggtcctggtgggctctggaaacgcagcccagacctttgcaatgctaggaggatgagggcggagacctcgcggtccccaacaccagactcccgccgccaccgcgcccggtcccgccctccccactgcccccccagctccccgacccaggcgccccgcccggccagctcctcacccaccccagccgcgactgtctccgccgagcccccggggccaggtgtcccgggcgcgccacgatgcggccgcggctgtggctcctcttggccgcgcagctgacaggtaaggcggcggcgcgcgggctacccaagggtctgcgctcccggggcctgagcggggaggtgataagtggctgtcctggccctggtcctggcagggtgcagcgtcga

SEQ ID NO: 23888 - DNA, 2300 bp, Homo sapien
aggaaaatagccattgccatttatagagttacagtttattagttgatggtcaatgtccatgtgaagtagctggggcagcaaagattatgccaggggaaattgaagaagagcaacttgcagaaaactgctttgatgtagttgtactagttaaaagataggctcactattgtaatagaaaggcctcaaaagatacaatggctcaaacacaataaaaatgtctgtcttgtttacataacagggcttagcagataaacaggccacacagttattcaggaacccaggttgatggaggatcttttgtcttcggttcaaagcttgccgttggttgactgcattccagtcaggtggaaggggcaaagagcctggaggagcaggggtaggactggactggtcctggaagtgatgacagtgacttccatttataattaactctgtcaaagggtcacacctaacttcaaaggaggcagacgtatgtatgtagtctggctgtgggttcagtagaaagaggagaaaaaagattttccagagtagctacttgtctctgccatagaattgttagatagtttactgtaggtggactgtaaataaatgtttgcttagttctaacatttgactgatattgggttgatcctttgagacttggtatattgtggatatgcctaaagtttctttttctaccaaagatgtgatgtaatctatgtcgttacagaagtaggagagggaaggaaactaccattaaaatcagtccttaggagcccaggcactgttctagatgtttgcatatattaatatgatttcatttcatctttacagtaacctggaagaaagatatttaaataatgactttccagatcaaaaaatgagttttgatggcttttctcagttttcataattggcagaactgatttccgaatcctttaagttgatcagttgacaggaatgcatttatgatttttatcttttcttttggggttacttttcagtttgactttgaaggatcactttcccctgtcattgcacccaaaaaagcaaggccttctgagactggatctgatgatgtaagcattattatttcttgctaatataaattaatttatggatattcatactattcttccacttctgtggtattcctatcaattcctctatctttccaacacctttcactttatttattttaatactgaatagcaattattttgaagagtaggatctgttacattttctagggtctttaatgattatccaaaaattaatgtatgtattactgcatgatttcagtttgggtttgtagacattttattatcaactgatcacctgaaatgacagcatttaccttttttatgcagtgttttttaaattaaggttctcaatcgtatcaggttccatggtatattcctttttttttttttttttttttttgagacggagtatcgctcttgttgcccgggatggagtgcagtggcacgatctgagctcactgcaatctccgcctcccaggttcaagcagttctcctgtctcagcctcctgaatagctgggattacaggcgcccgccaccatgcccggctaatttttgtagttttggtagagacagggtttcaccatgttggccaggctggtctccaactcatgacctcaggtgatccgcccgcctccgcctcccaaagtgttgggattacaggcgtgagccacggcgcccggcgggcaagacaccctcagagcacagggtgctgccaagagcccggccgagtgcagctggagcgccgacgtcgccaaggatacacagtgctgacgcagtacacaagtgcgtcacagtggtcctccgccggctacgtcagtggctttcaggcgctttcctgttggaattggcgactgctgcggggctgagcgctggtttcacgcgtctcgggagccaggttggcggtgcgatgaggcgcagcaaggcctacggggagcggtacctcgcctcggtgcagggctccgccccgtcgcctggaaaggtgagtggatctcgaagagaccgacggcctcgacctggcggggcggtggcctcgacctggccgggcggcggcggcggcctcggcctcggcctggccgggcggcggcggcggcggcggcggcggcggcggcggcggcctcggcctcggccccggcctggccgggcggcggcggcggcggcggcggcggcggcctcggccccggcctggccgggcggcggcggcggcggcggcggcggcggcctcggcctcggcctggccggacggcggcggcggcctcggcctggccgggcggcggcgg

SEQ ID NO: 23889 - DNA, 2300 bp, Homo sapien
atgtagtctggctgtgggttcagtagaaagaggagaaaaaagattttccagagtagctacttgtctctgccatagaattgttagatagtttactgtaggtggactgtaaataaatgtttgcttagttctaacatttgactgatattgggttgatcctttgagacttggtatattgtggatatgcctaaagtttctttttctaccaaagatgtgatgtaatctatgtcgttacagaagtaggagagggaaggaaactaccattaaaatcagtccttaggagcccaggcactgttctagatgtttgcatatattaatatgatttcatttcatctttacagtaacctggaagaaagatatttaaataatgactttccagatcaaaaaatgagttttgatggcttttctcagttttcataattggcagaactgatttccgaatcctttaagttgatcagttgacaggaatgcatttatgatttttatcttttcttttggggttacttttcagtttgactttgaaggatcactttcccctgtcattgcacccaaaaaagcaaggccttctgagactggatctgatgatgtaagcattattatttcttgctaatataaattaatttatggatattcatactattcttccacttctgtggtattcctatcaattcctctatctttccaacacctttcactttatttattttaatactgaatagcaattattttgaagagtaggatctgttacattttctagggtctttaatgattatccaaaaattaatgtatgtattactgcatgatttcagtttgggtttgtagacattttattatcaactgatcacctgaaatgacagcatttaccttttttatgcagtgttttttaaattaaggttctcaatcgtatcaggttccatggtatattcctttttttttttttttttttttttgagacggagtatcgctcttgttgcccgggatggagtgcagtggcacgatctgagctcactgcaatctccgcctcccaggttcaagcagttctcctgtctcagcctcctgaatagctgggattacaggcgcccgccaccatgcccggctaatttttgtagttttggtagagacagggtttcaccatgttggccaggctggtctccaactcatgacctcaggtgatccgcccgcctccgcctcccaaagtgttgggattacaggcgtgagccacggcgcccggcgggcaagacaccctcagagcacagggtgctgccaagagcccggccgagtgcagctggagcgccgacgtcgccaaggatacacagtgctgacgcagtacacaagtgcgtcacagtggtcctccgccggctacgtcagtggctttcaggcgctttcctgttggaattggcgactgctgcggggctgagcgctggtttcacgcgtctcgggagccaggttggcggtgcgatgaggcgcagcaaggcctacggggagcggtacctcgcctcggtgcagggctccgccccgtcgcctggaaaggtgagtggatctcgaagagaccgacggcctcgacctggcggggcggtggcctcgacctggccgggcggcggcggcggcctcggcctcggcctggccgggcggcggcggcggcggcggcggcggcggcggcggcggcctcggcctcggccccggcctggccgggcggcggcggcggcggcggcggcggcggcctcggccccggcctggccgggcggcggcggcggcggcggcggcggcggcctcggcctcggcctggccggacggcggcggcggcctcggcctggccgggcggcggcggcggcctcggcctggccgggcggcggcggcggcggcggcctcggcctcggccttggcctcggccgggcggcggcggcggcggcggcggcggcggcggcggcctcggcctggccgggcggcggcggcggcggcggcggcggcggcggcctcgacctggccgggcggcggcggcggcggcggcggcggcctcgacctggccgggcggcggcggcggcggcggcggcggcggcggcggcggcggcggcggcggcggcggcctcggcctcggcctggccgggctgcggcggcggcggcggcggcggcggcggcggcctcggcctggccgggcggcggcggcggcggcggcggcggcggcctcggcctcggcctcggccttggcctcgacctggccgggcggcggcggcggcggcggcctcgacctggccgggcggcggcggcggcggcggcggcctcgacctggccgggcggcggcggcg

SEQ ID NO: 23890 - DNA, 2300 bp, Homo sapien
aatcttacccctttatagccaaatagaagccccatagtttatgcacataagtttatgtactttacctgcaaagggttctcacacactcatgcagcattgggtttacacttattttggattcagctatgacatacttggttatatggtattttaatattatttgcttccaacctgtgctgtgtgagtttgcatattgcaaactgacgggatagaggatatgctgatgagggtgggcccagtggcatgacagtggaaagggaaaaaagaatcctggaagagaggatatgtgagtacacaaacattgcagtttgggattatttactactaaaagcagatttgggtctcttcacagtggtagccctggccactctgaggggatcattgtatgacagtgtagtgctataattgatgtggagccactgagaatggtataaggccaggtgtggtgggctcgtgcttgtaatcccctccctttggaaggctgaggtgaggggattgcttgaggccaggagtttgagaccagcttggacaacatagtgagactcggtctctacagaaagaaaaataaaatcagccaggcatgctggcatgcatctgtagtccttgctacttgggaagcttgagctggtggaccacttgagcccaggagctggaggtgacagtgagctataattgcaccactgcactccagcctggggacagaggaagaccctgtttccgcttaccaaaaaaagaatggtgtaaattatgtggtatcaactcttaacccttttaaggcagagagcatgtgaaacattttagaaactgaacgacatcagaaataaagttataaagctttggttaataggcatgttaagtcatttagaacatcatgtaatgctagctaagcattgctattcgtggatgcatatattgaatattatatatttactgaagtatgtaggcagtattttatataaatgtataaacatagaagttgtatgtttttcatagtgacttttttttttttgagacagttttgctgtagtcatccaggctggagtgcaatggcgtgatcttggctcactgcaacctctgcctcccgggttcaggcgattctcctgcctcagcctcctgagtagctgggattacaggtgcctgccacaatgcccaactaatttttgtatttttagtagaaatggggtttcaccatgttggtcaggctggtttcgaactcctgacctcaggtgatccacccgccttgacctcgcaaagtgcttagattacaggcgtgagtcaccatgcctggcccatagtgacttttaatttgtcacccgagctagaacatctttaagagtgaaggggagcagttagtaattgctaggcaatggatgtaaatcaggactgtctctggcaaactgggctatttggttactttatttctgatgcaaaattaatgatcaaaaagctgtccttggccgggcacagtggctcacacctgtaatcccagtgctttgggaggccaaggcaggtggatcatgaggtcaggagtttgagaccagcctggccaacatggtgaaacatggtctctactaaaaatacaaaaattagcctggggcagtggcagacgcctgtaatcccggctacttggtggctgaggcaggagaatctcttgaactcaggaggcagaagttgcagtgtgccaagactgcgccacagcactccagcctgggcaacagagcgagacaccctctcaaaaaaaaaaaaaaaaaaaagctgtcttcagacccctttcaagccctgttgaattcagtagttggttttagtttcagatgatgggttaggtaatgtttgcatctcattggctctttaatgacagttttcttttcataataattggcctttacatagtagaagttaaagaaacttggttattgaaaggggaaaagaaatgcatgcagagtaagaatactaaaattaatctttgcttttaatagtacaaacgtgtttgcaaacaattaagtttatcctgccaaaagaaatagcagttcagatgcttgtcaagtggtacaatgtccacagtgctccaggaggacccagttatcactcagagtggaatttatttgtgacttgtctcatgaacgtgatgggttttaacacagaccgcttagcatggactagaaatgtaagtaaatacaattgttttctttatgagttattctgttaatgtaatggttgcataattggtaatataacattgagactatataataggcgtaccatattcaaaataatagaataatattaaggtttattgtatc

SEQ ID NO: 23891 - DNA, 2300 bp, Homo sapien
tgcaatggtgcgatctcagctcaccacaacctccgcctccgggttcaagcgattctcctacctcagcctcccaagtagctggaattacatgcatgtgccaccatgcctggctaattttacatttttagtagagacagggtttctccatgttggtcaggctggtcttgaactctcgacctcaggtgagccgcccgcctcagcctcccaaagtgctgggattacaggcatgagccaccatgcccagcagacctgaattattattattaaaatgttacatcaacatgtacaaatataaaactacatctaaactctaagtacagacttcttatgcttaaaactcttacacagtgttaaccccaagacagatttgcaattaagtagttaaaataagacaacaaagtcaataaaaatcaaataaacaatatacatttaatgtggtagactttgctgttttgctgaagctaagcaaggaaccagtttttaaatcagcaatccgttattttaatggactgagcaatttaatagtgcacctcaaaggtcaatgataaaaactaaaaaaaaaaaatacctactgaaaaaactgtcatcgtttcacatttctggctacgttagtgcaaaagggaataaataaaggtgagatttgtgtgacagtgtggatatggtactgtgtgacaactcagttctcccatcacttccacctgtttgaatcatcgggatcctttatttgtacaccatgttatcggtatttgcccttaagcaccaccaatgcaccacttttatattaagtctgcccgttttccttagtactccataaaatttaagtcacatattactctgcctcaccatgttacttcaataattctgaatcaaagtttaagtttgtgaataattttgcaaaaaaagagccaatcatgcttctcaacaacataaaaagagaagcgccgtcacttcaggtgaatattgttctccgtgaggccatgagcataaacaaaaactccagactaaaaccctgagacggtgccaggtcattcagcagtcagcggaatgatcagtataatttcaaacaaagttttaaagatcattattgaaatgatgtattttgagcttcctggatctgttcctttatgtctaccttagttcatttgggctgctgtgacaaaaatatcataaactggagagtttataaacaacagaaatttatttctcaccgttctaggggctgtgatgtccaagaccaaggcactagcagtgtctggtgaggccctgcttcctcatagatgacacattctggctttgtcctcacatggtgtcaggggctagctaattccctggggcttctttcataagtgcactaatctctgtcctgagggtagagccctcgtaacctgattgactcccaaaagccccacctcagtactatcacattgaggattaagtttcaatataacttttgaggagacacaaacattcagaccatagctttatctatcatgaatttgggggaattttcagtcactgttgcttcaaatgtttcttctgtttctttctcttttttttttttttttttgagacagagtcttgctctgttgcccaggctggagtgcagtggcacgatctcagctcactgcaagctcctcctcccaggttcatgccattctcctgcctcagtctcccgagtagctgggactacaggcgcctgccaccacgccccgctaattttttgtatttttagtagagacagggtttcaccgtgttagccaggatggtctcgatctcctgaccttgcgatctgcccgcctcggcctcccaaattgctggcattataggcgtaagccaccatgcctggctttctttctctttttcttctctttctggtatttccaaaaagtctccatgttccaccttttgtaattgtctcacagttcttgactcttgttctgttttttctttttcattcttttctctcattgtgtgtcagcttttgaagtatctattgacatctctttgagctcactgattctttcattggccatatccattcttttgatgaacccatcaaaggcattcttcatttctgttatggtgttttttatttctagtatttcatctttatttcttcttagtgtttttatctctttgcttacattacccatctgttcttgcatgttatgccatttttacattagagcccctagcatgttaatcttagttattttaaattcctggttggatacttccgatatttctttcatatctgagtctggttctgatgcttgctctgtctcttcaaactgtggggt

SEQ ID NO: 23892 - DNA, 2300 bp, Homo sapien
ttttaaaaaaaagctttattgagatataattaatgtatagaattcacccatttaggcatacaatccaatggatttcaatatattgagagttgtgcagccaccatcagaataaattttaaaactattcatacccccaaaaacgcactccactctccttagctgttacccccgatctgcagcttctggcaaccactaatctactttctgtatttatatctttgccattttgaacatttcatacgaacggaatcatacgatttgctagtagttcttcctgtaaataatgtatacttgaaattcaatctataaattaccagataaaattttacaagttgcactttagagtcaaatacatttgaatttagtggaagccattcaaggagctatcaaacaaaatacagagcaggagaaaattaaagaaatttttgtaagaaattggtgtatgttgggggtgtgaatattatatttcaatgcatggaaactatgacatagatcactgtgaacttattcagtgggctacacccaaaggctagaacaaacttctccgccacaggattaccaatgttttaaccaacctggggggaacattctctcataagctcttttggaaagccaggctttctgtggatgtatcatctttccagtgtgctgcaatgcccggggagaggaaaaagtttcttttacagccatgcttagtgggaagtggagaaacatcttccatttcacaaattaagtcttttacacatgcaaatatgcatacacattcacacaccacagtgaggaagaaattctcacaccattaataaaatacatttgcatcagtagcaatatacatctgcattttgcctataatataaatgtatttttccactaaaagatttgatgtttccttgccagcaaataagccctatcaaatcctattgccatatgagtcctagaggtgaataagagaaaaaaaaaatgggggaaaattatttcaaattaaaaagaaaacagtttgattctgttttgggatatttcctagggacaggagctggggaggggatctcagcagcgatgtgctatgaagtataataacatgacacagagaacttaattgaagggggaaataaatggaagttttctttttttgaatatcaattgtagcctgctctgctatacttcaaaaaaactcttcagaaagtttaactgaactcaccgtaggacacactttgtggatttattgtgtgttttgaagtcacactgcgagctatagaattaaccaaaacacaactcttcttggaaatgagagttcaagttggcagaaagtgcggggtaaagacatggatatgggcctaaagcatctatttctttgtgatcttttgatacatctctcaagtgctttttagtggattaggtttagaatgcatcagccaactcctgctcaataatccatttttccagcccggaatgtcttaaattgaggaaggacgaagtcccagaggtggggagcagggggactttggccgaggactttgcatgaattgatgagcgtgcatcctcctccctgtgctctgtgtaccctcaggaggtcaggacgggcctttctgagaatgagaatctgttcatttgccttcctactggatatttgtcatcagcatacaaaccagtgtgctctgcagtgtgtcatctttcagaacctcccctgaccgcatcttccctggagggctcgctgtcttcagagccaggcttgtctcccgctgccgcctccactgctctcctcgtcactctataacccactccctctgcctgcagcccccaccacgcccctcaaagtggtcaaggttgtcctgttgtctaattccatggagcttggctatcttcattttattagcctcttttggcctcttacccctgtgaaaatcactagcattctgtgcgaaggatggagctggcatctccaggcttggaatagacctaccaaagctcagccagatgtccggaagagcctcaggacaagggaacaccctgtagccttgtggtgggagcacagctgaggcccccttggccaccctctgccacgaccaggcagaaagcagctttcggacagattcgttgtctcagatttgatctcaaagaaaaaccaagaccagtatttgtcccaggttctgcttttttacaatttcctccgaaatccagatacctgtcaacaccttggaaaaactgatttctccccagttagtagtgttgtgtgactgtcatcagcccagtacaaaaatggccttctttgttggggagcttcttaccctccagtgttttgc

SEQ ID NO: 23893 - DNA, 2300 bp, Homo sapien
ctactgtgtacggtcagtgtgccaagcccccaagttgttcaagggtcaactgtaatcctaaaagaatctaatacaatattgtacacagtaagtggtcagtaaataaggaattgaactaaataagaatacataaatctcagaatatgtgcaacctgatcgtagtacacagagatctctctctatatctcttttctcagttcatgccattatttcaggtagaaagcaccttattttgaattagttgtctttagagcaaaaatccgtctaagagtgcagtgtggtttcctatgcacaatctggaatagtccattgcttcatgcctaccctggacatgaagggccgtgccacagtggaagtctctatgcatccacccctgtctatacctgagcaactcattcctctttgctgctctcttacaggctacagagtgcggtggcgccagcacagaactctgctcaatgtccctctgtgctttcacgatgctgatggattatgaaggtagggaagaatgtacagccaggaggccattaggagggcaactaatttataaaatcgcatttgtagaatttaatgcatctaacacctaccaggggaaaggtgggcaaaagctataccaacactacccaagtcaaaaccaaaaaaacaggaaaagaaaattatgtggatgtagaatttctgataacatcattcccaagatgccttatccaagaggaactgctacaataatattttaagtggaaataaatacatgctggaagcattatatattagtagagttagtttttttttcccccaaagtactttctcaagcacatcaacataagccccctaagagacatttcacattaaaaataaaacgtctgcccactgctggtttctcaatttgcctccaccttctgtcccctttaatgaactgggccacgaggtgagtcagagaggataaagggagtggtaagaatttgaggagagaagagagtgaggctagaataggaaatcaggaaatgcgattcggtccccctgttcctcacatggggccaccctcttgttgcccagtgtggtttcttcttgagggttctgcatgattcctcaatcccagggaattccacaggacgttccacccaagaccattgggctcccacctctactcttttgccagttaatgaataggcaggaatttcactgcctggaaagaggaacaatgctttctggtccttatttcacatctaaaatagagaggtcaattgatttattgctaaatatctttgaacactaaaatagaagttttacaacatatatactacctggttgctctagacttaagccagggaaaagtacagattcaacatttaaaattgagatagacgctttccacttagtgctaccagtcttgctttatttcatgagaatgagaatataataatatgccatacgttcatttgggggaaagattgatgtcttataatttataattacagaaaacatgtgagttcactgggaataaagaaattttgaagataataagatactttcacttatgtcgtaatttctatgtcatttggtgtaggatgtggagatattaacatttacacctaacttaagtttgtcatccaggacctgaaagggttttgtctatcagctgcacccctgggtagcgacacaaccttggggaaggcctcagccccatccctcgtacagcaggaatgagaacagcactgcctgttgggaagcttgagggaggctatggacgtgcagcgcttggcagagggtctcgtcatggaaggttccagcaaatgtgagatacttttctgatttcattttctccaaaagaaagggaataaaagaagaggggaggaaataagactaattgtgagagataaagtacaaaggtgagggaaggagtaaggagacatgaaggcagcatggagcagctgaggggggagattgctttcaccacttcccagcatctattgcagattccaccctcaatcattttgtaaggaccctttattcaaggtcgtgtttgaaccctgctgagccagtggcgtgggtgtctgagagaatcattaacttaatttgactatctggtctgtggatgcgtttactctcatgtaagtcaacaacatcctgggattgggacacactttctgggcactgctggccagtcccaaaatggaacataaggaagtggttcttctacttcttttatttctgaaatcaggtaagacatagtttttttaaattataataattattttttctcccacaatgcagtacaaatacatatgccatggctttatgtg

SEQ ID NO: 23894 - DNA, 2300 bp, Homo sapien
gttagcaaaatgtctttggcttttgaggacgtaattgttgtatttcatatcgtcctcctcttgaaatacatataacactttactctttagaaaaggtgaatgtaaaactattttgcctgatagttaccttaagaatttacaaacaaagaaaacactggacttgtttttctgtgtcttgatcaggaatagattttgaggttagtggggtttttagtgtagtttaaacttatatgagtatttttttttttttggatatgatagatgatactccaaataaaaatagataagcctttcttctgccactcccctgcacaggatacatcccttgatacattataagactcacatgcctatgacattccagagctattctcttgggacacttctgttttaaaattctctcctgttcttttatctgcttgtctctatcatctatcattcatctgccactgttttctagttctctttactttttttatggtactgttttgaggggaaccatcacccacacttagccacaggctgctgaagatctgaattagttgtgatttccctattaactgtttcctctccacatgtacccagttattagtcacctgtgaataaaaagatggagtgacagaagttgagtttagagcataggatttatgagcatggcctctagagccaggcatggccatgctgtgctgggtgactttggttaaattactttacctcttgttgcctcagtttcttcatttgtaaaagtaggcatacttcatgggatggtgctgtgtatcaagtgaattatttttacatagcacttagaatactgctcaatacatagtaaagctcagtgcagtcagccattattagtagtagagttcattgattctaagatgcaagttttttcactttttaatatctctgaaatcagttgtgtatttcagtgaacaggcgtcatagtttaattggcagtgctttttctttcttagtttctcatgaaataatgatacatcttatgagtggcatcttatattcaggggatataatattgttctcattataattttgttacttgtgcaaagttgaagtgaattatgtgtaagatttcctctaaaaaaattctatgggttgcaacagactcttggctttgaattttcctgatcccaaattaatgttgcggttgtgttcccagagaatctttaagacagcaaaatttttctttccagttagctagaaaagcagttatgtgtgtccagttaaggagggtgtatgcttatgaatagctttgtctgcagagaaaatgtttgtcagttgtcagcctctgaagggatatttctgtgtcttcagatatagcttgtataggcgtttcttagttataaatgccctacttccaaaatttctgttagttttttttaagtggctatatggaatgttaagctattttaacataggaagaagttgaagagtggtgtattaatttcacagtagagccaacagaaaccattttaaccttgaacatacctgatacataatggtattagtcctataaatctagccatcatgtaagtgaaaccaatctgtatttcccttggagacaccatgaaatccattcacctctaacacaaggaccttgtttcttttcttgtgtacaggccacagaaatggtacttctgaggctgtattggcaaaagggatgggaggaggatcccacatgtactgaggacagctagactgaaattaacacagtgataaaaaccccaaaagtactgtattttcctttgagaaggttagcatccatcggagtggaattttaaatttcttttttttttttgaatgcctagagagagtcggcttggtttataggccaggtggttttcattcaatgtaaatatgaaacaaaacagaggaaatatgtctctccctaagagtgtaataggaacaagaatattaaaatgaaaataatcatgtttgggtagttcactcacatctgtgtatgaatttactttgagacaacttcatcttatacagtacaccttcttttgaaatacttacagatgatatttcaattgctctttgctttaaacattttcacatgttggtttttactttaattacagattgctccaattgtgtcagcgaactatggctcttcctgtaggacgaggaatgtttaccttgttttcgtaccatcctgttccaacagagccattgcctattcctaaattgaatctgactggtatgttaaattctgggctcaatgagaaaggaaaatgattaagtacatgcattaagtgtagttctttaaattagttaaa

SEQ ID NO: 23895 - DNA, 2300 bp, Homo sapien
ttgtacgcgtcttattaattgttaagatgagcattaggagcaggagattttgtgaatgttctgtcttgtgcctggatctttctttgccttgaatcaggacaagtcctgagggtagtcatggaaactaccatggctatttccctacttgtaccatattagtaattaaccactttgtaattattacataggaaaagggagagcacatatatcctgaatttggatgagtaattatatataagtattttctactgcatattttttgatgtgttgaattttttgaatttaaccttttaaataggtgtaaacatatttgtttaatcacataaaactgcagccccagggaaaaaatgtgtttttttcagtagagttgtttaaaaacatgtcttaagctatccctcccgaaatactgtctttcatcagtcatcaagtctgtttttttttttaaatgagttctaggaatcctgcaagtagaaagttaaattatttcattactctccaattatctttttaaatcatcctcaaaacttgaaaatgaaacttttaaaacttattctagaattctaggtaactttaaaaaatgaacagtagaatctcatcaaggaggattcaggaataataattccactcctggtgactcttttatgttcatgtccctgagaagacagtgggaatttggccttgcctcttagtagcttttgaatcaatacataataatcagtacattgtaactacgagtcaccttaggtcttattactacttcttcagagcctatatcaaaacttattcctaacctcagagttgcctaatgtgtacccatgccggagtcagtttccatgggcatctgatctccagcagggtcatcccagcatctctctcctttaatctgcgcctctatcacagctcttcgttgaattagtatttacatcctgttttaaacagaaaacaaatctttttgcttataaaatgattttcctgtgagagagagcagttcagcaccattagcattaaaacattaatctgtatttgaacgtgattttaagtaattatgtctaaatacagtttgttcagttatttgaggctacattttataattaatcccatctaaatttattttgtcactgtttgagactatgttttatagctaactcacccattagaatacagttttttttttaaattagatattttgtaggaactaaaaatgaatttttaggaactaaaagtgattatttggtcgtatctacttttttttcaggctgaccttgttggtttcacattaaatgttgcaaaactttaacatttcaacttggagttattcttttgttaaaagagtataatactgtttttgagagaatatgatatgattccatgcaattcacatctgtgttgcagttagatttaattatttggactgggaagccccatattaaagcacatgctgggcttagaacatgatgacaatcaaggaatttaccctcttacttgtttcgctgcagttcagtacttttccttctaagaaatttttattggaaacacattttttaaaaaatagtgaaaactggctgggtgtggtggcgcatgcctgtaatctcagcactttggggtggccaaggcggaggactgcttgagcccaggagtttgagaccagcctaggcaacatagtgagacctcatctctacttaaacaattttttaaaaaatttagccaggtgtggtggtatgtgcctgtagtcctagctatttgggaggctgaggtgggtggatctccttgaggtcatgagttcaagaccagcctggccaacagggcaagactctgtctctacaaaaaataaaaaaaattagctgggtggccagtgcacatatgtagtcccagctactcgggaggctaaggttgaaagatcgcttgagtccaagaggtggaggttgcagggagccatgatcacaccactgtactccagcctgagtgacagagtaagaccctgtctcaaaaaaaaaaaaaaacttaataatgaaatccaaccatgatcctgtctattaaaagtagtaaagtaagaaagtatttcattgtgtgacttcccccaacccttggtgtatatcctttcaggcttttttccttctccttctattaatgaacagacaatatttaaattagcattattagcagtgactagtattcatattctacttgcaataatttcttttttaaaatgatcaggatgagttagatttttttttatagtttattcagaatatttctctgtttgtatccagccccttgactgttgtcctaaatttaaactc

SEQ ID NO: 23896 - DNA, 2300 bp, Homo sapien
gatctggacaggggtgagaggcagcccgcaggccccaacggctgtcttggaaagggagaagggactcctggtcctttgggtacatgagaatgttcacaaaatgggtggtacacagcaatacttggaaaagagtgatagaagttgctggagctagatttttttttttttttttaatctcagtgaagaatcagagacatctgccaagagggaagaaaaatggggtggggagaagggagatctgaaataataccagttggggctgccctaataatgactactaccacctttatcatgtggttatcatgagcctattatgggtatttacatatattctcctttatctaacaatttagttaagtattaattccaattatttctcagttatacggaagttaaggctcaaaaacgttatcacgttaatttaagaaaaagaattgcctaccacctcatgccaggggctgttctaggcaaaaaatttagacaagcagggggcctgccgtcatggttttatgtaagtggtgcagacagaaaaataaaacatcagatcatttcagagtttaagtggtgtggaaataataaaatgtgttatggtattaacggtggggaggaagtacattagtgtggtcagccaggggaggactctgtaaggggacaagtgagctgagaagaacttcaggatgaaaaaggtaggaggaagagttttctgggccaaggaaagggcaagtgcagaggccctgaggcacgaactagctgggctcctgaagaaatgcaaaggtagtgcagccgatgctgatcaaggaggtctaggccaaggctgcagacgccatagcaagcgatgggaaggatttacccgagggggtaaagccgatccgatccgatagcataaggcttcctagggagcaagggccaggctgcccggctctccagcgcgtgttctttccacccggctaagctgcccggcacatggctctggggcgaggccaccgtcaggagaggttccaggccaaggggccaaagggccacggtccgcgggggatggggacatgacctcctgggtgtcgcaagcccggggcagcgctgacagccggcgcgggcctttcgcgagcagcaagcggctcccctcacccgggcccaatcacccccgcctttaattcccattagggaccccccgccgacgcagaaccagcccccgggcggcctggcttggtttttcatcccgggagatggatccgtcgcccaaaagttcggaatgacggtacccctttcccttaagatcgatgaggagacgaaataaattgggatcagggctacgtcctatggaaaacagccctttgtatttttgtctagttttcccccaaggctttccataaactactcgtttctcggtacgctctccaagtcaccccctccaacagcgagcccgttggtttggcccctcagcccggattggctgaaggcttacgcctcggccagggattggcttcttaccactccccgcgcccattggttgggattccccgcttctgggcggagtggtgagggccggtttccgcctccttgtttatggagcgcgtagttgttgcgctctccgagcgctggggctgtctccaaagttccctatttagctcctcaggccaattggggcctcgctccaccctcgccctctccctcgcacgccttccgtgtggtacggcgcacaccattagagtggcggcgcgtgtgggcgcccgtcgcgttcctccgcccgttctcgccgggtcgcaccccccaccccgagggtgtacttggtacggcccgctccgcctcctttcctcgcccgggtggccatccccctccccccagtcggcggcacttggtgccgcccgggagaaccaggtcatcggtcggttcccgtgaaaacaaaaacaatcggccgcgccgtcgcaggcacccgaacgtcgcgagcggggcctggggacgcggggccgagtgcagcgagcgaacgggagcagcggcgactcgccagggggctagggcgccatggggcaggcgggctccggctgcgcggggctcccccggcgccgcggctagtgcgcccgccgcctcggccgcctcagcctcccgcgccgcccgcttggggaacgaggagcaggacgcggcctcggcggggcccgggccgaacggctgcggacacctgggcgccgaggagccgagcgccgccgcctccggcatggatcagtgcgtgacggtggagcgcgagctggagaaggtgctgcacaagttctcgggctacgggcagctgtgcgagcgcggcctggagg

SEQ ID NO: 23897 - DNA, 2300 bp, Homo sapien
cttatcacagtaacctaagccatcattttaaactacactacaatgtataaccaacgacagaagaaagatagctgttttacaaaagtagcctaatctgaagaccacactctgatggtaggtgcagcacaagaatattgttaagttaatacacttctgacatgtggcctcatgcctgtcatttaggaaagattttttgagttgttaaagccaattattggctagggtacagtggagagccacactcacatactgctggtcatagctatttggcttagctattgtaaacgaagccattttccattggtgacaagaatctttttttttttttttcgagatagagtctcgctctgtcgcccaggctgaagtgcagtggcgtgatctcgggtcactgcaagctccgcctcccgggttcatgccattctcctgcctcagcctcccatgtagctgggactacaggcacctgccaccacgcccagctaactttttgtatattttagtagagacggggtttctccgtattagccaggatggtctccatctcctgaccttgtgatccgcctgcctcagcctcccaaagtgctgggattacaggcgtgagccactgcgcctggccggtgacaagaatctttatgtaatttgttagtgtcattttttctgatctttattgattttatttttaatagatttatagaaataaatgtatttgagtaagaagagggaagttactgtctataaagctttttaaaattgaagtctcattttatccttctttttttttttttgagacagagtctcactctgttgcccaggctggagtgtagtggtgcgatctcagctcactgcaagctccgcctcccaggttcacgccattctcctgtctcagcctcctgagtagctgggactacaggcgccagccactgcgcctggctaatttttttgtatttttagtagagacggggtttcaccgtgttagccaggatggtctcgatctcctgacctcgtgatccacccatcttggcctcccaaagtgctgggattacaggcgtgagccactgcgcctgggcgatttttttttgttttttcttctgagatggagtcttcctctgttgcccaggctgcagtgcagtggtgtgatctcagctcactgcaacctccatctcctgggttcaagtgattctcctccctcagcctcccgagtagctgggattccaggcatgtgccaccaggcctggctaacttttgtctttttagtagagatggggtttcatcatgttggccaggctcatctcgaactcctgacctcaggtgatccacctgccttggcctcccaaagtgctgggattacaggtgtgagccactgtgcccagcctatttttcttttatgagatcttaaaatatgaaaacttttttgtttttacattctaaaatagaaatcttaaagtttaaaaaactgtttgagaaccccaaagaaaaatattgccatacccacatagatgtttgatgtactgtgtttcaaggacgtgtgtatatgtatgtgcaagtatgtatgtgtagaagaactttgctgtctgagaagaattgacatcctgtcttcccccttcttccctatcaatccttaaggaaaaagaaaaaaaaatctgagaagataaaaacagatgcctatgttgagtagaaagggatttttgagagtgattgattttataagtggtcagtttgatagtaaatattttcatattatgatactttttacctccctgtaaaacctcttcactgtgaagactaaagtaaagaattattgggtcaaaggtcagttatataaaatttttaaaagataatttctccattactttttaatagaatcttatctgcctttaagatttctgttcatttgaagatattacttgagcttctgtcctgtcttagcttataggcaacagcagattgcagagctcatattgtcacagttgtttgttacccactctctgtcttttttgtgaacaggtatcatctccaggctctccggcacctctatgtgctggccgcggagcccaggcttctagtgcctgtggatgtggacacaaacacgccctgctatgccctcttagaagttacctacaaggtatctctccctatcatttacttgtaattttattaccactcatccgtctttgcaggtcataatatttcaaatgtgttgtccagtaaaaggtgataagtaatgaattgaactttcataaaaatggaagcttccaaagttattgtatatcctgccaggccattcatgctcatttatatgatct

SEQ ID NO: 23898 - DNA, 2300 bp, Homo sapien
tgctaacaggaactctgaagcccgggctttcaaggtagtattattgattggtaaaaacggaaagaaataattctaaattgctggcttcctcgcccattgctataaacttcaaaggtggatctgcttcctttttcattgttgcagattgtaaagactgactgtggctctgtttgctttttatgtgataaaataaataataaaatataatgaatataaaatactgtatataataagtaatatatatataataaagtaaaatactgtaagttaatgtttacatttagcagcaaggacagtcacaccatatcttgacactgtaacaaatagtgattttattattgatcttcaaatcggtgaagatttacttaatttcatagcaaaaatagaaaacgagttttgcaagctagcaattattaactccatttaaaaaccaccatttgtttccttaatctcggtgaggataaactgatgacagattcagacttcttttattagtttgctttattatttgcacagtacttgactgccagtgcagtagtgtttgaaataaggaaatagttacgataaatgagggtaggaagcaatctcattcccttggcggggtcagcacatattttgctctatattcttgactcagataagtttccaacacaagaaatttgtcccataatcaggcattaagacttctgaatttaacttcagtttcctgtaattccatgagcaactgtgtccctgctggtgatacaaagtagagtagtctaaagtagttaggaccctaaggaataattagacggcaaaagtggggcaggcagactggatgagtggcagccagaggactgagttagcatcctttgttcttccaagtacggagacagcagtttattttaattcaactcatatttcattttagtcagttacttatgaccgagcctttataatggttcccaggattgaaatgtataaatagttcccagggttgacattggtgaattttgtttggcagtattcagtaagttgtttatgaaatacttttgaaagatttttggacacagtttaacttaaatttgtagtattgcttcttctaaaaattagagcatattccaaagactctaacccaatttgtgaagaaaatagataagtttagacttgagtttgaacgaagaaagtatataaaaattaaaagctatttctatttcctgcctactggagttcagaaataaaatataaacctcagtggaaaatagtaataccttcatatttcattttcaatcttgaaccttgagtgatactgtttttttcccaagtttaaaaagttgtggtaaaatgcacacaatttattgtcttaaccattgcaagttacagctcagtaatactaagtgcattcacattgttgcgcaaccatcaccaccatccatctctagaactgttgcatcttgcagacctgagatctatacctgcaacaataacgcacaaccatcaccaccatccatctctagaactgttgcatcttgcagacctgagatctatacctgcaacaataacgcacaaccatcaccaccatccatctctagaactgttgcatcttgcagacctgagatctatacctgcaacaataacgcacaaccatcaccaccatccatctctagaactgttgcatcttgcagacctgagatctatacctgcaacaataacgcacaaccatcaccaccatccatctctagaactgttgcatcttgcagacctgagatctatacctgcaacaataacgcacaaccatcaccaccatccatctctagaactgttgcatcttgcagacctgagatctatacctgcaacaataacgcacaaccatcaccaccatccatctctagaactgttgcatcttgcagacctgagatctatacctgcaacaataacgcacaaccatcaccaccatccatctctagaactgttgcatcttgcagacctgagatctatacctgcaacaataacccctcattctacttcccctagtccctggcaaccaccgttctattttatgtctctgtgattttgattatactaagtacctcatttatgtggtttcatacactgtttatctttttgtggctggcttgagtgatattcttttttccttaccttttcagtaacaattctagtttctggtaggctttttaattagtcagtgaaggagggaaaagccttttttggatgagttgtgtaaacaggaagacctgtttgttattggccttttgataaattagcagctcatgttaacttgtgcaaaagcttcttgtaac

SEQ ID NO: 23899 - DNA, 2300 bp, Homo sapien
acagcatctagaaggtttgatactcatacaaatagtgctgtagctttcttttcataactggaaaagtgggcaagactcagtgtaatgcaggcattccttaagctacttagcattcagtttttagattatcattgcacacatatacccagcatatgtctaatatacatgtaaaaatccatgaagcaagtgttatattagcttgtgttttctattgtattaaatttttctcttatatcgtcttctcctttttgtcattaaaaatctgttcaagtcagtcaattaattattggatcataagtagataaagtcttttatttcataacacattgactcaatgaatatgtttctttgcaagacacagtcctcatttccaagaaaacaagcctgaaaagattatactggagcaagtctacaagtaatgatggtagtttttccttattgtcagtcctggggcaagaataacataaaagataacaaggtagaataaagattacataagaaagaaggacagcaacaggacatgggaactatttatagggtaacatttaaataatggatgatgagaagtaatgcgttagacagggatggatgggaatgattgaaggtctgagtactttagcacagattaagatcaaatcattaggattttaagagttgtgtacagttactgaagaaaatgccttagaatttaatttgactgtggataaaacattcttggattagatttaagactattttccatggtaagtatatttataatgatgatgactgtagtgctgaacatttaaacaatgaaaacaaaattaattgccacacacataatgtcctgaatactactgtaaatgttttatcttattttctttaaactgtctacagcactgtaaggcaggtaccactattgtcacagttacacagatatggaaaccgagacacagggaagttaagttacttgattaatttcaagcaatcgggaagccatggagcatctatgtcagggctgccaggacatgtgactgtaaacagaagtttttaactcaaagagggtatgtgtctgggttaatggaaagcttcaggaccctcagaaaacattactaataagcaaatgaaaggtgtatctgggccgggcgcggtggctcatgcctgtaatcccagcactttgggaggccgaggtgggtggatcaccaggtcaggagatcgagaccaccctggctaacacggtgaaaccccgtctctactaaaaatacaaaaaattagctgggcgtggtggcaggcgcctgtagtcccaggcactcgggaggctgaggcaggagaatggcgtgaacccgggaggcagagcttgcagtgagtggagatcgcaccactgccctctagcctggaagacagagcgagactccgtctcaaaaaaaaaaaaaaaaaatgtgtatctggaagattaagttctaacagactcttcatttccatagatccaataatgcacttagggagatgactgggcatattgaggacaggaagagagaaatgaaaacacagccttttatattgttcttaacagacttgtgccaaacattatacgggtgtatttaggtgattgaagagaagaaaggcacaggagtgaaattctgtgagcacaagggaggagttctacactcagactgagccaacagacttttctgacctgacaaccaaggcggcgcaggatgctcagtgcagagaggaagaagcaggtggtatctgcagctggaagcccagctcccaccccagctgctttgcatgtccctcccagctgccctaccttccagggcccatatcaatgcctgggtcagagccctggggaggaactgctcagttaggacccagacggaaccatggaagccccagcacagcttctcttcctcctgctactctggctcccaggtgaggggaatatgaggtggttttgcacatcagtgaaaactccatcaggagttttctctgatcagcaagaaatataattaaaattcaaagtagatcaacaattttggctctactcaaagacagctggtttgatctagattacatgagtgcatttctgttttatttccaatctcagataccaccggagaaattgtaatgacacagtctccagccaccctgtctttgtctccaggggaaagagccaccctctcctgcagggccagtcagagtgttagcagcagctacttatcctggtaccagcagaaacctgggcaggctcccaggctcctcatctatggtgcatccaccagggccactggcatcccagccaggttcagtggcagtgg

SEQ ID NO: 23900 - DNA, 2300 bp, Homo sapien
catgatgagatgaaatgagatgaaatgatgagatgcaatgatgagatgaaatgatgaaatgatgagatgagatgagatgtaatgatgagaggaaatgatgagatgtaatgaaatgagatgaaatgaatgagatgaaataatgaaaggaaattgaattgagatatgagatgaaatgagataaaatgagatgaaataagaaatgatgaggtgaaatgaaatgctgaggtgagatgagatgaaatgaggagatgaaacgatgagatgaaatgaaaggatgagatgaaatgatgatatgagatgagatgaaatgagatgaaacgagatgaaatgatgaaatgatgagatgagacgagaagaaatgatgagatgaaatgagatgagataaaatgagatgaaatgaagtgaaatgaaatgaaataatgaaattgaaatgagatgagatgaaatgagataaaatgatgagatgaaatgatgagaagaaatgagatgaaatgatgagatgagatgatgagatgaaaaatgatgagatgaaaaatgatgagatgaaatgatgagatgaattgaaatgaaatgaaataatgaaataatgacatgagatgaaatgaaatgatgaaatgatgaaataatgaaatgaaaatgaaatggaaatgatgagatgagaagaaatgatgagatgagataaaatgagatgaaatgatgagatgaaatgaaatgatgagatgagatgaaatgagatgaaatatgatgaggtgaaatgacataatgaaatgatgaaatggaataatgaaatggaaatgagatgagatgcaatgagttgaaatgagatgaaatgatgaaatgatgagatgaaatgatgagatgagatgtgatgaaatgatgacatgaaatgatgacataaaatgagatgaaatgtaatgatgaaatgagatgaaatgatgagatgagataaaatgatatgaaatgatgagatgaatgatgagatgaaatgatgagatgagatgagatgagatgatgagatgaaatgatgagatgaactgatgagatgaaatgaaatgaaataatgaaatgaaattgaaataaataaataaaattgaaatgagatgagatgaaatgatgagatgatgaaataaaatgataaaatgatgagatgtgatgagatgaaatgatgagatgagatgacatgaaataatgaaatgaaataatgaaatgaaattgaaatgagctgagaagatacgagatgaagtgatgagatgaaatgatgaaatgataagatgaaaagagttgatgagatgataagatgaaatgatgagatgaaaagatgagatgaaatgaaatgatgagatgaaatgagatgaaatgaaattagacgaaatgtaatgagatgaaatgaaatgacataatgaaatgaaaaaatgaaataatgaggtgaaattaaatgagatgatgaaattaaatgatgaaatgaaataatgaaatggaaatgatgagatgaagtgacgagatgaatgatgagatgaaatgagatgaaatgatgagatgcaatgatgagatgaaatgatgaaatgatgagatgagatgaggtgtaatgatgagaggaaatgatgagatgtaatgaaaggagatgaaatgaatgagatgaaataatgaaaggaaattgaattgagatatgagatgaaatgagataaaatgagatgaaataagaaatgatgaggtgaaatgaaatgctgaggtgagatgagatgaaatgaggagatgaaacgatgagatgaaatgaaaggatgagatgaaatgatgatatgagatgagatgaaatgagatgaaacgagatgaaatgatgaaatgatcagatgagacgagaagaaatgatgagataaaatgagatgagataaaatgagatgaaatgaagtgaaatgaaatgaaataatgaaattgaaatgagatgagatgaaatgagataaaatgatgagatgaaatgatgagaagaaatgagatgaaatgatgagatgagatgatgagatgaaaaatgatgagatgaaatatgatgagatgaaatgagatgaattgaaatgaaatgaaataatgaaataatgaaatgagatgaaatgaaatgatgaaatgatattgaaatgaaattgaaagatgagatgaaatgatgagatgaaatggtgaaatgttgaaatgaaatgatgaaatgaatagatgtgacatgaaatgagctgaaatgatgagatcaaatgaaatgaaatgagattaaatgatgagatgaaaaatgatgagatgaaaaatgatgagatgaaatg

SEQ ID NO: 23901 - DNA, 2300 bp, Homo sapien
catgcagatgttccgtgttttcaatgtagcggtgtataaaatgtcatcattgtttcctttctggtggaatattaagagccagcttaaagataatctactcccagaaagttccatattagcaattatgtggggctggtgctcatatgcctcaatgaatgatttatttattagtatattgggaatggcctccctcttctcacactagcaccttttccccactttccagcccatttccaaatgagaagggctgaagtcaatcaggaattaagatttagcatttgtgggattatctttgaatgcgacactgggggggacacagtttcactcactctccatggtggcagtccaaattgctctttcgggaccctggctgtgtctaaagcctcagaatgatccagaaggctcctataacagtgccactgtggaagaaaccacttctaatatggcaggaaggtgtggccctgcttggagcccatgttttctaactatttcacatttctttctttcatccctggtgttattttttgaaattaatttttattttcagttctcctaggaattaatgagttaacttaataaaagtaaaagtcttcataaagaaggtaaaggctggctttccacatagagaacaaacataacaacccacatcctctgcagagctcctggtcaatgcattcttctagtggggctgccacacccctggggcctcaggcaagcaagccccttgtggatgacaggggctgggctcaaagcagtctctggggctgtgcctccttcctgttctccactcttttctctaaaggaaatgcactgcaatgaattgcacaatacagacattcctaaattctggaaaaccagcaggctttgaactctcctgggggaaaaaacccataaaacacaaaactgcaaggaatgagactatttggccaaatggccaatatgctacaactttcatagggaactcaccgcacttggtattgcctgatggaaaaaaatgccctgaatttcccaataaaatatttgagatgtggcaaaggaataaatattttttccctaagataaatctagctgtagatgaaaactgggtctcatgcctcggacaaaatattatttccttatttactctaagtctatatcagaatatagcctacacagcatcaggtactaagccaaaaaaggctccaagggcaccattgttcatccatgactttgactgtgtcaccccccagaaaccttgagttgggcagatgtaatcacagcagcctttggtggtttcttgagcagctgctaaggatcacatggattctgctcacacccagtgcttctcataatttaaaaatgcttgaagctgtgggaggctgcccagccctctgcattattcaaaagaaaaccaggaggcagcgacaattcttgattcttgcagataaacattctccaacaattattaagagttggattgctctaccttcatttaattccttggtgctttactatttgaatctagaatattcttgaagtctgaaagatggatagaaaagaggtaagtcatgtaaacttataaacagggcacgaaccccgctaacagacagctttgaagagatgatgattttagatcttgtgaattgttatgtcagaggaatacatgcagaagaaaacaggcaccgaaatagttattaccagagcaaagtaaatctgaacacctaaaagaataagaaaatatcttatgcttctctctactctgaactgccttgaaaagagcaagaatttcatacatgagcctgtagcacattacaaaatctgagtatgtatttgaaattcaaatgcacacaaagttcatgcattttattttccagttgttctcaagactcctaaataaagcatttcccctgtgtgggcgacccctgggtcccatgtggggtcagtgtttgggtctctctgagaggatcaggaaggctgctcttccaggaagggctgcagggaccctgggaaccggaccagtccagctcacaagtatgaagagaatgtcgggagaggaagtggtggctatgagtcagcatgagtcatctcgttccaatgagaatgaaggctgaggtgtgcgcctttttttttttttccttcttagtcgtgtgtacatcattgggaatggagggaaataaatgactggatggtcgctgctttttaagtttcaaattgacattccagacaagcggtgcctgagcccgtgcctgtcttcagatcttcacagcacagttcctgggaaggtggagccaccagcctctccttggtgagtatgtttctgt

SEQ ID NO: 23902 - DNA, 2300 bp, Homo sapien
tcatctctgccagcttcccagtccctgcaaccagcagtggccagcctctggccacccccatgaaagcacataaaagggttggggaagccgcaaccccagaattgaggtgagctagagtttgaggacataggttgcttttcacttatctccagcaagaaccatgttatagatcattggtacagtgacgattttatgcttctaattgaatactgatgaaaaatggcaatggtttctcagttacttcttggaaataaattgtgggtaaataacatctgcttaaagcttggaaacccagtttcctttggtttgtgtttttaaatgctttgacgatgcggtttgcttttttactccaagaaaaaaaaaacaattaaatagaggctgacaactaggtgagatccacagccaagctattctaagagcccgaagtcaccctggacacccagcttgatgacaaagggcagaaattcaatatggaaataggatccactccaaatgcaccatctccgacattatgatgaagagaatatgtatttcatgacagggcaaatgttgccatccttctgagggaagatgtaaatgaggatgcttttagggatgatttctacattgtcactaaactgagacatttgtgcttgctcgtgccaagtgaagattgctgttgctgttgttctctcgcagtgattagggttcattccctagcaacaggcagcagcagaaaggaagctttgcaggcagagtcaccgaataaacgcagtgggaacagtatcaacaacaaacccagtgatgaagggaggggcatgtggggcacaccacattgcctctctggcttctcgtctgcacctggggccagaggcaggtgggaaggagaccttgacaatgtgggaagtccctttgatttgctgaaatggaggagttcacattttactgtgcagtctaacattgcccattctggattagctccatcagacacgcttttgtgctttactgtaactctttctttatttgtcctcctcgaaactgatccataatgccaatttgctgatcagctgtccctgggacttcggtgtactgggctagaacctcagtctagtgttcaaaggagctggcagaatgggttgtctcggcatggaggacccaaaagcagagctccctggtgctttgggggagagtgaagcccttcattccactcctcattgcagaccagctttcctggtattcatgcactgctttttgtaacgcctcaaatgaaggccacagctcagccaagtagaagagagctcctaataaatgaagtctggttgcctttgaatttataaaataatcaaagttgctatttcctgctaaggagacagatacagaacaggtgataggccacagtcattactgtcccctgcttgttccctgagcccctggccttctaccttttctaactgctgtcagaaccctggttggggacttccttttgcctggttctcctgggcttgaatggcaacctatattgacagatttcatgccacagttctttttcaaacaagatgattcacaatggaataattgggtttgggaagaaggcctttttaaagcaaactatggaaaataattgatgagtagcgcagttttataaaacttttttttctattaccctttaaaaactatgttgctaactgcacatcacactgcattcatatcctgggactaataccccttgacctctgccatatgaattaaggtgaaagaagggtcataagtaacaaagtttcaaagttgaatgaaccttttttttcctgtaattttactgaccatttccctttctgtttgagagatctgtgcggtcctgttgctgaggttctgtggttcaggggtgttatcggcgacagagtgctgatttcacttgggtctgttctggtttgtcttaatttctcttttagagcttaattttcatttccaacgaattaggcaagacagaaagtgacatttggaaaagagtgaatggatgactaaacattcaccagacgtcattcttgtaacagttaaatggtagtgattcatgtctccatctcttgataaaatataaagcattaaatcttgatggctaaacacactgacaaaactaccgaaccatgttcctggttgaggatacctgaaggtcgacatttatctgggatcttttgctgctgctttggtatgacttctatcaagatagctttcgacgaggtagaacgtttgctttcactctgggttttccttggtttcgacaatttttaagtgttaactgaaggaaatcccgtcttgtcagaatg

SEQ ID NO: 23903 - DNA, 2300 bp, Homo sapien
atcctgttgctacctgtggacgtaactcgttctcattgctgggtggtatctatcttatggtccctttctcatcatcatgagcatttaagtgaagatcgtcttcaggatttccatgtgctcatgtgggagagtaagtcctgaaagtggaacatcacctgtaaatatattaaagacagggttttccaatttaactgggaaagtctccagactcagctggagctacattatctgtttctctaagaaagaacttttctgtccataaactcattgtattagtccattcttgcaccgctataaagaaatacctgagactgggtcatttacaaagaaaagaggtttacttggctcacggttctgcaggctgtacagcgagcgtagtggattctgcttctggggaggcctcagaaagcttccaatcatggcagaaagcaagggggaacaggtgtcttacatagcaggagcaggagcaagagagagtgagaggggagatgcttcacacttttaaagaccagatcttgagagaactcagtaccacgataacaacaccaagagggtagtgctaaactattcatgagaaatccacccccatgatccaaccacctcccaccaggccccacctccaacactagggactacggtttgacaagagatttggtggggacgcaaatccaaaccctatcactcatttttttctcccttcaatcattcaaccaacaattgctgagcaactcctgtaggtcaggcactgtgctgggggctgggaaccagtgggaataaatcctatgggtctctgcccttgtggagattccagagtagggctgcccggatgttcttgcattgtgcacagtgcagagacaggaggctcccggatattctggcctaggcaactctaaccctgaaaaatgaacaagcccatcacattctattcatgtggttatagtttacctgaaacctcaactgctccacagaatcagatctctccgcagctcccaaaagtgtcccaagggttagcactgaccagcttgctgggtttgaaggaaccacaatgcatcgggtgtggctctcttcctgctagctgctccgaagtgagctcctactgattctattcagttggacgctcacattcagcgagtccagggggtttttcatgctttgagcatttttaagagtctgctatttgcccagttcagtgaggggcactcaggatgtatcagtggttcaggctgacttggttcctgcctaggggaagacccacaagaccagtacccaatgcagggatggcatggatggtaggggaggcttggaggccctaacccactcttgaagggatgacagaagcctcccaggctgggattggaaggatgaaaggagcagacaggccagggtagagggcattgagtcccagtttgagcgaagggctggagcaagagagagcctggtctctgcaaagatctgaaagaacctcagagcaggggccaaagggtaagggtgtcagggcagaggctgtgccaaaagaggtgagcctcatcctaaactctgttcttgatttggggtggaagtgtccctggaaaggcagatcaacaaaggaaggagcatgagccaattctcaccacacctcttgtgcttcaagtcctctcttgggttgggtgatgtcatacagggacccacacttgattggactgccctccccaccttttaaacctctcctgtcactgagggggtacaccactggagcctggcaaaggtagccagtactcagggggtgtgcacaaacctcacacccatgtttataaggccattacaaatgctggcccagttggtgaccagacaccaatccttgtccttccacgtagccaacagtgggctagttggcaggtgcatggcaggcgctcagggctatagacaatgcaggctttaatcccatgagtggagtcggtgccaagtctagaattcaaggatgactcttcacccaactgaccctcttacccaacaaaccaatgagaacagcttgaggtctggaggacccgtgcttgatatctgtccactcttgtatttgagtaaggtagtggaggtcacaggctcacatcataaactttgtactttatttgaaacacttttctggctctgttagtggctccaacaccatacttaagcttacttcaaaatgacttatacatctctattttccttaaagtatgcgcacagataagaaaagatggggtgaattttttttttttttgagaaggggtcttgctctgtcacccaggctagagtgcagtggtgcgatctcagttcactgc

SEQ ID NO: 23904 - DNA, 2300 bp, Homo sapien
tgtgttagcaaaatgtctttggcttttgaggacataattgttgtatttcataccgtcctcctcttgaaatacatataacagtttactctttagaaaaggtgaatgtaaaactattttgcctgatagttaccttaagaatttacaaacaaagaaaacactggacttgtttttctgtgtcttgatcaggaatagattttgaggttagtggggtttttagtgtagtttaaacttatatcagtattttttttttggatatgatagataatactccaaataaaaatagataagcctttcttctgccactcccctgcacaggatacatcccttgatacattataagactcacgtgcctatgacattccagagctattctcttgggacacttctgttttaaaattctctcctgttcttttatctgcttgtctctatcatctatcattcatctgtcactgttttctagttctctttactttttttatggtactgttttgaggggaaccatcacccacacttagccacaggctgctgaagatctgaattagttgtgatttccctattaactgtttcctctccacatgtacccagttattagtcacctgtgaataaaaagatggagtgacagaagttgagtttagagcataggatttatgagcatggcctctagagccaggcatggccatgctgtgctgggtgactttggttaaattactttacctcttgttgcctcagtttcttcatttgtaaaagtaggcatacttcatgggatggtgctgtgtatcaagtgaattatttttacatagcacttagaatactgctcaatacatagtaaagctcagtgcagtcagccattattattagtagagttcattgattctaagatgcaagttttttcactttttaatatctctgaaatcagttgtgtattttagtgaacaggcgtcatagtttaattggcagtgctttttctttcttagtttctcatgaaataatgatacatcttatcagtggcatcttatattcaggggatataatattgttctcattataattttgttacttgcgcaaagttgaagtgaattatgtgtaagatttcctctaaaaaaattctatgggttgcaacagactcttggctttgaattttcctgatcccaaattaatgttgcggttgtgttcccagagaatctttaagacagcaaaatttttctttccagttagctagaaaagcagttatgtgtgtccagttaaggagggagtatgcttatgaatagctttgtctgcagagaaaatgtttgtcagttgtcagcctctgaagggatatttctgtgtcttcagatatagcttgtataggtgtttcttagttataaatgccctacttccaaaatttctgttagttttttttaagtggctatatggaatgttaagctattttaacataggaagaagttgaagagtggtgtatgaatttcacagtagagccaacagaaaccattttaaccttgaacatacctgatacataatggtattagtcctataaatctagccatcatgtaagtgaaaccaatctgtatttcccttggagacaccatgaaatccattcacctctaacacaaggaccttgtttcttttcttgtgtacaggccacagaaatggtacttctgaggctgtattggcaaaagggatgggaggaggatcccacatgtactgaggacagctagactgaaattaacacagtgataaaaaccccaaaagtactgtattttcctttgagaaggttagcatccatcggagtggaattttaaatttcttttttttttttgaatgcctagagagagtcggcttggtttataggccaggtggttttcattcaatgtaaatatgaaacaaaacagaggaaatatgtctctccctaagagtgtaataggaacaagaatattaaaatgaaaataatcatgtttgggtagttcactcacatctgtgtatgaatttactttgagacaacttcatcttatacagtacaccttcttttgaaatacttacagatgatatttcaattgctctttgctttaaacattttcacatgttggtttttactttaattacagattgctccaattgtgtcagcgaactatggctcttcctgtaggacgaggaatgtttaccttgttttcgtaccatcctgttccaacagagccattgcctattcctaaattgaatctgactggtatgttaaattctgggctcaatgagaaaggaaaatgattaagtacatgcattaagtgtagttctttaaattagttaaa

SEQ ID NO: 23905 - DNA, 2300 bp, Homo sapien
tctactgtgtacggtcagtgtgccaagcccccaagttgttcaagggtcaactgtaatcctaaaagaatctaatacaatattgtacacagtaagtggtcagtaaataaggaattgaactaaataagaatacataaatctcagaatatgtgcaacctgatcgtagtacacagagatctctctatatctcttttctcagttcatgccattatttcaggtagaaagcaccttattttgaattagttgtctttagagcaaaaatccgtctaagagtgcagtgtggtttcctatgcacaatctggaatagtccattgcttcatgcctaccctggacatgaagggccgtgccacagtggaagtctctatgcatccacccctgtctatacctgagcaactcattcctctttgctgctctcttacaggctacagagtgcggtggcgccagcacagaactctgctcaatgtccctctgtgctttcacgatgctgatggattatgaaggtagggaagaatgtacagccaggaggccattaggagggcaactaatttataaaatcgcatttgtagaatttaatgcatccaacacctaccaggggaaaggtgggcaaaagctataccaacaccacccaagtcaaaaccaaaacaacaggaaaagaaaattatgtggatgtagaatttctgataacatcattcccaagatgccttatccaagaggaactgctacaataatattttaagtggaaataaatacatgctggaagcattatatattagtagactttgtttttttttttccccaaagtactttctcaagcacatcaacataagccccctaagagacatttcacattaaaaataaaacgtctgcccactgctggtttctcaatttgcctccaccttctgtcccctttaatgaactgggccacgaggtgagtcagagaggataaagggagtggtaagaatttgaggagagaagagagtgaggctagaataggaaatcaggaaatgcgattcggtccccctgttcctcacatggggccaccctcttgttgcccagtgtggtttcttcttgagggttctgcatgattcctcaatcccagggaattccacaggatgttccacccaagaccattgggctcccacctctactcttttgccagttaatgaataggcaggaatttcactgcctggaaagaggaacaatgctttctggtccttatttcacatctaaaatagagaggtcaattgatttattgctaaatatctttgaacactaaaatagaagttttacaacatatatactacctggttgctctagacttaagccagggaaaagtacagattcaacatttaaaattgagatagacgctttccacttagtgctaccagtcttgctttatttcatgagaatgagaatataataatatgccatacgttcatttgggggaaagattgatgtcttataatttataattacagaaaacatgtgagttcactgggaataaagaaattttgaagataataagatactttcacttatgtcgtaatttctatgtcatttggtgtaggatgtggagatattaacatttacacctaacttaagtttgtcatccaggacctgaaagggttttgtctatcagctgcacccctgggtagcgacacaaccttggggaaggcctcagccccatccctcgtacagcaggaatgagaacagcactgcctgttgggaagcttgagggaggctatggacgtgcagcgcttggcagagggtctcgtcatggaaggttccagcaaatgtgagatacttttctgatttcattttctccaaaagaaagggaataaaagaagaggggaggaaataagactaattgtgagagataaagtacaaaggtgagggaaggagtaaggagacatgaaggcagcgtggagcagctgaggggggagattgctttcaccacttcccagcatctattgcagattccaccctcaatcattttgtaaggaccctttattcaaggtcatgtttgaaccctgctgagccagtggcgtgggtgtctgagagaatcattaacttaatttgactatctggtctgtggatgcgtttactctcatgtaagtcaacaacatcctgggattgggacacactttctgggcactgctggccagtcccaaaatggaacataaggaagtggttcttctacttcttttatttctgaaatcaggtaagacatagtttttttaaattataataattattttttctcccacaatgcagtacaaatacatatgccatggctttatgtg

SEQ ID NO: 23906 - DNA, 2300 bp, Homo sapien
ttttaaaaaaaagctttatggagatataattaatgtatagaattcacccatttaggcatacaatccaatggatttcaatatattgagagttgtgcagccaccatcagaataaattttaaaactattcatacccccaaaaacgcactccactctccttagctgttacccccgatctgcagcttctggcaaccactaatctactttctgtatttatatctttgccattttgaacatttcatacgaacggaatcatacgatttgctagtagttcttcctgtaaataatgtatacttgaaattcaatctataaattaccagataaaattttacaagttgcactttagagtcaaatacatttgaatttagtggaagccattcaaggagctatcaaacaaaatacagagcaggagaaaattaaagaaatttttgtaagaaattggtgtatgttgggggtgtgaatattatatttcaatgcatggaaactatgacatagatcactgtgaacttattcagtgggctacacccaaaggctagaacaaacttctccgccacaggattaccaatgttttaaccaacctggggggaacattctctcataagctcttttggaaagccaggctttctgtggatgtatcatctttccagtgtgctgcaatgcccggggagaggaaaaagtttcttttacagccatgcttagtgggaagtggagaaacatcttccatttcacaaattaagtcttttacacatgcaaatatgcatacacattcacacaccacagtgaggaagaaattctcacaccattaataaaatacatttgcatcagtagcaatatacatctgcattttgcctataatataaatgtatttttccactaaaagatttgatgtttccttgccagcaaataagccctatcaaatcctattgccatatgagtcctagaggtgaataagagaaaaaaaaaatgggggaaaattatttcaaattaaaaagaaaaaagtttgattctgttttgggatatttcctagggacaggagctggggaggggatctcagcagcgatgcgctatgaagtataataacatgacacagagaacttaattgaagggggaaataaatggaagttttctttttttgaatatcaattgtagcctgctctgctatacttcaaaaaaactcttcagaaagtttaactgaactcaccgtaggacacactttgtggatttattgtgtgttttgaagtcacactgcgagctatagaattaaccaaaacacaactcttcttggaaatgagagttcaagttggcagaaagtgcggggtaaagacatggatatgggcctaaagcatctatttctttgtgatcttttgatacatctctcaagtgcttttcagtggattaggtttagaatgcatcagccaactcctgctcaataatccatttttccagcccggaatgtcttaaattgaggaaggacgaagtcccagaggtggggagcagggggactttggccgaggactttgcatgaattgatgagcgtgcatcctcctccctgtgctctgtgtaccctcaggaggtcaggacgggcctttctgagaatgagaatctgttcatttgccttcctactggatatttgtcatcagcatacaaaccagtgcgctctgcagtgtgtcatctttcagaacctcccctgacctcatcttccctggagggctcgctgtcttcagagccaggcttgtctcccgctgccgcctccactgctctcctcgtcactctataacccactccctctgcctgcagcccccaccacgcccctcaaagtggtcaaggttgtcctgttgtctaattccatggagcttggctatcttcattttattagcctcttttggcctcttacccctgtgaaaatcactagcattctgtgcgaaggatggagctggcatctccaggcttggaatagacctaccaaagctcagccagatgtccggaagagcctcaggacaagggaacaccctgtagccttgtggtgggagcacagctgaggcccccttggccaccctctgccacgaccaggcagaaagcagctttcggacagattcgttgtctcagatttgatctcaaagaaaaaccaagaccagtatttgtcccaggttctgcttttttacaatttcctccgaaatccagatacctgtcaacaccttggaaaaactgatttctccccagttagtagtgttgtgtgactgtcatcagcccagtacaaaaatggccttctttgttggggagcttcttaccctccagtgttttgc

SEQ ID NO: 23907 - DNA, 2300 bp, Homo sapien
agagtgcaatggtgcgatctcagctcaccacaacctccgcctccgggttcaagcgattctcctacctcagcctcccaagtagctggaattacatgcatgtgccaccatgcctggctaattttacatttttagtagagacagggtttctccatgttggtcaggctggtcttgaactctcgacctcaggtgagccgcccgcctcagcctcccaaagtgctgggattacaggcatgagccaccatgcccagcagacctgaattattattattaaaatgttacatcaacatgtacaaatataaaactacatctaaactctaagtacagacttcttatgcttaaaactcttacacagtgttaaccccaagacagatttgcaattaagtagttaaaataagacaacaaagtcaataaaaatcaaataaacaatatacatttaatgtggtagactttgctgttttgctgaagctaagcaaggaaccagtttttaaatcagcaatccgttattttaatggactgagcaatttaatagtgcacctcaaaggtcaatgataaaaactaaaaaaaaaaaatacctactgaaaaaactgtcatcgtttcacatttctggctacgttagtgcaaaagggaataaataaaggtgagatttgtgtgacagtgtggatatggtactgtgtgacaactcagttctcccatcacttccacctgtttgaatcatcgggatcctttatttgtacaccatgttatcggtatttgcccttaagcaccaccaatgcaccacttttatattaagtctgcccgttttccttagtactccataaaatttaagtcacatattactctgcctcaccatgttacttcaataattctgaatcaaagtttaagtttgtgaataattttgcaaaaaaagagccaatcatgcttctcaacaacataaaaagagaagcgccgtcacttcaggtgaatattgttctccgtgaggccatgagcataaacaaaaactccagactaaaaccctgagacggtgccaggtcattcagcagtcagcggaatgatcagtataatttcaaacaaagttttaaagatcattattgaaatgatgtattttgagcttcctggatctgttcctttatgtctaccttagttcatttgggctgctgtgacaaaaatatcataaactggagagtttataaacaacagaaatttatttctcaccgttctaggggctgtgatgtccaagaccaaggcactagcagtgtctggtgaggccctgcttcctcatagatgacacattctggctttgtcctcacatggtgtcaggggctagctaattccctggggcttctttcataagtgcactaatctctgtcctgagggtagagccctcgtaacctgattgactcccaaaagccccacctcagtactatcacattgaggattaagtttcaatataacttttgaggagacacaaacattcagaccatagctttatctatcatgaatttgggggaattttcagtcactgttgcttcaaatgtttcttctgtttctttctcttttttttttttttttttgagacagagtcttgctctgttgcccaggctggagtgcagtggcacgatctcagctcactgcaagctcctcctcccaggttcatgccattctcctgcctcagtctcccgagtagctgggactacaggcgcctgccaccacgccccgctaattttttgtatttttagtagagacagggtttcaccgtgttagccaggatggtctcgatctcctgaccttgcgatctgcccgcctcggcctcccaaattgctggcattataggcgtaagccaccatgcctggctttctctttttcttctctttctggtatttccaaaaagtctccatgttccaccttttgtaattgtctcacagttcttgactcttgttctgttttttctttttcattcttttctctcattgtgtgtcagcttttgaagtatctattgacatctctttgagctcactgattctttcattggccatatccattcttttgatgaacccatcaaaggcattcttcatttctgttatggtgttttttatttctagtatttcatctttatttcttcttagtgtttttatctctttgcttacattacccatctgttcttgcatgttatgccatttttacattagagcccctagcatgttaatcttagttattttaaattcctggttggatacttccgatatttctttcatatctgagtctggttctgatgcttgctctgtctcttcaaactgtggggt

SEQ ID NO: 23908 - DNA, 2300 bp, Homo sapien
aaaaatcttacccctttatagccaaatagaagccccatagtttatgcacataagtttatgtactttacctgcaaagggttctcacacactcatgcagcattgggtttacacttattttggattcagctatgacatacttggttatatggtattttaatattatttgcttccaacctgtgctgtgtgagtttgcatattgcaaactgacgggatagaggatatgctgatgagggtgggcccagtggcatgacagtggaaagggaaaaaagaatcctggaagagaggatatgtgagtacacaaacattgcagtttgggattatttactactaaaagcagatttgggtctcttcacagtggtagccctggccactctgaggggatcattgtatgacagtgtagtgctataattgatgtggagccactgagaatggtataaggccaggtgtggtgggctcgtgcttgtaatcccctccctttggaaggctgaggtgaggggattgcttgaggccaggagtttgagaccagcttggacaacatagtgagactcggtctctacagaaagaaaaataaaatcagccaggcatgctggcatgcatctgtagtccttgctacttgggaagcttgagctggtggaccacttgagcccaggagctggaggtgacagtgagttataattgcaccactgcactccagcctggggacagaggaagaccctgtttccgcttaccaaaaaaagagtgttgtaaattatgtggtatcaactcttaacccttttaaggcagagagcatgtgaaacattttagaaactgaatgacatcagaaataaagttataaagctttggttaataggcatgttaagtcatttagaacatcatgtaatgctagctaagcattgctattcgtggatgcatatattgaatattatatatttactgaagtatgtaggcagtattttatataaatgtataaacatagaagttgtatgtttttcatagtgatttttttttttttgagacagtttcgctgtagtcatccaggctggagtgcaatggcgtgatcttggctcactgcaacctctgcctcccgggttcaggtgattctcctgcctcagcctcctgagtagctgggattacaggtgcctgccacaatgcccaactaatttttgtatttttagtagaaatggggtttcaccatgttggtcaggctggtttcgaactcctgacctcaggtgatccacccaccttgacctcgcaaagtgcttagattacaggcgtgagtcaccatgcctggcccatagtgacttttaatttgtcacccgagctagaacatctttaagagtgaaggggagcagttagtaattgctgggcaatggatgtaaatcaggactgtctctggcaaactgggctatttggttactttatttctgatgcaaaattaatgatcaaaaagctgtccttggctgggcacagtggctcacacctgtaatcccagtgctttgggaggccaaggcgggtggatcatgaggtcaggagtttgagaccagcctggccaacatggtgaaacatggtctctactaaaaatacaaaaattagcctggggcagtggcagacgcctgtaatcccggctacttggtggctgaggcaggagaatcgcttgaactcaggaggcagaagttgcagtgtgccaagaccgcaccacagcactccagcctgggcaacagagcgagacactctctcaaaaaaaaaaaaaaaaagctgtcttcagacccctttcaagccctgttgaattcagtagttggttttagtttcagatgatgggttaggtaatgcttgcatctcattggctctttaatgacagttttcttttcataataattggcctttacatagtagaagttaaaaaaacttggttattgaaaggggaaaagaaatgcatgcagagtaagaatactaaaattaatctttgcttttaatagtacaaacatgtttgcaaacaattaagtttatcctgccaaaagaaatagcagttcagatgcttgtcaagtggtacaatgtccacagtgctccagtaggacccagttatcactcagagtggaatttatttgtgacttgtctcatgaacgtgatgggttttaacacagaccgcttagcatggactagaaatgtaagtaaatacaattgttttctttatgagttattctgttaatgtaatggttgcataattggtaatataacattgagactacataataggcgtaccatattcaaaataatagaatgatattaaggtttattgtatc

SEQ ID NO: 23909 - DNA, 2300 bp, Homo sapien
acttccttttatatggtatagctcctcacttgtatcatctttgctgtataatagtatcctggagaaagaatagtcttttgtatactacattacaatggcttttcccattctgctcttctcacgctctgagacctggatgagctactggatctctttaatctgtggtgtctgggataccaaaagtagtagatacatttacttaaatgaaacataaggcctgctgtggttttttagagaactcatctagttttccctcttgataatcatgtcagaaactgcattttatttcatgtgtgatggttgagattaaagtaccataattacagtcatgtcttagccttggattgagagaacttggattcaagccttgactccaccattaattgctgagcaaatcactttgacctctctaagtatgtttattcaacctgaaaaatggaagtgacaatctctgtcttgccctaattcttaatctactgtattctagtctagtatattttgggctcagtcttcagagcccagaggtctaagaaatagtcaaagggcgggctctgtgataacttgagtttcattgaaattttaaaaataactttcatgggattataaagtaatattcaatgtagaaaaatacagaaaatatacatcattcataactgtgttctgaaaatgttagtgtccttttccctacatttacattttagttactcttacatggttggctttaaatatattcagagattattttctgttatggcttgaacccataacagtttattccttgtctcatttaagagtgtggagttaggcagtacaaagctgttaggacagttccatgatcatcagagaggacccagacattttctttttattctaaggccctgacttacttcctcatgttctctgatgactgtttgatttctaaccatggcatcctcatttcagcagcagaagggaggatccctcctagaatcctacacaacacttcagctttcttcttattgaccagaattattcacatggctacatcttgctttaagaatggccagaaaatgtagtctaaaagactaaaagctagacacatttcctaaggtttgttactaaggaagaagaaaaaaatgtattggaaggcaactggtagtctctgtcacaaacagaaacataaaactttgtgttagaagtaattctaatcataggattatctactgaagctgatactttgatttgaaagcaagcgaaattctattcgtaaacttttagttcagaccaaatatattaaaactcacaagtgctttttcaatttatagttcttttcaatttatagttctttggggtatatacctagggtagaataaatctggagtaatttcttcttaaataaacaaaacttatttattattccagggtaaaaaaaaattgctcaaaaagttagggctttacaagcacagagagacaaataccatatgatctcacttatacatgaaatctaaaaacttaaggaagtagagagtagaatggtggttaccagaggctgggtggtagggttggggagtggggacagagaaaggaaagacatttgccaaggggtacaaagttacaggtagataggaggaataagttctggtgttctattgcacaagaaggtgactatagttcatgtatattcaaaatgtatttattatttcaatatttttaaaagtagctgtaaaagattattttaagtgttcacgttgcaaagaaatgatcaacatttgaagtaatgactatgctaattcaccaaatttgattattccacactatatacatgtactgaactatcacattgtatttcataaatatatacaattattacttgtcagttaaaaataaaactatataaaatatattgttataaaaataaagtatgtttaaacatttttaaaagttagggtttattttcagatttataagaagcaaattaataaaatgaaggtgaattttgtgaattttcagatgattggtctatgttgatgtgattataaactttgaattatttaatctttgtaacaagattgtgtttggtttcagatgagtgagagtggagaattggacaaaaattgatttttgatctctgaattgtggtttttagctcaccagttattgtgtagtctcactatttgaaaattcatgctgaaaaactgagtgaatatgatcagatttctccaccaaattctcagcctgataagggtaagtaaggttccattcacctctttattcatctctgtgccatctgtggtcctttggaactggcttctttcacatag

SEQ ID NO: 23910 - DNA, 2300 bp, Homo sapien
ttctgagggaaagagaaattcgtgaggaagtggagaagagggcattccagaaagagggagaagcgtatacagtactgtgagttgagttttgcaatagtgtggtatttacaggaatcagtataggtttaatgttgctgaatcacaagtaatagcagggtggggaggtaagggcagtggaaagataatgagatcagggaggtgcacagaaacctcatagtactcagtttgaccttttccaacagacactggggagccagtaatgacttttagagagaaccctttggcagcaatatggagagtagactggagcagttgaagtcagagggagatcttagcacgtttctagcaagagttgatgagaatctgaaataaggcaacggcaatgtgacaggaaagtagagaatacccaaaataaactcttccacagtataccaggagacgtgcccatcaacaggaaaatcagtggagtcgtgtccagcagtgaaatgaacaaattacagctgtcttcaacagcttagacgaaattcaaaatattaagtgaaacaaacgagtcccagcgtactgcataaaggtgtaaatcttataacgtttaaaaacaatctaaatgtgttttagccatgcctatgtgtgataataaatagagaaaggaaatgatgaatacaaaccaggttagtgatttctttgggaaacaggggatgagatgatgagatatacacatacatacatatttgtgtgtataatgtatattatagatgtacatgctgaaagagcaacagggagagagagaaaaaggtcatttatggaccaatgatgacgacgtatgatgacaaaggattgtgcttaatctactctgtgtatttagggcataataaaggaaagattataactgaggctttattgtaaagatcataaaatgttttgttttacttatattccttttctttgtctttttcttcctccatgcatgcttgcttgcacgtagtcatttcagtagagggtagtcactagtgattgattaacttcatatcctaaccccagagtgcaggcaagattgatgaacttgtttttcttttaaagaacaatggacctggcacggtggctcacgcctgtaatcccagcactttgggaggccgaggttagtggatcacttgagcccagaagttcaagaccagcctgggcaacatagtgagacatccccaccccctgcccaatctctataaaaaatgaacaaaaatcacccgggcatgtgtgcatgcctgcggtcccagctacttgggaggctgaggtgagaggatcgcttgagcctgggaggtcgaggctgcagtgagtggtgatcccaccactgcactccagcctgggcgacaacgcgagaccctatcacaaacaaaacaaccatgacccttaggtcacgcagacctccttgatggtccagatggggcatcatctaatggggcagatgagacctagagtcccagggaggaaacagctttgatcatgggggatcccaccctctgtattcttaccttactcataaaggccccccagttacgttctaaggcatgtcagtatttgagagacttcttctcccgctctctcgctttggccaaacggaataaaccttcccccgctcctaagcactgaatatgtcggtgtttggcttactgcgcatttgttacacgaacctatattgtaggttctgttgataaggcaacagatcatgtatttttgagatactttgagggtggaactgtaaatttccagtttttttttttttaatcagttggctttatattcattctcccaaggcgagcgagcgacccccacgaacttttccttgccccaaaaaggagggcagacggacaggatcaaaaccagtcgcgccagcaagacattagagccgcgccgggaactgccaggccaagcgggcgaagcaagcagcaaggcggggctcaagaggcttcctgggcgctgggctggccgcgcaagcgcagtagcgcgtctcgccgccatggcgtctgtgctgtccagtcataagccggtagtggcggcgacttcccctcaggaagccgggtctccgcctcctcctcccatccagcctgctcggcggcggaggcggcggtggcggcagcggttgttcctgcctctccgccacctccaccgcggcttatcccctggctggcggcgttggcggggcgggggacagtagttgtagacgcccgcccctgcctcagagaaggtgagttcccgccccggcggcgggggcggcccggtcttcagcccctcaactcctgcgctccagg

SEQ ID NO: 23911 - DNA, 2300 bp, Homo sapien
taattttttgtatttttagtagagacggagtttcaccgtgttagccaggatggtctcgatctcctgaccttgtgatccacctgcctcgcctcccaaagtgctgggattacaggcgtgagccactgtgcccggcctctttctctttttttaactctctgttttgtagaattgtttttccccttgggagcatgcagtgtttactttttgaggcacctaactttacatgtcttaagttattttgctcttcagtgtacatcagaagctgcagagatattctcttgctgtcatggctatgtattcttacctaaaaatcaggatatatgatcagacaatgaactttcaacatgcttccaagagtcgaaggtgttttgggagattcaattggttgaagacatgttaaaatttctggtacatcgtgatagtttagggaggataatgtgacagagtaaataaaatagaatagctatcacttaatgagtactttatgaagtgctaagtgctgtgttatccccttttacatattatctaactctcacaatccagtgaggtagaaattatcacccttgtttcacaggttccatctcaagtggtagtagcaggcttagaattcaaactcagattcatctgactcagaaaccatacactcagaaaaatccaggaaatgcccctgcccactgccccccacccccgccgtcacccccacccccaacccccaccaggaaatagatgcatcccaggaactaaaaatcttacatggaagtcaagccagagctccagatctgcaagtgtatttcttttaaacctcagtaaaagctgcctgatagccaagaacagtggcatttagttcaacggggattttagattcgtctttccagtgtcctcactcctgagtaagaagaaggacagagcacgttggtattttcctggcagcagacacatgttaaaggaaatttgatagaaagatagagatgggggttgctatttttatagcctgccttgtctgtatccagcctgcctccagcataccagcatcaccagcagtgctaagaacagggaattccatgctgtggagtagggggtgctgtaagagccccaggtgatactggagaggaaaaatgcccccttggagcctaaatagtactgttacgtatatgccaagggctcagtttagcttcttcttattatttatttatttatttatttatttatttattaattttttgttgagacggggtcccactctgtcgcccaggctggagtgcaatggcgcgatctcggctcactgcaacctctgcctcccaggttcaagcaattctcctgcctcagcctcctcagtagctgggattacaggcgcccgccaccacgcccagctaatttttgtatttttggtagagacggggtttcaccatgttggtcaggctggtcttgaactcctgacctcagatgatccatgtgcctcggcctcccaaggtggggattacaggcgtgagccaccgtgcccagccctcagtttagcttctgctgctaaacagtccacccttgggagagagactgaaaagggtggggcgagggcccatctcacttgagaaagtgcaagcctgacagctgaagggtcccagagcagcaaatatcaccttgtttctatgggaccattccagctgtctgcttttgattgacagaggcatctggctgctaaaaataccctcctgaccaaatgttccctactccaactaaagccgaacaggattgttgcagttcagaacttagcacatacagatagcttctgcttgcaatggaacctctcaaaacttttcaggccctatgccatattaacccatggtcattttctgttctgtcggctttgctgggtgatgaatgaaactcttcccagttcacttgttctcttgtctgtcccatccccacctccaggaaaagtagcagagggggaggtgagggcccagtagctgagagcgagtagggaaggggaggtggcttgtccatttatagtcttgctctttgggatgctgaaggtgctgaaatagcaatgacaagagacttggctcagtgttaaataactgccgcgctggcctgacagtctctgagatgacaatagggagaatggagaacgtggaggtcttcaccgctgagggcaaaggaaggggtctgaaggccaccaaggagttctgggctgcagatatcatctttgctgagcgggcttattccgcagtggtttttgacaggtatgaaatgtggggagttgccttctctcctgttagtttggctggggccaaactctaaaa

SEQ ID NO: 23912 - DNA, 2300 bp, Homo sapien
ctgaggtctggggtctcacacactctgtctcccaggcagctaatccagtcatttacacacacacacacacacacacacacacacacacacacacactaggaattctcatgccagttcttaagacaatggattttttacttccttacatatacaaaaatgaaaaatcagcatcccatctggagaccagggtctaatatggacccctttagtacaatagacatgttaaaagatgtataatcaaagctcagagcaagatgagagaaggactgtgggtgtgcccatacttctttgagccacctcgccccttcctgcccgctgttcaggtagtcgtggtgattataaaaagccataagttctcagcatgcaggcccacttcgcttgctgcagggacagccccaattcatggcctgggaggcaccttgtgtcctagacactgtcagaggagggccaagcagggagggccagagcacccctctgtgctggagggaaaggtctgctggtgccagaatctgcatggcaggacactccattagtgagtgttctctgcccacactgctccaaaggtgaggacctccctgtggcagggtacaccttaacaccacctgtcagggatgctgtagaaggaccctggcactgggactgtgggtggaggagagaacttctgaagtgctttgctggatcaacatgtccaaatgctggagaccacggagggcagagagagtggcatggacgcccccgatgtgtccacttggccctgtggctggaactgtggcttgaggagaaggaaggaaaaaggatggaaaggtagactggagttgccttttgagggctggcagccctgctagaagtttaggcaatgggagtcattttccaagccaaaaattagaactcatgatagggacatggaagtgttattgggggtggccatcatgacccgtcacgtgacactaggccatccaggacctgtggcctctgaagtgatgggaaccactgaggctcatgcctggagcagtggcccgactcagcctatgcttcaggatgatctgtctaaccacagagtagaggaggcccagaggatgaaggctggaggctgcaggtgaaaaggttgacgccaaagtccagacaaagaagggagagaatctaggggtgagggggtgcttgtaaggagctgcctcagaggcaggaactgggacgtgcacccattgggcaccacgcctctctgtgcttcacaacaaactggcacatcccaaggccactggaagccctgctgggccatctccccaaggccagtgctgtacacataaccctacaagaccagtttcctacacataaccctacaagaccagtttcctacacataaccccagatcccttgtcctgtcttctcagtggggctggagcaagtcagcaggtgccactttctcctgccttgtctctgcctaataaaatgcgtctcaatgttttacacctgccatttagcatggactgctttaacacctcaaaaaggcctgtggaggagcctataatcatcaaggaggaattcccagaatacaaaataacactagcggctgataacaactctaaaaaataagtttgtgtaataatgggggtgagaagagatcataaggttatgtaaataaggtgaggttttgagttcaaaggaattctctggtatttttctgtgtgtgtacacatgcacccacacacttgtgtgtatatgtgtacagacatatataaacacatgcatataatgtgtatatatgcattacatatatgcacattcatacatctttatgtacaaaatacatatatgtatatataaacaccgatgtacaaacacatacgcacacatctatatacatacacatgtgtgtgcacatatacacatacctgcatatacacacatttcgtggggtgcggagagtcacttaaaggctgcagggccataaggcttcctgcttgactgatattcattaatgtttgctgaattacagcaaacctttgctgtgcccatcctgttctttatcattgaccattgctctcaggagttaatgtttgaacctggccataaaggaatcaacagctgctgacctctggccgctattcgaagggaagggagccccctataaaacagcctacagtggacagtctggtcggcagagccgcaggtcagtcgtgaagagggagctctattgccaccatgagtttctccggcaagtaccaactgcagagccaggaaaactttgaagccttcatgaaggcaatcggtgagtgctggactgaaaggcaaagctgtgggtc

SEQ ID NO: 23913 - DNA, 2300 bp, Homo sapien
gaagcctctctaaagatagctctacctgggtcacacagaagaaacagcactgcatggaccccagggctctgcttcagcattggctggaagatcgttggcttcaacgttatagacagctaagcactctaatcaataaggttgaaaagaaaaaaacaagcggttgctaatcctacaaaaactaaatgttgataccatgtagaagtctctgagaactccacaaccctactgttgcttcgcgattcagaattctttcttcctcatgggccagaaacttccttgcagaagtttctgttctctgcggctgtactgttctttatgtgccaggcagagattcctaatgaaccctgttgttccctgagcgttttgcttctctcttttctggggagttaaattacaattcacagaagagcttctggccactcctcctgcccacagaatcacaaaggcctgcaggcccgtgtaagtgtggcagagggcttgtgggagaggtccgtggaaggtgcatctgtccttttgcagactctactggttgagtctgtaacacacgctgtaacacacatgagtgctgtaaaacacgctgctgaatcttatttttgccatcggcctcagtttccctggcctctgagtgattaagtacacctgatagaagggatgaaaaccctttgggggtccctgcctggcctatacccgtctctcttggaatgtcccctctgacccctgtgtgaactctgtgacaagtcctcagccccagcttgggacaagaaggccaatcccattagctgagcagtgaccagtctctccctctctttccagaatctgagacccacccagactagggtcagtccatggtagctgcatgaacctgtgtggctatgtcaagtgggcaccgtgtatgggctgaattttggagaacaggtaagttgagtaagcagaaaccgcaaatgtaggaggatgtcagagataggaggaagaaagaggggggaacaggcaacatcagagggccactggaggcccagctgggactgccagagtgacctggcctacccaggactaaacctttgcccgaacctctctggtctacctcctctaattttgcttcagtgggatgggcctcaagagctcaatgtgaatccaggggcatttgggcatatctagagggagtttttgttgttgctgttttgtttttccttgaagttcttgccatttttttctcttaaaagaatgaatgggggtgacgggcttttatcctagaatagacctacgcttaataaaaagtgtttctcaaaaaatatgaagaattttcataccccccaaaaccactgaaaattttttataaagaatttttggagtggagctgatgtcacctatctggtgagttctgaagtcctaacatactaaccgcagtttgagaagcaaggctctcatgctctccagctctctgatgctgcagacatgaggcaagaatcttaaaggaacgcagggcctttcttcttcacaccttgctgtccattttctaaactgaaaagtgaggttctgtggggctcacaaccctgcagcgaagactccgaggctgaacgtcaataaagcgtttactaaagcgccttaaaaaatgggccgcggggctgggcgcggtggctcacgcctgtaatcctaacactttgggaggccgaggagggcggatcacgaggtcaggagatcgagaccatcctggctaacacgatgaaaccccgtctctactaaaaatacaaaaaattagccgggcgtggtggcgggcgccagtagtcccagctactcgggaggccgaggcaggagaatagcgtgaacctgagaggcggaacttgcggtgagccgagaccgcgccactgcactccagcctgggcgacagagcgagactccgtctcaaaaaaaaaaaaaaggggccgcgggaggggcacagggcttccccctcgtgatgcttccgggatcgcgcaccgctgctcacgcactctcctctgtcctgtgtcctccgtcccccgccccccgccccatccccaggtccttcccactgcgaagctgagaaccctagctccggccccgaccggaagccccaccgcaccgtcagggacgcggactcgggagtgcgcacattcgcagcccgggcagccctgctgcgcaccgggcctcgcgccccgcgccccgcgccccgcgccccgcgccccgcaccggtaacgcgcgccaacctcgccgccctcccggggtcgtcgcgggcgagatttctgagctccggacgctctcgcggctccgttcggccctgattcccg

SEQ ID NO: 23914 - DNA, 2300 bp, Homo sapien
gggcctcaagagctcaatgtgaatccaggggcatttgggcatatctagagggagtttttgttgttgctgttttgtttttccttgaagttcttgccatttttttctcttaaaagaatgaatgggggtgacgggcttttatcctagaatagacctacgcttaataaaaagtgtttctcaaaaaatatgaagaattttcataccccccaaaaccactgaaaattttttataaagaatttttggagtggagctgatgtcacctatctggtgagttctgaagtcctaacatactaaccgcagtttgagaagcaaggctctcatgctctccagctctctgatgctgcagacatgaggcaagaatcttaaaggaacgcagggcctttcttcttcacaccttgctgtccattttctaaactgaaaagtgaggttctgtggggctcacaaccctgcagcgaagactccgaggctgaacgtcaataaagcgtttactaaagcgccttaaaaaatgggccgcggggctgggcgcggtggctcacgcctgtaatcctaacactttgggaggccgaggagggcggatcacgaggtcaggagatcgagaccatcctggctaacacgatgaaaccccgtctctactaaaaatacaaaaaattagccgggcgtggtggcgggcgccagtagtcccagctactcgggaggccgaggcaggagaatagcgtgaacctgagaggcggaacttgcggtgagccgagaccgcgccactgcactccagcctgggcgacagagcgagactccgtctcaaaaaaaaaaaaaaggggccgcgggaggggcacagggcttccccctcgtgatgcttccgggatcgcgcaccgctgctcacgcactctcctctgtcctgtgtcctccgtcccccgccccccgccccatccccaggtccttcccactgcgaagctgagaaccctagctccggccccgaccggaagccccaccgcaccgtcagggacgcggactcgggagtgcgcacattcgcagcccgggcagccctgctgcgcaccgggcctcgcgccccgcgccccgcgccccgcgccccgcgccccgcaccggtaacgcgcgccaacctcgccgccctcccggggtcgtcgcgggcgagatttctgagctccggacgctctcgcggctccgttcggccctgattcccgcaggcccacgtccgtcgccccgcccgtttctggaacctttggttccggcgctcggacttgaggaacttgggagggtggtgcggggggtttctgatgctttgcgttttctgcgggatttgagcagtcctttgagaaccccgaaactgaagtccgtggtgttttcaggggctgggagtggaatctcaggcgcctgcgagtcccttgaggatttaggccgccctccttggcgggatgactggcaccggtagcctcagagagcccggggtctgcctccacccctaggggtgccgtcggctcctggggtccgagtctccgccctgtcccaccccttctcacaaaacccctccacctccctgaggggcgcctgtctacccaccttcttgttcccagccttcgggctactcctattttccgtatttatttatcctggttattggtcagagtttttctgaccttctctactctggaatagggtccagaggagtggcaagggaaaattattagaatataaaatcccaggggacacgtagtccgggtctccatcccatgcttggagccctcatagagcagcccaacaacagcacttgattttcttcctcaacttcaccacctcctgtggttgctatttccgcctctggcttacattgaacccaaccatgtgtatttctctttagctttgctgaattggcctgggaatgctgcccctggaaggcattggacagaacagggacagtcctgttgcgtgaggggcatgggtatgtgctcatcaggccagctccttccatgacctgctcagagccccgtgccagcccctctgtcctctgttcctggacagttgttccatatcctccttcccagtgccccaggtgtgatattccttccacccagggaagggcatttgaaaaatattttctttcgctgtaccttactgccttgctcgctcctgccctcactcctgcgatggtttctttggcagctcagtcgtagcgtttaagtctggtcctatgaaggcctttctgttactccacggtcttgggcagtttgcgttggctctaactcttaccacagaattgcagaaattcctctctttattgagggcaccgctag

SEQ ID NO: 23915 - DNA, 2300 bp, Homo sapien
tgctatttccgcctctggcttacattgaacccaaccatgtgtatttctctttagctttgctgaattggcctgggaatgctgcccctggaaggcattggacagaacagggacagtcctgttgcgtgaggggcatgggtatgtgctcatcaggccagctccttccatgacctgctcagagccccgtgccagcccctctgtcctctgttcctggacagttgttccatatcctccttcccagtgccccaggtgtgatattccttccacccagggaagggcatttgaaaaatattttctttcgctgtaccttactgccttgctcgctcctgccctcactcctgcgatggtttctttggcagctcagtcgtagcgtttaagtctggtcctatgaaggcctttctgttactccacggtcttgggcagtttgcgttggctctaactcttaccacagaattgcagaaattcctctctttattgagggcaccgctagcacctgccccccgaccctggttctgttttgtgaaatactgcctgctttgcttatccactgcagttaacttttggagttacccatatttcatctctttgacatggactcccatacggagtgaccttgtatcctaggttgccagagagagagttctggcttataccattgtcccagcataatcactttcaaaagattcatggtttgtatgatcaagtttgtctctgtctctaagtgagatacacttaatatttgtagttaagagagtggcacgtggcagcccacgtgagacttgcacgggggcccacagatgtcagagccacagactaggaaatgagaattcctccaggtcagtgctcatatgcctcatgtaggtagagagctttgggtggctttgcccttagagggcaggggatcccctcccaccctggcacagaaagtccaagctaatactgagagctatgtctagtcaaattcatccccatagttactgtggggcgtcaaagccagggcccctaaattcactgtcatgatccagaagaaggtgttcagagttcaagcccagctccttgacatggcatctggctcctgggaaagtaactgatgtggaagtgtgaccagtgttaggcctaaggggtcctgggcttccccaggaaccagagaactcagtccatgcagggccagttagttttaaagactgcatatcagcacttataacggtcctaggattaggctaagaggtagaacactggttatccactaggatgaccaaccatcttagtttgcctgggattgaggggtttcctaggacatgggacttgcagttttaagaccagaaaactcctgggcgaactgggatgagttggtcaccctcttctcaaccctggctgcacgttagactctcttgaggagcctctcatttagagtctaatttaattgattcaggtagttgtattttttttaacgctctgaggttgattccaacaagctaccacagttgagaactactaggctgtagacagtgtttccaataaccattgaagatgtttggtttttgagcagaagtggaccgagacgtccctgaaaggggtgtatgactctgtgcgttggtctttcgccttagcaagagggatatcaagctggcagttgcctactattgctattatctgtccccaccgccaggccttctttctcattggtgaggaccaagctttctcttttcccggcatgctccgataccctctccctgaagacaggaggtcagtggaattgcctcattttgattggtggaatcatgatttacacagttgtagatgaagctggcatgagacttgatacaggactgccatctctaggtctgggacatgtgccccggagactggtggtctagaggctaactgtgagactgtgtgtgctttggctttgcccggtggggtgtgggagcttggagaccaggtgcttctgggactgtcctctctgcaggcctccaggatcatgtggtatgtcagcaccaggggcgtagccccacgggtcaactttgagggggccctcttctctggctatgcacctgacgggggcctctttatgcctgaagagctcccacagttggacagagggaccctgtgccagtggagcacactctcctatcctggcctggtgaaggagctgtgtgccctcttcattggctctgagctccttccaaaagatgaattaaatggtgagtgctcccacctgtactttcactcttccagcccctgccagctcagtctacagaattgtaaatccatcaccaaaccactaggaagtctctagtcac

SEQ ID NO: 23916 - DNA, 2300 bp, Homo sapien
atcatgtggtatgtcagcaccaggggcgtagccccacgggtcaactttgagggggccctcttctctggctatgcacctgacgggggcctctttatgcctgaagagctcccacagttggacagagggaccctgtgccagtggagcacactctcctatcctggcctggtgaaggagctgtgtgccctcttcattggctctgagctccttccaaaagatgaattaaatggtgagtgctcccacctgtactttcactcttccagcccctgccagctcagtctacagaattgtaaatccatcaccaaaccactaggaagtctctagtcacatttcttctcaaactttgttttatttcttttcctgactctagaatcccagaattgaaaatattctgaaagatttcgtcctgtctccagggagatgaatgttgaaattttcttcagagaattctttctttctctctctttctttctttttctttaaaaaaaaaaaaacaaaaacctcttcaacactagggattttagaatcatcttgagtgacttgaatgttggggtgtttccttccttcacataaagcacccagacccccaaattgctattttattttttgaatgttaattccagaaaggacttcaagactgtcctggaccagcttgtcttaagctctactgtgcctatggattccctgggggatcttgttaaaaaccaaattctgattcagtaggtctggggtaggaatgagaattctgcatttctgtcagatgtccagataatactagactactggtccatgagccacactttaaacagcaagaacaaaatccataatgtaatggtggtggtttggggttggggaagagaaaggaccacttaaaatgcagtctgatgaccagcagtgatggcattgcttgggcacttgttggaaatccgagattgcctcagactgattgaaccagcctgcattttaacaagatcccaggtgcttggtttgccagtgacagtttgagaagctgtgctctaggactgctccagtcctgccttagggagggctgtatatcaaccatccaaaggctctggcgtcacaggtgtgagatttagtaatgtaagaaacaaaaagcttcctatctttaggaaggaacattagatgggatgcgacattgatgtgttatgtagctatttaattgacccctgattggaatacatgctcacgagacagtcaaacaatgaagaagtataaaaaatgaaaaataaagtcttctagtaccaattctggtcactgaggaaatcactataaggaatctatgaacagtttggtgcatgttttcccagacttttttctaggtttttacaattgtattcaaaaatggtatcatttaagatgaagatttttggccttttagtagcaggagttggaaactttatattcagagactgagagggaacttgagaaagagaccaggcccctcattggctatccaccccactaccctcacagatctgatcgaccgagccttcagcagattccgtcacagagaagtggtccatctgtccaggttgaggaatgggctgaacgtgttggagctgtggcatggcgtcacatatgcatttaaggacctgtccctgtcctgcacaacacagttcctgcagtacttcctggagaagagggagaagcacgtcactgtggttgtaggtgtgtttttggggcacaaacgcagaatacctgagtgctgtgactgtagggtgtccacctataggatgctgttcatagagccactcaggaactgtggtactggttcttccagagcaaggttcctaacattttctggtgccatagacccctttgccaggctgatggaggctatggaactttctcagagtaatgtttgaagtgcacaaaatgcttaagatgatgtggttcacaagttcacttatgtcctgaattttatccgtggatccatggaccctaggtggagtgctaggttcatatcatccaagtatttgaagtagatgttgctatatttgacaacagtgctttggggaccatttctttcctcgttcattccctttgttctaaagggggagagttctcctttcttcccatccaggaacatctggggacacaggaagtgctgccattgagagtgttcaaggggcaaagaacatggacattatcgttctgctgcccaaaggtcactgcacaaagattcaggagctccagatgacaacggtgctgaagcagaacgtacatgtgtttggaggtgtgtgctgaggcagaggctctagggacagtgcagccctgcctta

SEQ ID NO: 23917 - DNA, 2300 bp, Homo sapien
tgagagagtgataactcactcactatggtgagaattagcgcagtcccaagagagtggcattaatccctcttaaccacctcatcaaatcttaaaggcctcacctcccaacactgccatgctggggaccaaatttctaacacattaattctgtggacacactcaaagaaaggcaggaaataattatctgaggggaagttggcattccattaaagaagaggaatgccagagattcccagccaactcaatctcttgaccttgcccatcattcactcctttctaggcacatggctggtgattcttgttctcagtggttcctgcctttaggctttgcactagctgattgctgtgtctagaaccccttattctcagatctttgcatggctggttctttcccatgcttcagatctctactataacatcaccctctcagagagacctccttggacctcccatctgaagtgcccactagtcatcctcttgtgcatcgcctggcttatttgctctatctaagggagggtgacctgcttattattgtgtttgctctgtgttttcatctcaccagaatgtaagcagagatttccatctatttttgttcttgaatctataaagttcagaacaatgcccaaacacaaaagaagtgctcagtaaatattggttggataaatgagtctatggtggcacctagtgagataaaggaaagctttatagaggaggtgtcccttaaagaaggtggattattaaaattatatatataatatatgtaacatatatgtttaatattatatataaaattaaatatacatatttgtatataattacataaaatatataaaatacaaatatatatacaatttcatatatataacaaagtttatcattttagtcacttttaagtgaataattcagtggcattaagtacattcacaatgggcaaccatcaccaccatccattcccagaactttttttaatattctgaaacagaaacttcatatccattaaacagtaactccccattcctctcctcagtctctggcaactatcattctactttctgtctctatgaattgtacttctctaggtacctcgcagaagtggaatcatgcagcatttttctttttgtgaccggcttattttgctttattttgcttagcataatgtcctcaaggtttatccatgctgtagcacgtgtcagaattgccttccctttttttttttttttttaattttgttttgagacagagtgtcgctctgttacacaggctggagtgcagtggtgtgatctcggctcactgcaacctctgcctcccgagttgaagcaattcttctgcctcagcctcccgagtagctgggactacaggcgtgcaccaccacacccggctaatttttgtatttttagtagagacggggtttcaccatgttagtcaggctggtctggaacttctgacctcaggcaaactgcctgcctcggcctcccaagttgctgggattaccagcgtgagccaccgtgcctggcctcccttttaaggctgaataatattccattgtacgtagataccaaatccattcatctctgaaggacatgtaagttgtttctaccttttgactattgtgaaccatgctgttgtgaacgttggtgtacaggtatccatttgagcccttgctttcaattcttttttatttataactagaagtggaatttctccacatcctcatcaacgcttgtttctgtattttttttttattgtagccacacactatgaatgtcaaaaagtgacattttgacaattttgagccaggctttcaggcagcagaggcctgggtggcagtctgtggtgtgaagtggatttagtcacacacagtctgatgttgtaaaccacatgggctctatttaccttcctctcctaggactaggaagattctgtagagtatcggaaagcattggttcatgtgctgccaggattcatgttggctctggtgagccagggacagggaactgacctgcaggcagcccaagcagccacctactcacctcacaatgacagggaccctcatcatacaggtcagggctcaactcaaagacaggcgtggcagtgggacacagcaacaggactctccatgtggcaagggcacctggaggtgggagggcaggagcgtcgtcttgccctggcagaagaagcggtaggctctgtctgcgtggcagctggtccccagccctaggagagaagctgtctgtgagcaaaagggaggggatacaggtgttggttgaggtctgggcaccaccctgctgggccacagtctg

SEQ ID NO: 23918 - DNA, 2300 bp, Homo sapien
cagtgacaggtcatgtggatcagctgatggttttaacacatggaatttctacaaaatgctttagctgaggtgaaaacattagtaacaatacatatttgctgcacacaccacacatatttcgtcttcatattcagatgaagaaacagaggttgagggaggttaagtacctggctcaagtccacatgtaacaaagccagaatttaaatcccagatttgattccaaccctaaagttttagtcatttttgaaaacttgcatgtcactttattctaaataaaagttttattctaaaactttatttttttatttttatttatttattttttgaaacagagttttcctctgtcacccaggctggaatgcaatggcacgatctcggctcactgcaacctctgccttccatgctcaagcgattctcttgcctcagcctcccaagtagctgggattacaggtgcatgctaattttttgtatttttagtagagacagggtttcgccatgttggccaggctggtcttgaactcctgacctcagatgatccacccacctcggcctcccaaagtgatgggattacaggcgtgagacattgtgcccggcctattctaaaactttaataaaaacggttgtcttgctccctaatgtccaagtttcattgattaatagccatcagtgtgaacaactacctggaccaagaagatcagctggattcggagatatccttcgctagttcttaatctgagatgttcagaaaccttggaaatgtctgtttctggagagaccatcactgtctctcccctaggtggacagagcaagaaggtgagccatgacctggatctgctggagcaggagaggacagcggtaggggagcccaggaagggatcaggcacaggagagaaggatgagttgagaccccaacacgctgcttttgaggcgcttgctgcaccttcccacaggaggctgaggaaacagctctgagaaatagctactaaaatcctaagattttgcctcagaaatctccttcgaatttgaccctccattcagaccccactgcagcaggcctcctctatggcacccgggaacggcccttgcagtcctccccattttaactctagaggaatcataaaacacaggtctgattacatattcatgatctccctgtataaccaccacgtggggggtcccacagcgtaaggcccttcctaggaggcagcaacccctccctccaaccccatctcaacctgccctacacgcatattcacccctctcccacctcctgccttccacttgctgttactttttgtaaacaactttttctcctggtttcccccagtttcccccagctgacagcttacacagcctcctctgaagaatcctgccttgacaaccccctgtccctaacagtttgctcgctctctgtgttcttaagtccctttgttcctacatctttcagcggggggctgtgaggagtccaagagtgaacacccagtgcctgccctggcaaacagtgactgctcaatcattgtgagctatattttattttattaaaaaaatttttttttgagacagagtcttgctccatcaccaggcgtgatctcagctcactgcaacctccacctcccaggtccaagcgattctcatgcctcagcctccagagtagctaggattacaggtgttagcacaactaagttcctcttcaaaacttacctccctgtttataagttgtaaggttataagctagcccttctccctgctttcccctttctccactttggccttcaaagtcctcgtctcgctaccttatttagaaagaggttcaaacttccttctgttctgtaaccaacccccttgctgtacccatacatatccaggcatgcctaggcatgccttccctcctgcctagttagtaacagacggtctctcctccccactcctcttttagcaaattgcgcgtttactctatttggagaattttaagtcttagccaatcaggtcagcttagattgtgaggtccaactccagccaatggggaaaggacacagaaacaacaactgcgttagggataaaaaccccttctctcctttgttggggtactcttgtgatcatggctgatgcaggcagcacccttctgtagaagtagttgccttactgagaaaactttttgcctgagtgctggttcttcttttcggcaccgagcacttgtttctaacagagacatgtgccaccacgcccggttaatttttctatttttagtagagacgggattctgccctgttggccaggctggtctgaaactcctgacctca

SEQ ID NO: 23919 - DNA, 2300 bp, Homo sapien
gggagagcaggagcctcggggtccggaaccagacgatgagacagagttgcgaccgcgcggcaggtgaggggctgccgacccgggggaggcaacttgtttacgcgcgcgagccgcggaggatgcggtgtaggggggcggagatccgggacccgggcgggcgtcttccctcggctgcggagggcagctggcgacctggggacgagcgcggggccacgacgccctcccatcccccggccagcgacctgcctgggctcggctcccgagggcctggtgctggccgacgggtcagagcagcatcctcgcaggtgcgggagaatggaattccagggttgcaaagaaacgccacttcccctctttcattgttttcgggcattgattctcttccaaggaacctttccctctttttccttacgcacatcacctcctgtctgtgctggcgtgacagctgttttgagaaaggactttagcaaaagacgtctgcattttctttcaaacacaactctgtagtgcccccggacaaggattgagatcagtgtctaattgagatctgcggaacacctgcatccgaatcacctggggttgctggtgaaatctacagttttctaggccctaccccagttttactgaatgagacattccctgggtaagagcctggcatctgcgtgtttaacaagcacgccggataattcttgcacgctaaagtttaagagctatagtcagattcttgaatattggttcttgaacctaagagccatggttaggttcttgaataaggggtttactgtataaacatttaatatagggttttctttgagtttctcagcattcaaaaaatgttacttcaaggtgattgttttaaagcacttttcaaagtctagacacaatgtaaggcatgttaacagtaaatttgggggacagccaatcttatcacacccgtggagaaagtgatgtcccattttataaatggagtgctaaagggagcattaagtaaattaaactagggaaggctgggctctggattggaacatattttagacttatagtcattactagatcgtaacaagttagatttaattttaaattaatattagaactttgatctatatatctggagactactataaataggataagtactaaaattctctaggcaccatttgaatatataaacatttgtaaatatatatatataaaacaaagttttcttaggtttgctaatgagtcagttttcctggaagagtgtttttgtttatcataaatttctgaagctcctgctcaaaatgaattacatgaagtagagttgagacgttttctttttcttagaattcaaatccacttcaacaggtacttactggttaacaagagcccaaggatgccctgggtggcagaggttaggcaggtagttcctgccttccaggagagtgtgcagtctaacagtacggatgaaacgagaagacctataacaacattacagactagaaacagtgccagtgtcagggatgtcccaaggtttttgtggtgttctactaggtgaggtatgggagtgagggtaggtaagaagataagagaaggttgtggcagaatgagttggttcctgaaaaatgggtaaaattgtaatggaaagtcactggacttgaggaaacagcaagaggcacagaggccggagattatgtttggaaaacattttgtctctgtgtatgtctgtgtgtgtgtgtgtgtgtgtgtgtgtgtgtgtgtgtgtgtgtacgtaagcgatatagacatgcacatatgtatgctaggcagggagaagtagatgaggatagaaaaaataggttagagccgactgtatatgcatatagtctgatgctaatagcatcattgtcacttgggagtatgttaaaactccggagtggggcaccaccccacactccctgaatgagagtatctgcattttaacaagatcaccgtgtgattcacatgcacgttaaagtttgagaaatgttgggtagagtatcctgagtgccaggcttgatcaaaattacacctaaggaatgtttctctagcaatagtgtgtactgaaaacttgagttaagaataccaaaaggagagtgttatagcagttcagatgagaggtttagtgtaaagtggtataggacagaggggacagagttgagatatttgatgcaaaatctaggttcctggcaagtgaatgcattcttcctttcttggtacccttgtccagagattgagactgcgtggccagaagttgacaaaagaggtttaagggagcagggaagaaaaggtaaggggtttggtgt

SEQ ID NO: 23920 - DNA, 2300 bp, Homo sapien
actctacttcatgtaattcattttgagcaggagcttcagaaatttatgataaacaaaaacactcttccaggaaaactgactcattagcaaacctaagaaaactttgttttatatatatatatttacaaatgtttatatattcaaatggtgcctagagaattttagtacttatcctatttatagtagtctccagatatatagatcaaagttctaatattaatttaaaattaaatctaacttgttacgatctagtaatgactataagtctaaaatatgttccaatccagagcccagccttccctagtttaatttacttaatgctccctttagcactccatttataaaatgggacatcactttctccacgggtgtgataagattggctgtcccccaaatttactgttaacatgccttacattgtgtctagactttgaaaagtgctttaaaacaatcaccttgaagtaacattttttgaatgctgagaaactcaaagaaaaccctatattaaatgtttatacagtaaaccccttattcaagaacctaaccatggctcttaggttcaagaaccaatattcaagaatctgactatagctcttaaactttagcgtgcaagaattatccggcgtgcttgttaaacacgcagatgccaggctcttacccagggaatgtctcattcagtaaaactggggtagggcctagaaaactgtagatttcaccagcaaccccaggtgattcggatgcaggtgttccgcagatctcaattagacactgatctcaatccttgtccgggggcactacagagttgtgtttgaaagaaaatgcagacgtcttttgctaaagtcctttctcaaaacagctgtcacgccagcacagacaggaggtgatgtgcgtaaggaaaaagagggaaaggttccttggaagagaatcaatgcccgaaaacaatgaaagaggggaagtggcgtttctttgcaaccctggaattccattctcccgcacctgcgaggatgctgctctgacccgtcggccagcaccaggccctcgggagccgagcccaggcaggtcgctggccgggggatgggagggcgtcgtggccccgcgctcgtccccaggtcgccagctgccctccgcagccgagggaagacgcccgcccgggtcccggatctccgcccccctacaccgcatcctccgcggctcgcgcgcgtaaacaagttgcctcccccgggtcggcagcccctcacctgccgcgcggtcgcaactctgtctcatcgtctggttccggaccccgaggctcctgctctcccgcggctgccggcagcgcctcagcgtcctccacagtcacctcggccgcagccacggcgcccgccgccggtactcgcgtcgctgaggtgggagcagcggccgccccgaggccgaacgccgcctccgccgtcggcgctgggaggccacgggcgcgccccgcggccaccgtccttgccgcgagccccagcagcagcagcagcagcagcagcgcccgtaccagcagccccgggctgatggcgcgctccatcagcgtcccgccccgcgcgcaggcatggaggcgcagccactgacgcctgcctctcccgccgcttggagctcccaagaaggcaaggacgtgctagggaccctactgccgccccgacggcctggacagccagccgtgttcccctggccacgtctcagcccggcctctgccgctgccacctgagtgacagcctatctcggacatcgcccattgagcaaactttccgcgcgtttgctctctcattggctgcggccgctgccactccatgttcccaggctggccttgttggggaaggtggactttccctggtggtcaacatcgcacctaccaatcaaatcgtaatttcgtcgttcgaggcccgtccctcttccggacgcaattaccaatgagaaatgcccttccccgacgtctttttacctgattggtgcgctcatcagttcccggaatacctttcctacaacagattggccatcgcggtggttggcctcgccccacaaagcgaggcgctggagaagacttgaagatcattggtggaagtggatgtccctcaaaggtctgcgctaactgcctcttgattggttggaagcggcacttactacgtggcggattctgactgtgaagaggactgtcccaagtgaagagtgggaggcaagtgccttgtgaccgggaggaggtcgaccttaaaggagctggtattgtagctcttctaaagcctagtctacttaggaaggcaaaagcgaagcagcaagaagtggcc

SEQ ID NO: 23921 - DNA, 2300 bp, Homo sapien
ttggagataagatctttaaagcagtgattaagttaaaatgaggctgttaaaggtagccccacactccaatctgactggtgttagaagaataggaagagacatcagagggaagaggaagtaagagggctgtcatcggcaagccaaggagagaggcctcagaatcccaccttgatcttggacttctagcctccagaacttcgagaaaataaactagttttgttcaggccacctggtctgtggtatttgttagggcaactctagcaaactcatatacctgggaagtttcctaggcaggcaaaacaacaaaggaaaaccccccaggtgggtcttgattggcccagtggagtgagcaaagacagtatgaaatgagatcagaaaagccataggaaccagatgctgtagcaccctgtagtctattttaaggacttgacttttatcctgagtgaactgggggaccttttgagggttacgaccagcactatggagaagcaagaagaccggtgaaaggtgttctagacaggaaaaacttgagttgctggatcaaatacagctgataaaacaaagattatcctttgaatacagcactggtggcctcagcgagagcagttttggtggtgtgaatgcctgactgtagtgtacttgggaatgggagaagaggaattgaagataaggaattttgaacacttgagttttgccatacagaggagcaaagacacgtggtaggagctggaaggggaagagaggtttcttgtttgttttgggctggggagagattagagcatgtttttagcagatgaaggataatctaggtatacccatattgccaacaccttaacaaatcttcaccggttttggaccaggtgcggtggctaatgcccgtaaattgcagcactttgggaggctgaggcgggaggatggcttgaggccaggaatttgagaccaacctgggcaacacagaaaccccatctttacaaaacaaaattaaaaattggcctggcatggtggcacgcatctgtagtcccagctactccggaagctgaggaaggaagatcgcttgaacgcaggaattcaaggttatagagaactatggtcaagccactgcactccagcctgggcaaaagagcaagaccctctctctaaaaaaaaaattttttttaatgttcactggttttgatgcgggtaatagcctcccggccagtctcctcctcgttgatgctgtcactgctgaagatgcattttcttatcacttcactcatctgctcaaaaatcttcaggaagtcttgacttgcagcattaaaagttcaaatgccttggctgaacattccagtcttctccactctgcccttttgcaatttcatcactgtctttggtgaggtacaaagcgtgccaggtcagagtcagaagacatgaattaaagtcatgattctgtgaccaaccagctacgtgatcttaggctaactacgtcagtgcactgggccggggctccttcccgttcctaaggaggcgggaggcgtgtcgggcagactggattgtcacaggtcactgccatctctaacaagcggacttctgagccccgttgcggccacaagtaggaccatctcctgcatcctccttacccttctacttctagggaccacacggcttctgtggccacttcttgctgcttcgcttttgccttcctaagtagactaggctttagaagagctacaataccagctcctttaaggtcgacctcctcccggtcacaaggcacttgcctcccactcttcacttgggacagtcctcttcacagtcagaatccgccacgtagtaagtgccgcttccaaccaatcaagaggcagttagcgcagacctttgagggacatccacttccaccaatgatcttcaagtcttctccagcgcctcgctttgtggggcgaggccaaccaccgcgatggccaatctgttgtaggaaaggtattccgggaactgatgagcgcaccaatcaggtaaaaagacgtcggggaagggcatttctcattggtaattgcgtccggaagagggacgggcctcgaacgacgaaattacgatttgattggtaggtgcgatgttgaccaccagggaaagtccaccttccccaacaaggccagcctgggaacatggagtggcagcggccgcagccaatgagagagcaaacgcgcggaaagtttgctcaatgggcgatgtccgagataggctgtcactcaggtggcagcggcagaggccgggctgagacgtggccaggggaacacggctggctgtccaggccgtcggggcggcag

SEQ ID NO: 23922 - DNA, 2300 bp, Homo sapien
taggcatgaataacaacctaaggaaaggattaaaagggttgcagaaatggaaagacaagtacaacatggagaaaagagagaaggaaagagaacgcaaagaggcacagacagactttgtcaccccaaaacagtaattgaacaatgcactgtccatgttatgagcaacagtctctgccatcaagggacacgtcgtttgagtgagacagtcaaatgaatagagtgagatggttatgacagagaggttacaggtaattgtgagcaccgaagagcagccaactcaactaagagtggggtttagagttgcagagtaacaagtaacagaatgaagtcttgaagaatatctgagagttagaacggtacagagtgtacaaaaccacggaggtaagagcatggacgcagggactaaaattctgtatggccgaaggtggagtgtagggttaaagcatgacatctatttgttatttaaaatgttttagatatttgttgaggaccatctacaggtaaagcagttttaggaatggaggattttgtagaaagacacccaaagtccgtcttctcagaatgttctgttctacagaggatatatgataaacaagtacaaaacgaaggacacgaatgatggacggaagttctgtgatagaaatacaaccatgcgcaaagtgatagaggaggggtgggcaggaaacccaatttagatgaggtggtcacttagacttctttgggaaggtggtatttcagctgagtcagaagggtggatggagcaagcaatgcacagatggccaggctggcaggtagagcatttaaaatggttcaaaggtcctcaggccgggggtaatggggtaaagcagagactaggtaacatttacttcatgaatcttttggtgtgggtgctgaggagcatgaataaggtgaaagactcctcctaaggagatacattaaaggtgacatatttgcctagagtagccttcaactttgcagaccaacagtagtgggagtccagacatactgttctgcatgttagccagaaccttttgctatgttctgaatttggcctaaaatgaaggattcaaatatcatctcaaacaacttttcctcctacagactaaggtgaagattcaagagctcacggcctcagagggcaaagcatagttaagaaaatctaggtgataaccggcagttaacagtggcccataccagtgacttgcgctcacggaagagttctgaaggcctggaatgcgtttgaagatgagttcatgagcagacagaaaggattccactaacagccgagaaacacaaaggtcatgtgtttttagggacctccaagtggtcggtaaggttggggtcagcattagtttctttgcctgtaaaatgggggcaataagaattcctcgtcccttaactattctcaacagcaagaaaccttaaaggtagagaagaaaagataaatctgttttcacagaaagtccttgttagtcacgaaggattgcaggatcgctgcagggcacactcatatgtgcagaaccagtctccaaatgggcggagcaaggtgcagctccacctgcttcaccactaggtgcagaagaatgtccacggcagggggttctcaacttgtgaccttgggtctgcgggggtctagatggacttcagctggcgccgtgtcgcatgtgagtttcctgggctgtagtaaccccaaaagggccgcgtcgtctacagaagtgccactacttggaattcttgtccatggccacgttctcactgctgggagaaacaacagggtcaggtctaacactcctttctcggatgcatgggcgaacagaaatatccctgggcttcacctagccgtggcctaagtacacttccccagggtaaggagtcaccatactgatattcccgcggctaatggtacttcacagagcgaagtgccggagcccgtcgccggcgattgcgcattccgtcgcggagagcattatgggattggtagtccagactgaggcgcagataggggttcctcgaagccacagaactacatttcccagcaagacccgcgcagcagggcacgcagactgtgtgcgtaagcgaccagatttccgggggagccgggggcgggacttcagcggaggccggagcgaggcgtcgggatgcagcgccccgggcccttcagcaccctctacgggcgggtcttggccccgctgcccgggagggccgggggcgcggcctccggcggaggagggaacagctgggacctcccgggttcccacgtgcggctgccggggcgtgcacagtctgggacccgtggcggt

SEQ ID NO: 23923 - DNA, 2300 bp, Homo sapien
ggtgtaaggaaggggttcagtttcatttttctgcatatggctagccagttttcccaacaccattattaaataggtaatcttttccccattgattgttttttgtcaggtttgtcaaagatcagatgattgtagatgtgtggtgttacctctgaggcctctgttctgttccattggtctatatatctgttttggtaccagtaccatgctgttttggttactgtaaccttgtagtatagtttgaagtcaggtagcgtgatgcctccagctttgttcttttaatatatgtgcttaatttacatttaatgaaattattcacatggttgcaattattcacatggtatgaagtcaggcagttggtgtgtcagtggcttcaccccaggaaaccacccctcagccccatgcgcatggctgcagagtgcccagtgccaccgtccatgctccaggcaagggtggagtaggagtggactcttaagccaggttggcagtacactcagccacccagaggccatcccaggggagccctgctagcctgctcttgcacctatagtgcagctgccacctgcatgtctcccttgggctgcagtggccaggcaaccaccatctgcccaccccttcccccaaccaggaccctaactgcggactctggcaccagacactgccaccgctgtcaaccaggccctgcagaggcaggaaagctgaactggctgctgatccccttctggttggccagcagtacccacgcctgtggcccctggactcctagtgcgggctaaggtgtagtggaccctcgggcttggccacggcacaatgggccacctggacagcatccaaaagagaagacctaccagcccgtgccagcgccctaggtgcagctgccacctgcacgtcaggcaccagcagcaatggccagaccatccctgattctccacgccctccccaccactgccccagcagcaaggactccctgacaggacactgcggtagtggctgtcgggaagtcggctgagtaggtgcataaggataaagatagactctcagccccatcccgatggccacgacgacatgctcatcccctggcggctcctcagccctatcctagtggccacggagtggcatgcaggcagcagccataggaaccccgattgcccctcctcacacgtgcccatcacacgacctgggcgactgggtggtgaagtcaggttgtggccccagcggcgccacgaggccgagaaccggcgcttagcctcatccctgtggctgcagagtgccaagccccaggtcctgcgctcagggcaggggtcaagagcagctggcaagggcggcgcagcctgtggggcccttgggcgcggcgggccgcagctccgggaagccacgtcagcccaccggcgctgcagctgcagccgccaccagcacacggaccaggggtcgccgaggattgggaatccccgaccaggactgcgcctccagccgtgcggaccccggggccagcggggcagcggcaagtcaggcagtctgcagcaggagcgctgggcatgggcttcggcccgggttgcaggaggcgtgcaccctccggccggataggcggcgcactcagggaccaggaggccatcccaggtgagccccgccagccccagccggagcccgagctgcagctgccacctgcaagtggtgctctggctgcagcggtggcaaccccggatccagtccttccgcctcgcgcccatcagcgcggacccgggggcgacgcagtggcgaagtcgggctgtgggcccggcggcggcaccaggcggagaagcgccactcaaccccatccctgggctgcagagggcccagcgcggagggctccgcgcgtcgggagccggtggaagaggagaagagcgcgcgggcgacagtcatacaggccttggggcagggcgcgcctcgcgctccagggagccacgccagcccgctgcgcctccgcagcaaccgccgcctgcacgtggcggggcgagagagctgctagggcggtttctccgcctcgggcctgttgggcggggccggctaaggtgcgcgtgctcgctggtcctaacggttctgttgggcgtttctgctgagaggcgggaggggctgagagtctgtgcgaaggtaggtggacagactgcattgcttgttgttgcgcttcggaggcggcgatccccgaaggcgagctgaaatacggctggagcgttcccaggctacagtttgtagccgacgattgtggaagactaggagccggagaggtggcccaccctcagggagcgcttgtgctcggagggcttctc

SEQ ID NO: 23924 - DNA, 2300 bp, Homo sapien
tctccactgcattgccatcctgcctttgtcagtcataggctggttgcatatgtgttatctatttctggactgtctattgaattttattaatttgcagatgctccccaaattgtgggaaagccagtgtttgagtcaaaagcaatttaatacttcagtaaacccactgtaaagtcaataagtcaaaccaccttaagttggggattgtctgtatttgactttctttatacaggttgagcattgctaatttaaatatcccaaatctgaaatgctctaaaaccccaaactttttgattgccaacatagacaccacagtgtaaaaattctatatccgacctcgtgtatacaaacattgtttcatgccccaaattattaaaagtattgtttaaaattaccttcagtctttgtgtataaggtaaatatgaaaaataaatgtattttgtgtttagacttgggtcctatccccaagatatctcatcatgtatatgcaaatattccaaaatccaaaatctgaaaaacttctagtctgaagcattttgaataagggatactcagcctgtacctatggcacactgttttggtaactattgaattatagtaattcttgaaatgaatcctccaactttgttctttgttctgttttgactatgctagatcctttgcattttcacatgaactttagaatcagcttatcaataaaataaagactgcttgcttgttagaaattaagttgggattgtgtcatatttatagattaatttggggagaattgacatcttaacaatagtaaatctactcctcaataaaatatatgtctgcttttgtagaggtaatatttaatttttctcagtagtattttgtagtttttcgtttataggtcttttcatattttatcagatttatctgtatttcatttttgatgaagttgtaaatgatagtttagttactgtagatgaatttgactttctttatacaggttgagcattgctaatccaaatacacatgtttataaaactatagaaaatgatagttttaaaattttcatttgattgtttattgctagcctatagaaatacagttaatttttctatattgaatttggatccttcaatcttgttaaactcacttgttagttctggcacattgttggtagatttgatcagattttcttcatagaccaaaggttgttaaacctttctttctcaaactaccctcttactaaggatagtgaatattttagacttgtggcaaaagggtctcttttgcagctgataaactctgccattttaggatgagagcagccatagatcatccataaattaatgaacacagctgtgttccaataaaagcttatcagacaagaagctggcccacaggttggggtttacccatacctattgtatggtcatggttgtgtataaagacaattttatttctttttttaaacttggatgcctcttatttctttttcttgcctgactgcattaactagaatcttcagaacaatgctacaaacaagtagtgaaagcagacattcccatgttcttcctcatcttatgggaaatgcattcagtttttcactatgatgcacgttagctgtagattcatcatagacattgtttatcatgctgaagaacttcccttggattcttatgttgctgagagtatttcttctttgaaacatcaggagtaaattttatcaggtgcctgtatctgttgggatgatcctatgggtcttctcttttagttcgttttatggtaaataatgatgatgtttcaatgttaagccaaccttccatttctggaataaaccccatttgtttatgatgtattacctttttattataccattggatacaatttactaaagtttcatttagaatttattataaagacttttattttttagaccagttttatgttcctgtcaaaattgagagggaggttcagatatttttttgtatacccccaacccaatacatgtttagcctccttcattaccagtgtccttcaccatagtggtagttgctatgatagatgagcctaaattgacacatcacaatcacccaaagcccataatttgcattggggttcactcttggtactgtacatgtatggatttggacaaatgtacaatgatgtgtatccatgttatataaattattttgacttccctaaaaatcctctgtgctctgcctatgtatcttttcctgctgtctcttaaaaggaaagattttgtcaactaaaaaaacaaaatatgttgcttcaacagcaactggatgatgctcgcaacaaagctgaca

SEQ ID NO: 23925 - DNA, 2300 bp, Homo sapien
agtaaatcaaactgactactagccactgaccttcactaaagagactactaaagggtgcacttcaggaagaaagtaaattatgtcaggaggaaaatctggaatgcaagaatatcttcatgactcccaaaatagagaagaatttcttaaactttataaaaaacatagtcaataaacgattgacatattcaactgcattaaaattacaggcttaattaatcaaaggaagccataaagtatgtgagtgctagcagaatatatttgcaatgtttatgacagcccatgaaatttgcactattagcaagaattcctatgaatcaataagaaaaagaaaaatctattttaaaatatttaactgattaaaaaaagactttacagaggaggaaatattaatggctaacaaatatataaaaataagctctatctcattagtaaacaattccacagtgtcagtgagcaacagggaatgtgccacagcacgctgtgaggttaatggggtgaggggagatggcccactgaggactccaggtactttttaaagagacagtcacaactcattccagcctactctgacctgagaaatgggtacactgtggccaggacccatggatttctaaagaaatgacccaaatatggattttccatgtgaaatatcctgttttaaatgttggcaacttattcagaattgtttaaaagtgtatatgccaatactgcttgagccaacaagacatattcacaggccagagttggtcgagagtccctctgttcacgatttctgcattaaacccttgaatttctttttttattttttatttattttattttatttttttattatactttaagttctaggatacatgtgcacaaagtgcaggtttgtttcatgtgtatacatgtgccatgttggtgtgctgcacccattaactcctcatttacattaggtatatctcctaatgctatccctcccccctccccctaccccacaacaggccctggtgtgtggtgttccccacactgtgtccaagtgttctcattgttcaattcccatctatgagtcagaacatgcagtgtttggttttctgtccttgcaatagtttgctcagaatgatggtttccagtttcatccatgtccctacaaaggacgtgaactcatcattttttatggctgcatagtattccacggtgtatatgtgccacattttcttaatccagtctatcattgttggacatttgggttggttccaagtctttgctattgtgaatagtgcaacaataaacatacgtgtgcatgtgtctttatagcagcatgatttataatcctttgggtatatccccagtaacgggatggctgggtcaaatggtatttctagttctcaatccttgaggaatcgccacactgtctttcacaatggttgaactagtttacagtcccaccaacagtgtaaaagtgttcctatttctccacatcctctccagcacctgttgtttcctgactttttaatgatcaccattctaactggtgtgagatggtatctcattatggttttgatttgcatttctctgatggccagtgatgatgagcattttttcatgtgtctgttggctgcataaatgtcatcttttgagaagtgtctgttcatatccttcacccactttttgatggggttgtttgatttttttcttgtaaatttgtttaagttctttgtagattctggatattagccctttgtcagatgggtagattgcaaaaattttctcccattctgtaggttgcctgttcactctgatggttgtttcttttgctgtgcagaagctctttagtttaattagatcccatttctcaattttggcttttgttgctgatgcttttggtgttttagacatgaagtccttgcccatgcttttcaaccccttgaatttcctaacaatcggatgtgactttaccatgactcagaggggccaggcttcctgctccatttcccccttggttccctcctaacttcacctgagcttttaactagagacagaaaagagatgccctgcaaagggaaacatgctctatactggctaatgaagctccttcttttatgcttttatcttccagatatttgggttctgggtctggatcctggtagccaccacccaggtagcaaacccattgctgcaaggatgggtgatgtatgtctcactcaccttgtttctcatctccctggtgttcctgttgtcttccttgtttggatttgaatcctggagagttctggtaagaaccagcagcataactcctcctgggtggatgtcctggg

SEQ ID NO: 23926 - DNA, 2300 bp, Homo sapien
taaattatttaaagttttaaataatttaacattcacaatagtttgtgactgtatattttgacttggtccttcaaacttaatttgtacttttatgtatcgtgcttacctcaattttttattcacttttcctaaactttgctggattggtttattatttttgtctatttcttttccttctagtggtttgggagggttttttaaatcccattactattgaatgcctattaacttgccccctttttctttcaatctctattcccacggcctgaagcatgagggccaagctgtctgtaaccagcagagagatgacccaggtgttattccactctccactgtccacctatcaccattcccagcccgatagctctgaagtacggcttttctggggctctgtggggaaaactagaactggctgcttcaaggacacctcctgtttttgcaatggaaaaaatgtttctaaattccagtttctctatgaattcaatgacatggtttaaatctctgtggtgttcttcaaagttttttcttctaataggacctctcatgattctccaaccacgaaataaattcattatcatttttatatttcttctgtcattgcaaaggaggttttgaaagagtggaggacgcgctaatgaactcaaaaatccacactattccttgtttccatctgttgttcattcattgtttccattggcctgtccgcctcctatcctccttcttagacttggagctctagcctcagccaggatagggaaaagagagatcagactgttactttgtctatgtagaaaaggaagacataagaaactccattttgatctgtatcctgaacaattgttttgccttgagatgctgttaatctgtaactttagccccaaccttgtgctcacagaaacatgtgttgtatggaatcaagatttaagggatctagggctgtgcagaatgtgccttgttaacaacatgtttacaggcagtatgcttggtaaaagtcatcgccattctccattctcgattaactaggggcacagtgcactgcggaaagccgcagggacctctgcccaggaaaactgggtattgtccaaggtttctccccactgagacagcctgagatatggccttgcgggatgggaaagatctgaccgtcccccagcctgacacccgtgaagggtctgcgctgaggaggattagtaaaagaggaaggcctcttgcggttgagataagaggaagccctctgtctcctgcatgcccctgggaacggcatgtctcagtgtaaaacctgattgtacattcgttctattctgagataggagaaaaccgctctgtggctggaggcgagatatgctggcggcaatgctgctctgttgttctttactacactgagatgtttgggtgagagaagcataaatctggcctacgtgcacatccaggcatagtaccttcccttgaatttacttgtgacacagattcctttgctcacatgttttcttgctgaccttctccctactatcaccctgttctcctgccgcattccccttgctgaggtagtgaaaatagtaatcaataaatactgagggaactcagagaccggtgccagcgcgggtcctccgtatgctgagtgacggtcccttgggcccactgttccttctctatactttgtctctgtgtcttatttcttttctcagtctctcgtcccacctgacgagaaatacccacaggtgtggaggggctggacaccccttcgagccaggattatcagggcatttgggggtctgcaaaactaagccccaactcatcgatttcacaacttcatccagagccagcctgaacagtagttgcccatgatttctatgccttaatacgagaagagaacataggggctgggtgccaagtaggtagacagggagggcagggaactctaagacagagcttgaggggctcgttcctcttgcaaaatgaaacaaaaaccacagcactgaatatgtaaatctcggtggctgaacccctcctaggatagtaagccctgatacaattgctgctatcttctctttctctcaaggaagtcaaaaaacacctgcagccttactgtccccttggaaacaagatgaacatctacattttctagagtgggacaagaatctctgttcatatttatgtcccatgcatttgcacgtggccggacaaaggactttgcttctgccagcacatctgtcttcagatatgagaggaaacagacacaacctggaggcggcaaagaagcagctctttctcaagtgacctcctctatctccctacttcct

SEQ ID NO: 23927 - DNA, 2300 bp, Homo sapien
cttgggtttgaagtttgcagatacacttatattttcttctgtgtcacctgaaagcaagtacttaatcagtagtaaatatattttctcatttttatggttttcttaagaacatttttttctttaccatactttattggaagaatagagtataaaatatatataaaatgtaaaaaagtgtaatcaactatttattttatcactaaggcttccagtcaaaagtaagctattagtacttaagttagaaatgcaaaacttctacacaggttttcatctgcacctgtggtcagtgccccaacctccatgttgttcaggggtcaactgctcactcaatctgcagctgcatctctctgaaacaggatcttggcaggtggctgcaagtaaaggaatccagaaaataacatctcaaactatgctgcattggtatgatgattatgtaaagccaaaggcatttagaaagcagcaaatgcacaagaagtcttttcctaaatatcccttatctgcctaaaagcaaattctccagaagaaaaacaattgtcaaggaaattcttcctgggaaattttatatcagggaagattaacacaaaacatgaatcaaaaatagaagagactgcaagttgatgctttatccaggcaggctattgcctgttcttttgaggatgcatttcttttttcatctattctctccaggttgcctacacttcccaattccctcttccctagaaaggaaatatgaacaactggatctcattgagttatctgggtaatcaccccactatgatatcccaccgcactctaagtgaattttgtttgccttttctcttattcattattcttttgtcggttcattttcagcaaacatttagaggacaaatggaactttcttcctttcttccaatataagcaagttcccttaaaattcaggctgcttacaaagcagcagaaatgtttgtgcatgggctgcagcactgtgattttgctcccctagtcaggcatcagtaaaattttgtggagcccgaggctgcagcccactgatgctgatgtggttacatccacttcccctgctactgagtcaggctgggacgttcagggtacattagagatatgagatataatgaatgcaaatccatgtccagtttcatctggatccaactgatttctccatgtacatagacaattgcttgataagagattgagtatgtttttcctaaaggtgttaacagggaggctggtgtctgggtcaggatgatgtccccatgcactgataaaaagtataagaagaaagtgtcattgatggtgcatggcagggacatgctccgtgcagtggccaccctcactaagacagatgaactttgggaaataatacccaatggcagaaaagaaggtagactatgaaggtacccaaaacaagaataaggtgcacctcatttagtctctgggtattaaagagacctgcagttcttgatagtggtggatctgtgagtgctgcatgcatggagacaacacggtatcatctttgtatatctgtaataaattgcttgatctaatactagtaagaacaaaggcataacaccattacctaatacttacaaatatatagcatcatgccgatacattttatttttaattttttttagaaaggaacaatgttaaactcacagaaatgttgcaggtatagcacaattacccccttccctacccggaatcttatgagagtcttttgaagacttgagaatcctaccatctaacattttactatgtgtttcctacaaacaagaatattctcctaaataatcctgatacaccaatgaaatacattactctatcggctcctgaggaatatttaaaattctcaaaaaaatacctaaaaattgtttctcataataaaatagtccccagtagaaacacattctctgcagacaaatttgtgctaccctggtcttacctgggacacctggggacactgagctggtgctgagttactgagatgagccagctctgcagctgtgcccagcctgccccatcccctgctcatttgcatgttcccagagcacaacctcctgccctgaagccttattaataggctggtcacactttgtgcaggagtcagacccagtcaggacacagcatggacatgagggtccccgctcagctcctggggctcctgctgctctggctcccaggtaaggaaggagaacactaggaatttactcagcccagtgtgctcagtactgcctggttattcagggaagtcttcctataatatgatcaatagtatgaatatttgtgtttctatttccaat

SEQ ID NO: 23928 - DNA, 2300 bp, Homo sapien
aggagatgctctgcagaatgcaaatttcccccataacaggcagctttgcagggccacttcagaatacatcaaaaaaaatatttttagggtacaatatttagattttcttcagggcctattatctgtcatgttggagtatggtatcttattgctacaaagcatttgatttgtcagtctaaagatctctgttgtaatgataacactggtcagttttgtctgaactccaaagggaggagagtataatgagttacatctaaacccacctgccagtcatggcctaacctagtttttcagatttctttgacgttctctctgccaaaagagaagcccattgagtaggttggtggcttacaacttgattttttgttttaacacacagaaaaaaaatcacagcgtaaattcaatctaagatacattggtaaaaaaaaaaaaattaggtgcttcctgaatatttgtacatatcaaagaaagagaaatggtaagatttcagatgagaaatacccctcatacaaaagattaatgacttttcttttttactctctcagtttggatccaccagcaataaggattcctgttaggtagcaaatttatactgggaggaaaggaggaaagtgagggagggaacagaaaatgaatggtaaaagacacatcaacaacctacctgactcaggataactgaagatcaaccacatggtctgctttctccgctttcaagatgatgcctggagcgttgagttcttcaaaggaaggaaggccatgtcttaacatgtcagaggagcaggagagagatctcagccctgtaattcctgtttatagtggcattaatgtattccgctagagggctccagcctcatgacctaaacacatcccaataggccccacctggcaaaaaccattacactgagaattaactttacaatagatggattctggaggacacagtcaaaccatagcactttcctaagagatacacattccaggccatctggccagcaatgcatccaggcagagttctctgcccaagatcataaagaacataagacatatatatggtcattggaaatgagtagaggtacagcaaaggggaaagccctagattacagatggggactgctacgttcatcatggtacagttaacccttgaataacttgggtttgaaatttgcagatacacttatattttgttctgtgtgtgtcacctgtaagcaaatgcttaataagtagtaaatatattttctctattttatggtttccttaataacatttttttctttagcatactttattggaataatagagtatataatatatataacattaaaaaacatgttaatcaactatttattttattgctaaggcttccaatcaaaagcaatctattagtacttaagttagggatgcaaaaattctacacaggtgcagcccatttagtctctgggtattaaaaagacctgtagctcttgataatggtggggctgttagtgccacatgcattgaagaagcacggcatcatctttgtgtatctgtagtaaattgtttgatcttatactggtaagaacaatggcataacaccattacctaatacttacaaatatatatagcatcatgtcaataaattttatttttaattttttagaaaggaacaatgttaaactcacagaaatgtttcaagtatagcacaattacccccttccctaaatggaatcttataacagtcttttgaagacctgagaatcgtaccatctaatatgtactgtgtttcctacaaacaagaatattctccaaaataatccccatacaccaatgaaatatattaccccattgactctcgaggaatattgtcaaaaaatatctttaaaatgtttctcataacaaaatagtccccagtagaaacacattctctgcagacaaatttgtgctaccctggtcttacctgggacacctggggacactgagccggtgctgagttactgagatgagccagccctgcagctgtgcccagcctgccccttcccctgctcatttgcatgttcccagagcacagtctcctgacctgaagacttattaacaggctgatcacaccctgtgcaggagtcagacccactcaggacacagcatggacatgagggtccccgctcagctcctggggctcctgctgctctggctcccaggtaaggatggagaacactggcagtttactcagcccagggtgctcagcacagcctggctattcagggaaattctcttactacatgattaattgtgtggaccatttgtttttgtgtttccaatctcaggtg

SEQ ID NO: 23929 - DNA, 2300 bp, Homo sapien
tcaggaaacattctggaaagagcaaaaggcttctaagaggtgtcagagattcctggaccaacatctgtccatctctagagggggttgtgagtatgaggaagagcagagcttgtaaatcttctccttgctttcactcccactgtatttcctaacaacggcaaccacagccacataatatcatagaacaagcatctactacttccaaggctttggtctcagtaaatcttctctacctctatcacagcatctagaaggtttgatactcatacaaatagtgctgtagctttcttttcataactggaaaagtgggcaagactcagtgtaatgcaggcattccttaagctagttatcattcagtttttagattgtcgttgcgcacatatacccagcatatgtctaatatacatgtaaaaatccatgaagcaagcgttatattagcttgtgttttctattgtattaaatttttctcttatatcgtcttctcctttttgtcattaaaaatctgttcaagtcagtctaaattaattattggatcataagtagataaaatcttttatttcataacacattgacccaatgaatatgtttctttgcaagacacaatcctcatttccaagacaacaagcctgaaaaaattatactggagcaagtctacaagaaatgatggtagcttttccttattgtcagtcctggggcaagaataacataaaagataacaaggtagaataaagattacataagaaagaaggacagcaacaggacatggggaccgtttatagggtaacatttaaataatggatgatgagaagtaatgcgttagacagggatggatgggaatgatggaaggtctgagtactttagcacagattaagatcaaatcattaggattttaagagttgtgtacagttactgaagaaaatgccttagaatttaatttgactgtggataaaacattcttggattagatttaagactattttccatgctaagtatatttataatgatgatgactgtagtgctgaatatttaaacaatgaaaacaaaattaattgccacatacataatgtcctgaatactattgtaaatgttttatcttattttctttaaactgtctacagcactgtaaggcaggtaccactattgtcacagttacacagatatggaaaccgagacacagggaagttaagttacttgattaatttcaagcaatcggcaagccatggagcatctatgtcagggctgccaggacatgtgactgtaaacagaagtttttaactcaaagagggtatgtgtctgggttaatggaaagcttcaggaccctcagaaaacattactaataagcaaatgaaaggtgtatctgggccgggcgcggtggctcatgcctgtaatcccagcactttgggaggccaaggcgggtggatcaccaggtcaggagatcgagaccatcctggctaacatggtgaaaccccgtctctactaaaaatacaaaaaattagctgggcgtggtggcaggcgcttgtaatcccaggcacttgggaggctgaggcaggagaatggcatgaacccgggaggcagagcttgcagtgagtggagatcgcaccactgccctctagcctggaagacagagcgagactccgtctcagaaaaaaaaaaaaaaaatgtctatctggaagattaagttctaacagactcttcatttccatagatccaataatgcacttagggagatgactgggcatactgaggacaggaagagagaaatgaaaacacagccttttatattgttcttaacagacttgtgccaaatatcatacgggtgtatttaggtgattgaagagaagaaaggcacaggagtgaaattatgtgagcacaagggaggagttctacactcagactgagccaacagacttttctggcctgacaaccagggaggcacaggacgctcagtgcagagaggaagaagcaggtggtctctgcagctggaagctcagctcccacccagctgctttgcatgtccctcccagctgccctaccttccagagcccatatcaatgcctgggtcagagccctgggaaggaactgctcagttaggacccagacggaaccatggaagccccagctcagcttctcttcctcctgctactctggctcccaggtgaggggaacatgaggtggttttgcacatcagtgaaaactcctgccacctctgctcagcaagaaatataattaaaattcaatgtagatcaacaattttggctctactcaaagacagctggtttgatctagattacatgagtgca

SEQ ID NO: 23930 - DNA, 2300 bp, Homo sapien
agggcatcataatgttctacacacatggggatatgtgggggcagccatgttgccaggcacatgtaggggcaaggaagaagaaggtaggaatagccatgttagggtggacccagtttctaatggccttcatttgcatatcaaatcttgccagcctggctctaagagccggagctttcctattagacaagaaacatgtctggagttgctttaaaagaaacaaaatcttaccaaggatgccttttcctctctatctgcctaaaataatttcttaataactcctataaaacttgggttccagagacaaggacctggatatcttttggggtggggacattattcattccaccaaaaattaatatattctccaaaattgtccttctttaaagtaaaatttaaaaaataacaaagcatttttatgaagcaagagggcggtacaaaatctgagacttagagtctgacttataaatcctctaacttgtgagttttagctgttggggtatgctcactccactcctttatctcactcctttatctgcttaaaagcagcttctccagaaggaaactgattgtcaagaaaattcttcctgggaaattttatatcagggaagattaacacaaaataggaatcaaaaatagaagagattagaagttgatgctttatccagacaggctattacctgttcttttgaggatgcacttctatcctcatctattctctccaggttgcctacacttcccaattacctcttcgctagaaaggaagtatgaacaactggatctcattgagttatctgagtaatcacaccgctatgatatcccactgcactttaagtgaattttgcttgccttttctcttattagtctttcttttgtcagttcattttcagcaaacatttagaggacaaatggagctttcttcccttctcccaatataagcaagttcccttaaaattcaggtggcttacaaagcagcaggaaggtttgtgcatgggctacagcactgtgatttgtctcccctagtcaggcatcagtaaaattttgtggagtcctaggctgcagcccactgatgctgatgtagttggatccacgtcccctgctactaagccaggctgggacatttttggcacagtagagatgtgagatataatgactgcaaatccatgtccagtttcatctggatccagctgatttctccatgtaagttggcaattgcttgataagggattgtctctttcctaaagatgttaacagggaggatggtgtctgggtcaggatgatgtccctgataaaacgtaaaagaagaaagtggcattgttggtgcatgacagggacatgctccatgcagtggtcaccctcaataagagagaagaactttggaaagtaatactcaatgacagaaaagaaggtagacaatgaaggtgcccaaaacaagaataaggtgaagtgaatttagtctctgggtattaaagagacctgtagctcttgataatggtggatgtgtgagtgctgcatgcattgaggaaactcggtatcatctctctgtatctgtagtaaattgcttgatcttatagtggtaagaacaatggcataacaccattacctaatacttacaaatatgtatagcatcatgtcaataaattttatttttaatatttttagaaaggaacaatgttaaaactcacagaaatgttgaagtataggacaaagtacctccttccctaacccgaatcatatgagagtcttttgaagtcctgagaatcatactgtttaacattttactatgtatttcctacaaacaagatattccaaataatccccatgtgccaatgaaatacattactccgtcgactcctgaggaatatttcaaattttcaaaaaaatacataaaaaatgtttctcataacaaactactctccagtagaaacacattcaccacagacaaatttgtgctaccctggtctttcctgggacacctggggatactgagctggtgctgagttactgagatgagccagccctgcagctgtgcccagtcagccccatcccctgctcaacctcctgccctgaagacttattaataggctggacacacttcatgcaggagtcagaccctgtcaggacacagcatagacatgagggtccccgctcagctcctggggctcctgctgctctggctcccaggtaaggaaggagaacactaggaatttactcagcccagtgtgcttggtacagcctggcccttcagggaagttctcttacaacatgattaattgtatggacatttgtttttatgtttccaa

SEQ ID NO: 23931 - DNA, 2300 bp, Homo sapien
ctgtgcaggcatgaacattattttcccttgctctagtcctttttctacaccctagtttcacataatttgagactcaaaacatttctcaggtaagattctggattgagctaacaagatttctccagaggtgtcagagatgcctgtacaatcactgatgcatctctagagggagttgtaagtatgaggaagagaagagcttgtaaatcttcaagctgcttttactcccactgtactaacaacaactactacaatcacaacatccacaacagcacaggacgagcttctacagcttccaatgcatctatctcagtaaatctcctctacctctatctcatgctgctagaatttttgagagtcatgcaagtactgctgtaccctttagttcataatttgaaaagaaggaagcctcagtgcaacataggcagtccttaaaccagtcaccctttagtttctggatcatcattatacacataaacacagcatgtatcataaatatatatatatatatgcacacacacacacacacacacacacacatatatatccatgaggcaatacttaccacagtctgtgttttctgtggtattatattttcctctttttctcttattctggttttttccttaaaaaacctccaactaacttaagcaaattaacaagcaaaaaaaaactattttaaaaagtggacaaagtatatgaccaaacacttttcaaaaaagcatattaacggccaaaaagcgtatgaaaaagtgctcaaaatcactaattattaaaaaaatgcaaatcaaaaccacagtgagataccatcttacaccagttaaaatggccattattaaaaacttaaaaatgacagatgctagtgagtttatggagaaaagagaatgcttatacactgctggtgggaatataaatcagttcagccattataaaaagcagtttggcaattttgcaaagaacttaaaacagaaatatcatttgacccagcaatctctttattggatatatactctaaggaatataaatcattttaccataaagacacatgcatgtgtatgttcatcactgcactattcctaatagcaaagacgtggaagcaacctaaatgcccatcagttgtagattggataaagaaaatgtggtacatatgcaacatggaatacttaatatacagctatgaaaaatgagatcatgtcttttgcaacactgtggatggtgctggaggccattatcctaagcaaactaacacaaagattcaagtttatgctaatcaaggctcctgtagtagaagaagaaaaaaaattgttttaaagtaatcagatttagcattgctagtcagacttttatgctgatggaccatgggaaataattcacaatgacagaaaagggggtagaatatgggggtccccaagcagagaataaaatgaatcccattaaaactcgagcattaaagagacttatagctctggacaatgcaggaactgtggatgtcatatgctttaaggaatcccaatatcatcttctttgtcaatctgcagtaaacctcttcagcttagactggtaataacattggtttagggccattacaaaatgcttttgagaacattttacttgctcatgactaagtgttcttttttacttaaaaaaagatcaatttcatgcttacaaaaatgtagtatgtatgtcacaaagtatcgctcccaactggaacaatttcacagtgtgttgaagacctgatagccccactctctaagactttattaagaattctctacaaacaaggatattctcctacttatgcccaatacggcattgaaatatattattccatctagttctcacaaccacttcgagatttgccaataaatgctcaaaaatgtacttggtaacaaaatatcctttaggaagaaacattctctgcaggcaaatctaggtgccctggtctgacctgggacactggggacactgcccctgtgctgagttactgagataagccagccacgcagctgtatccagcctgccccaccccctgccgatttgcttgttcccagagcaccaccccctgccctaaagacttcttaataggctggtcacacctgtgcaggagtcagtcccagtcaggacacagcatggacatgagggtccccgctcagctcctggggctcctgctgctctggctcccaggtaaggaaggagaacactaggaatttactcagcccagtgtgttccgtacagcctggctcttgagggaagttctcttacaacatgattaattctatggacatttgtgtttatatttccaa

SEQ ID NO: 23932 - DNA, 2300 bp, Homo sapien
atctcacaagagcaccatctagtcagagactccaaattcaactaatccaattctgagctccctgccttatggtccatctccatggtgtctgtgtgctccacccttatcaaatatatgttcaaataattattttaacctataataaaagacttaaaaaggaatttgtaaagacaatgattcaacaaatagaggctctcaaacagagacaaaactatgaaaacagacctactgggaatccgaaaaatgaaaggtacaactcaattgaaaaatgtattagatagactcaacagcaatttaacatgacgcgagagtcagtgatctgaaaaagaagtcaatagaaatgacctcatataaagaagggaaaaattataaagaagaatgaataaaacctcagacattataggtccctgtgaacaataccaacaaatttgtattaggaatcacaaaggagaagacaggaagaggctaaaaactgtgttctcatctttacgcccatgtgtaccccatgtttagctcccgcttataagtgagaacacgtggtatttggttttttgtttctgcattagttcacttaggtaaatgacctccagctgcatccaagtttctgcaggaccatgattttcttcttatttatggctgcataggattccatggtgtatctatacacagtttttttttttatccaatccacggttgatgggcacaatagacactgggaactactagaggggagacaaagggaggaagggcagaggctgaaaaaatacctatggggtacagtgctcactacctgtttaataagttcagtcataccccaaatcccagcatcatgcaaaataactttgtaacatatctgtacatgtatgctctgattttaaaataaaaattgaaaaagaaaaaaatggagaaataatgaaaaacattttttacagtgatgagacaccttaatctatacatgaaagaaactcagtgaaacccttttaggataagcacagtacaattcataactatacacattatagtaccagtgttgaaagacaaagacccagagaatttgaaatgcatcactaaaataccgacttactttatactaagaagcaatattaaaatcattggctaaattttcaccattacaaatggaggtgagaagacagtggaatgatatttttaaatactgagccacaaattctcagccacaaattctatatccagaaaaacaatcgtttaaatataaaagcaaggtagaaatattccttcatacacaaagattaattcattaatagcatatatgccttgtaagagattcaagagaaaattcttcagaataacagagaatgacagcagacagcaactcaaattgacaagaaggaaccaaggcctcaaaaaatgaaaaaagttagaaagaagctacaaaaaatgtttactttacctgatataaagattaagtccaggactaaaacaattatatgtcagaatatcatttacattgattgtgttttgagcagcagtttttgactgggaaggtgcataatgaaagcagcgagagaattggaaaccttctgcgtttctatgtggatcatgatatgaaatgatctggatcttgacattcatttgcacccttaagagttgcaccctttgcactgtgtgttttaccttagataaaataaaataaaataaaataaaataaaataaaataaaataaacaaacctagactcttttaaataaacctaaacaaagaaataagaatcatcaaatatttatgaaagatcaagcttattaaaaagaaacataaaacatgcccgagaaagtcctaaagaactagaagtctagtagaggaaacagcaggaaaatctaaatacgtcccttctgccactcaggcaacacagattttacctctattgatttccttaaaaacataaaatatatttatgtcattttgctcacaagagacgcccccaccttctccttggctctttccaccccactgcacccaccaggggatttgcatactgtcccctagggaggactttccttgtgagtctgagacgaaagctcactctaaccttgccttgactgatcaggactcctcagttcaccttctcacagtgaggctccctgctcagctcctggggctgctaatgctctgggtccctggtaagggcagaagggaaatgagggaggatgatggggtgggagggtgaactctgtggaccccgccacctcccatgtgtgtcctgtcctcgtgttagatgtgtcttgtcctccaggatggggcatgtgatgtctagatctgtgagag

SEQ ID NO: 23933 - DNA, 2300 bp, Homo sapien
attttttgtatttttagtagagacggtgtttcaccttgttagccgggatggtctcgatagctttgaattttaaacatctatttgacaagaaatttacagttccttctctctaaaataatgtaatgattctctcaggagtgagcctggtttgatgcctctctccccaacacgatagaagtgtggcacaaatctttgaaaaattcagtttccccgtggcaacaacaactacctgggactgaaaacttcttccctcgctctagtcctttcttctacacccacttccacctcatctgtgactcatacaatacttgtcaggaaagattctggaaaaagcaaagagacttccttagaggtgtcagagattcctgtaccagcatctgtccatctctagagggggttgtgagtatgaggaagagcagagcttgtcaatcttctacttgctttcactcccactgtatttcctaacaacagcaaccagagcaacagccatatcatcacaggacgaacctctcctacttccaaggcttttatttcagtaaatctgctctacctctatctcaggcagctagaagttttgatactcatacaaatactactgcagctttctgttcataattggaaaagtagacaagactcagtgtaatgcaggcattccttatgccagtcagcattcagtttttggatcatcattgcacacatatacccaccatgtgtctaatatatatgtaaaaatccatgaagcaagagtcataatagctagcatttgatattgtattgtattttcctcttatatcatcttctccttttcgtccttaaaaaaaatctgttcaagtcagtctaaattaattattggatgataagtagataaaatcttttatttgataacacattgacccaatgaatatgtttctttgcaagacatagtcctcacttccaagataacaagcctgacaaaattatactggagcaagtccacaagtaatgatggtagcttttccttattgtcagtcctggggcaaaaataagacaaaagataacaaggtagactaaagattatgtaagaaagaaggaaagcagcaggacatgggaaactttcataggataacattttgataatggatgatgagaattaatgcgttagacagagatgggcgggaatgattgaaggtctgagcattttagcacagattaagaccaaatcattaggattttaagagttgtgtacagttagtgaagaaaaagccctagaatttaatttgactgttgataaaacattcttggattagattgaagactcttttctgtgccaagtaagtatatttatgataatgatgatgactgtagtgctaaatatttaatcaataaaaacaaaaataattgccgcatacataatgtcctgagtactactgtaaatgttttatcttattttctttaaactgtctacagcactgtaaggtaggcaccagtattgtcacagttacacagatatggaaactgagacacagggaagttaagttagttggtcaatttcaagcaatcggcaagccatggagcatctatgtcagggctgccaggacatgtgactgtaaacagaagttttaactttttaactcaaagagggtatgtgtctgggttaatggaaagtttcaggaccctcagaaaacattactaacaagcaaatgaaaggtgtatctggaagattaagttctaacagactcctcatttccatcgatccaataatgcacttagggagatgactgggcatattgaggataggaagagagaaatgaaaacacagccttttatattgttcttaacaggcttgtgccaaacatcatctgggtgaatttaggtgattgaggagaagaaagacataggaatgaaattctctgagcacaagggagaagttctacactcagactgagccaacagacttttctggcctgacaaccagggtggcgcaggatgctcagtgcagagaggaagaagcaggtggtctctgcagctggaagctcagctcccacccagctgctttgcatgtccctcccagctgccctaccttccagagcccatatcaatgcctgtgtcagagccctggggaggaactgctcagttaggacccagagggaaccatggaagccccagctcagcttctcttcctcctgctactctggctcccaggtgaggggaacatgaggtggttttgcacattagtgaaaactcttgccacctctgctcagcaagaaatataattaaaattcaaagtatatcaacaattttggctctactcaaagacagtt

SEQ ID NO: 23934 - DNA, 2300 bp, Homo sapien
cacctgagagatgaggaagctggggtatgtatacacctcatcgtgtcctcactgattgtgcgctgtctctcttgttctatttcaagctgctataacagattcattgtcactatgtaattcataaggaacagaaatttattttcttacagttctggagaatgggaaattaaagatcaagacatgggcaggttaaggtctgctttctccactttcaagatgatgcctggagttagaaatgcaaaagttctacacaggttttcatctgcacccatggtcagtgcccaaacctccatgttgttcaagggtcaactgctcattcaatctgtagctgcatctctctggaacaggatcttggcaggtgggttgcaagtaaaggaatccagaaaataacatctcaaactacgctgcactggtatgatgattatgtaaaaccaaagacatttagaaagcaccaaatgcacaaaaagacttttcctaaatgtcccttatctgcataatagcagattctccagaaggaaaccaattgtcaaaaaaattcttcctgagaatttttacatcagggaatattaacacaaaagaggaatctaaaatacaagagactgaagttgatgctttatccagacaggctatgacctgttcttttgaggatgcacttctgttctcatctattctttccaggttgcctacacttctcaattccctcttccttagaaaagaaatataaacaactgtatcccattgagttatctgggtaatcaccctgctatgatattctgctgcacttcaaatgaattttgtttgtcttttctcttattaatctttcttttgtccattcattttcagcaaatatttagaggacaaatggagctttcttcctttctcccaatataagcaagttcccttaaaattcaggcagcttaaaaaacagcaggaaggtttgtgcacagcctgcagcactgtgatttggctcccctagtcaggcatcagtaaaattttgtggagtcctaggtggcagcccactgatgctgatgtagttggatccactttccctgctactgagtcaggctgggacatttttgggcacattagagatatgagatataacgagtgcaaatccctgtccagtttcatctggatccaagtgatttctccatgtacataggcaactgcttgataagagattcagtgtctctttcctaaagcagttaacagggaggctgttgcctgggtcaggatgatttccccaatcactgataaaaagtaaaagaggaaagtgtcattgatggtgcatggcagggacatgctccatgcagtggtcaccctcagtaagagagatgaactttgggaaataatactgaatggcagaaaagaaggtagactatgaaggtgcccaaaacaagaataaggtgcaacccatttagtgtctgagtactatagagacctgtcgctcttgataattgtggatctgtgactgctgcatgcatcgagaaaacacggtatcatctttgtgtatctatagtacatagtttgatctcatactggtaagaacaatggcataacaccattacctgatacttacaaatgtatgtaccatcatgtcaataaattttatttttaatttttttacataggaacaatgttaaactcacagaaatgttgcatgtatacgacaaatacccccttccctagccggaatcatataagagtcttttgaagacttgagaattgtaccgtctaacattttactatgtgtttcctacaaacaacaatattctcctaaataatccccatacaccaatgaaatacattagtccatcaactcctgaggaatatttcaaatcgtcaaaaagaaaccaaaaaatgttactcacaacaaaatagttcccagtagaaacacattctctgcagacaaatttgtgctaccctggtcttacctgggacacctggggacactgagctggtgctgagttactgagatgagccagccctgcagctgcgcccagcctgccccatcccctgctcatttgcatgttcccagagcacagtctcctgacctgaagacttattaacaggctgatcacaccctgtgcaggagtcagacccagtcaggacacagcatggacatgagggtccccgctcagctcctggggctcctgctgctctggttcccaggtaagaaaggagaacactaggattatactcggtcagtgtgctgagtactgctttactattcagggaacttctcttacagcatgattaattgtgtggacatttgtttttatgtttccaatctcaggttc

SEQ ID NO: 23935 - DNA, 2300 bp, Homo sapien
taatgtattccactagagggcaccacactcatgatctaaacacatcccaataggccccaattggcaataccattacactgagaattaactttacaacagatggattctggaggacacagtgaaaccatagcactttcctaagagatacacattccaggtcatttggtcagcaatgcatgcaggcagagttctctgcccaagactgtaaagaacataagacatgtatattgccattggaagtgagcagaggtacagcaaagagaaagccctagaatacagatagagactcctatattcatcctggtacagttaacccttgaataaattgggtttgaaatttgcagatccacttgtattttcttctgtgtgtgtcacctgtaagcaagtacttaataagtagtaaatatattttctcatttttataatttacttaattacatttttttctttagcatagtttattggaataatagagtatatgatataaataacttaaaaaagtgttaatcaactatttattttatcattaaggctagcagtcaaaagtaagctattagtacttaagttagaaatgcaaaagttctacacaggttttcatctgcacctgtggtcagtgccccaacctccacattgttcaggggtcaactgctctttcagtctgtagctgcatctctctggaacaggatcttggtaggtgagttgtaagtaaaggaatccagaaaataacatctcaaactatgctgcattcgtatgaggattacataaaaccaaaggcatttagaaagcagcaaatgcacaaaaagccttctcctaaacatcgcttatctgccaaaaagcagattctccagaaggaaaccaattgtcaaaaaacttcttcctgagaatttttatatcagggaagattaacacaaaacaggaatcaaaaatagaagagactgggaactgatgctttatccagacaggctattacctgttcttttgaagatgcacttctgttctcatctattctctccagattgcctacacttccgaattccgtcttcgctggaaaggaaatatgaactactggatcttattgagttatttgggtaatcaccctgctatgatatcctgctgcactttaaatgaattttgtttgccttttctcttattaatcttccttttgtcagtttattttcagcaaacatttagaggacaaatggagttttcttcctttctcccaatataagcaagttcccttaaaattcaggcggcttacaaagcagcaagaaggtttgtgcacgggctatggcactgtgatttggctcccctactcaggcatcagtaaaattttgtggagccctaggctgcagcccactgatgctaatatagttggatccacttcccctgctactgagctaggctgggacagttttgggcacattagatatgtgcgatataatgattgcaaatcatttccagttttgtctggatcaaactgctttctccatgtacataggcatcatctctgtggatctgtagtaaattgcttgatcttatagtggtaagaacaatggcataacaccattaccgaatactgacatgtatatatagcatcatgtcaataaattttatttttgattttttttagaaaggaacaatgttaaaatcacagaaatgttccaagtatagggcaaagtaaccccttccctaaccgggatcatatgagagtcttttggagacctgataatcataccgtctaacattttattatatatttcctacaaacaagaatattctcctaaataatccccatacaccaatgaaatacattactccatcaactcctgaggaatatttcaaattgtcaaaaaaaacctaaaaaatgtctctcataataaaatagttcccagtagaaacacattctctggagacaaatttgtgctaccctggtcttacctgggacacctggggacactgaactggtgctgagttactgagatgagccagccctgcagctgtgcccagcctgcccatcctctgctcatttgcatattcccagaacacaacctcctgccctgaagacttcttaataggctggtcacacttcttgcaggagtcagacccactcaggacacagcatggacatgagggtccccgctcagctcctggggcttctgctgctctggctcccaggtaaggaaggagaacactagcagtttactcagcccagggggctcagtacagcctggctattcagggaaattctcttactacatgattaattgtgtggaccatttgtgtttatgcttccaatctca

SEQ ID NO: 23936 - DNA, 2300 bp, Homo sapien
aagattttgttcttatttatggctgcatagtattccatggtgcatatataccacagtttctttattgaatccctggttgatgggcacaatagacattgtgctagaaggaacacaaagggagaaagggcaggggctgaaaaactacctatgggtacaatgttcactaactggttaataatttctgtcataccccaaacctcagcatcatgcaaaataactttgtaacatatctgtacatgtatggtttgattctaaaataaaaactgaaaaagaaaaaaatggagaaataatgaaaaacatttttcacaatgatgaaacacattagtctgtacatgaaagtaactcagtgaaacccttctaggataagcacaatacaattcataacaatacacattatagtaccaatgttgaaagacaaagacacagagaatttggaaggcatcactaaaatactgacttactctatactaggaagcaataataaaggtattggctaaattttcatcattactaatagaggtgggatgagagtggaatgatatatttaaatgctgggggagaaaagtcagccacaaatgctatatccagcaaaacaatcatttaaacataaaagcaaggtagaaatgttccttcatacacaaagactaattcattatagcatatgtgccttgtggaaaattcaagagaaaatccttcagaataacagggaatgagagcagacagcaattcaaattgataagaaggaatcaagccctcaaaaaatgaaagaaataagaaagaagctacaaaaaatgtttacctgatatgaagattaagtacaggaaaaaaaaacaattataatagatgtcacagtatcagttacattgattgtgttttgagcagcagttgctgactgggaaggtgcataatgaaagcagcaagagaattggaaaccttccatattttgatgtggatcatgacatgaaatgatctggattttgacattcatttgcacccttaagatttgaaccttttgcactgtgtgtttttccttaaataaaataaaataaaacaaacctaggctcttttaaataagcctgaaccaagaaataagaatcaccaaatatttatgaaagctcaaccttattaaagagaagtgtaaaacatgcctgagaaagtcctaacgaactagaaattgggtagaggaaatagcaggaaacatctaaatatgtcccttctgccactcaggaaacagattttacctctcttgatatccttaaaaacataaaatatatttatgtcattttgctcacaagagaggtccccaccttctccttggctctttccaccccactgcacccaccaggggatttgcatactgtcccctagggaagaccttcccttgtgagtctgagataaaagctcagctctaaccttgccttgactgatcaggactcctcagttcaccttcccacagtgaggctccctgctcagctcccagggctgctaatgcactgggtccctgctgagagcagaagggaaatgagggaggatgatggggtgggagggtgaactctgtgggccctgccacctcccatgtgtgttctgtcctcgtgttagatgtgtcttgtcctccaggatggggcatgtgatgtctagatctgtgagagtgaggaagattccagaaggagcaaggacatgtactttagtgaaagctgtgacacagaaagagggggatgggataggtgacttctagaggcttatttgtgctttgcaaatcttggttctttttaaacctgtatgttttgggagtattaaccaaaatcatacacaaaaaataattgagcaaaacataaataacagacagaaaattattaaaatggctcacaatgtttgtacataaccttgcacttctctcttattatttcaggatccaatggagatgctgtgtgacccagcctctactctccctgcccgtcacccctggaaagccagcctctatctcctgtagatccagtcatagcccctttcacagtaatggatacacctatttgaattgggacctacagaagccaggccagcctccacggctcctgattgatttggtttccaacagggaccctggagtcccagacaggttcagtggcagtgggtcggggacagatttcatgtttaaaataaggaggatggatgctgaggatgttggggtttattgctgccagcaaagtacacattattctcccacaatggtacagtcctgaacacaaacctccctgcttgctgtggcctagctgcccagatgtgttgtttctgtggagagc

SEQ ID NO: 23937 - DNA, 2300 bp, Homo sapien
gatcgcaccactgcactacagcctgggcgacagagcaagatactgtcaaaaaaaaaaattgtagctttgaattttaaacatctatttgacaagaaatgcatagttccttctctttaaaataatgtaatgtttctttcaagaataagcttggtttgatgcctctctccccaacatgatagaagtgtagcataaatctatgaaaaattccatttccctgtgcctacaacaactacctgggattgaaaacttcttcccttgctctagtcctttcttctacacctacttccacatcatctgtgactcaaaacaatacttgtcaggaaagatcccggaaagagcaaaaaagacttccttagaggtgtcagagattcctatgccactatctgtcatctctagaaggggttgtgagtatgaggaagagcagagcttgtaaattttctacttgctttgacttccactgtatttcctaacaacaacaaccacagcaacacccataacatcacaggacaaacttctagtacttccaaggctttagtctcagtaaatcttctctacctccatcacagcagctagaaggtttgatactcatacaaatagtactgtagctttctgttcataattggaaaaatagacaagacccaatgtaatacaggctttccttcagccagttagcgttcagtttttggatcaccattgcacacatatacccagcatatgtctaatatatatgtagaaatccgtgaagcaagagttataatagcttgtgttttctattgtattgtattttcctcttatatcatcttcttcttcgttcattaaaaaaaaaccgttcaagtaggtctaaattaattattggatcataagtagataaaatattttatttcataacacattgacccgatgaatatgtttctttgccagacatagtcctcatttccaaggtaacaagcctgaaaaaattatactggagcaagtcaacaggtaatgatggtagcttttccttattgtcctggggcaagaataagacaaaagataacagggtagaataaagattgtgtaagaaagaaggacagcaacaggacatgggaaccttttatagagtaacattttgataatggatgatgagaattaatgagttagacagggatgggtgggaatgattgaaggtgtgagtactttagcacagattaagaccaaatcattaggatttaaagagttgtgtagagttagtgaaggaaaagccttagaattaaatttggctgtggataaaacattcttggattagactgaagactcttttctgtgctaagtaagtatatttatgataatgatgatgactgtagtgctgaatatttaataaataaaaacaaaattaattgccgcatacataatgtcctgaatactattgtaaatgttttatcttattttctttaaactgtctacagcactataaggtaggtaccagtattgtcacagttacacagatatggaaaccgagacacagggaagttaagttacttgatcaatttcaagcaatcggcaagccatggagcatctatgtcagggctgccaggacatgtgactgtaaacagaagtttttcactttttaactcaaagagggtatgtggctgggttaatggaaagcttcaggaccctcagaaaacattactaacaagcaaatgaaaggtgtatctggaagattaagttttaacagactcttcatttccatcgatccaataatgcacttagggagatgactgggcatattgaggataggaagagagaagtgaaaacacagctttttatattgttcttaacaggcttgtgccaaacatcttctgggtggatttaggtgattgaggagaagaaagacacaggagcgaaattctctgagcacaagggaggagttctacactcagactgagccaacagacttttctggcctgacaaccagggcggcgcaggatgctcagtgcagagaggaagaagcaggtggtctttgcagctgaaagctcagctcccaccccagctgctttgcatgtccctcccagctgccctaccttccagagcccatatcaatgcctgggtcagagctctggggaggaactgctcagttaggacccagacggaaccatggaagccccagcgcagcttctcttcctcctgctactctggctcccaggtgaggggaatatgaggtggttttgcacatcagtgaaaactcctgccacctctgctcagcaagaaatataattaaaattcaatgtagatcaacaattttggctctacttaaagacagt

SEQ ID NO: 23938 - DNA, 2300 bp, Homo sapien
cagatccacttatattttcttctgtgtgtcacctgtgagcaagcgcttaataagtactaaatatattttctcatttttaaggttttctcaataacattttttctttagcatactttattggaagaatagagtatataatatgtataacataaaaaagggttaatcaactatttattttatcattaaggcttccagtcaaaagtaatctattactacataacttggagatgcaaaagttctacacaggttttcatctgcaccagtggtcagtgccccaacctccacgttgttgaggggacaactgctctttcagtctgtagccacatctctctggaacaggatcttggcaggtgggttgcaagtaaaggaatccagaaaataacatctcaaactgtgctgcatttgtatgatgattatataaaaccaaaggcatttagaaagcaggaaatgcacagggggcttttcctaaatatcccctacctgcctaaaagcaaattcttcagaaggaaaccaatttttaagaaaactcttcctgagaatttttatatcaaggaagattaacacaaaagaggaatcaaaaatggaagagactcaaagttgatactttacctagggaggtgattacctgttcttttgaggatgcatttctattctcatctattctctccaggttgcctacatttcccaattacctcttccctagaaaggaaacataaacacctggatctcattgagttatctgggtaatcaccttgctatgatatcctgctgcactttaagtgaattttgtttgccttttctcttattaatcttccttttgtcagtttattttcagcaaacatttagaggacaaatggagctttcttcctttcttccaatataagcaatttcccttaaaattcaggcagcttataaagcagcaggaaggtttgtgcagaggctacagcactgtgatttggctctcctagtcaggcatcagtaaaattttatggagtcctaggctgcagcccactgatgctgatgtagttggatccacttcccctcccacggaaccaggccgggacatttttgggcacattagagatatgagatataacgagtgcaaatccctgtccagtttcatctggaaccaactgatttctccatgtacctgggcagttgcttgataaaagattgagtgcctctttccaaaagatgttaacagggatcttggtgtctgggtcaggatgatgtccctgataaaaagtaaaagaagaaagtgtcacctatggtgcatggcagggacatgctccatgcagtgatcaccctcactaagagagatgaatgttgggaaataatacttaatggcagaaaagaaggtagactatgaaggtgcccaaaacaggaataaggtgcaaaacaggaataaggtgcagcccatttagtctctggatattaaagagacctagagctcttgataatggtggatctgtaattgctgcatgcattgaggaaacacggtatcaacttagtgtatctgaagtaaattgcttgatcttacagtggtaagaacaatggcataacaccattacctaacatttacaaatatatgtagcatcatgtgaataaattttatttttaatttttttttagaaaggagcaatgttaaactcacagaaatgttgcaagtatatgataagtaccaccttccctaacagaaatcacatgagagtcttttgaagacctgaaaattgtagggtctaaaattttactatgtgtttcctacaaaaaagaatattctcctaaataatccccatacaccaatgaaatacattgctccatcgactcccaaggaatatttcaaattgtcaaaaagaaaccataaaatgtttcccataacaaaatagtccccagtagaaacacattctctgcagacaaatttgagctaccttgatcttacctgggacacgtggggacactgagctggtgctgagttactgagatgcgccagctctgcagctgtgcccagcctgccccatcccctgctcatttgcatgttcccagagcacaacctcctgccctgaagccttattaataggctggtcagactgtgcaggaatcagacccagtcaggacacagcatggacatgagagtcctcgctcagctcctggggctcctgctgctctgtttcccaggtaaggatggagaacactagcagtttactcagcccagggtgctcagtactgctttactattcagggaaattctcttacaacatgattaattgtgtggacatttgtttttatgtttccaatctcag

SEQ ID NO: 23939 - DNA, 2300 bp, Homo sapien
gtgataatgtccttttgtcacttctaattttatgtatttggatactcacccttttcttctttattagtctagctagtggtctatttatctcattagctttttcaaaataaaaacaggcactggcttcattgatcttttgaatttttttgtgtgtcttatctacttcagttcaactctgattttggttatttcttgttttctgctagatttggaattggttttcccttgcttctctagttcttttagttgtgatattaggctgttaatctgaggtataactttctgatgtgggcatttagtgctataaatttccctcttaacactgcctaacctgtgtcccagagattctggtatattgtatctttgttctcattcatttcaaagaacgttttgatttctgccttaacttcattatttacccaagtcattcaggagcatgttgtttaatttccatggttttgagtgattttcttagtcttgaattctacattcattttgctgtggtccgagagaggttggcatgattttggttcttttgcacttgctgaatattgatgtatgtccgattgtgtggtcaattttagcatatgtgccatgtggtgatgagaatatgtatattctgttgttttggggtgaagagttctgcagatttatataaggtccatttgatccagggttgagtccaagtcctgaatacctttgttaattttctgcctcagaaaattaattatacagattataatctgtataatactgtcagtggggtgttgaaatctcccactattattgtgtgggaatctaagtctccttcaaagtgtctaagaactttctttatgaatctaggtgatcttgagctggcagcatatagatttagagtaactagatcttcttggtgaattgaaccctttactgttatgtaatgcccttctttgtctttttgatttttgttgacttaaagtctgtttcatctgaattagaattaaaatcctggtttttttctgttttccatttgcttggtagatttttctccatccctttatatgagtccatgggcttcattgcatgtgagatgggtctccttaaggcagcataacatttggtcttgcttctttatccagcttgccaccctgtgtcttttaagtggggcgtttagcctgttgacattcaaggttaatattgatatgttagatttgataccaccatcatgctgttagcctgttattttgccaacttgtttgtgtggttgctttataatgtcactggtctgtgtacttcagtgtgtttttatagtggctgataacggtgtttcatttccatatttagtgcttcttccagaagcttgtgttaggcaggtctggtggtaacaaatttcctgagcatttgcttgtctgaaaaggatcttatttctcctttgcttccgaagcttagtttgtccaaatatgaaattcttagttggaatttattttctttaagaatgttaaatataggcccccaatctcttctgctgagaggtcttctgttagtctgatggcttccctttgtaggtgatctgttttttctctctagctgcatatacttacaaatatatgcatcatcatgtcaatatattttatttttaattttttttagaaaggaacaatgataaacttacagaaaagttgcaagtatacaataaatacccccttccctaaccggaattatacaatagtcttttaaagaccttagaattctatcgtctaaaactttactatgtgtttcctacaaaaaaagaatatcctcctatatactccccatacgccaatgaaatatgatactccaccgactcctgaggaatatttcaaattgtcaaaaaaaatctaaaaaatgtctctcgtaacaaaatagtctccagtagaaacccattctctgcagacaaatctgtgctaccctgatcttacctgggacacctggggacactgagctgctgctgagttactgagatgagccagccctgcagctgcgcccagcctgccccatcccctgctcatttgcatgttcccagagcacagcctcctgccctgaagccttattaataggctggacacacttcatgcaggaatcagtcccactcaggacacagcatggacatgagggtccccgctcagctcctggggctcctgctgctctggttcccaggtaaggatggagaacactagcagtttactcagcccagagtgctcagtactgctttactgttcagggaaattctcttacaacatgattaattgtgtggacatttgtttttatgtttccaatctcag

SEQ ID NO: 23940 - DNA, 2300 bp, Homo sapien
aaatgacccatgggggatggtttggctctgcttttggctacccgaagtccaagattcagagacatgccgacatcggtatggcatggttcacttagggctctgcaaaacatgtagactgggggtggctaccatctagccagtggatgactattttctttcctgagactgataatggtcattccacccaatggtccaaactacatgcagtggtaatggtcatgcaggcctttctgccacctcttgctatatttttaccaactcatgggccactgccaacagtctagctatctgatcaggaaaatagcaaccgagtgactggactattaaagcatcccctctgtggagaaaaggactatggcaacagcttgccacctataagagacaaatatgtcactcagctggatgctgggtctaccatgaccacccttgagatgaacttatgccatgtttttggatgcccactgagactttgctttgaccaaggaaagttctttactgcccaaatgacgtcaatggacacactctcatgggacatgatggattttccatacaccttgttatccaaaggccaatggatctatttaatgctagaacagctgactcacacggcaactgaagagtgtacatcagggcaacctgctagtagagtggtaccccatctgactacagcaattggacattaaacactgcactgcagagcaagggaaagacggcacggaggtgcaggttgaaaaacactgagttgagtgaggaagaagttgggcaaggccagtttcctgatagagctgccactgtgaaatcccaaactcagtgtttccaatcatttttttccttttatagtgatgttcttgggggtgttgcagtttaggccaccatgataacccagacaggcctcctaactctaattggatggaatgattcccctgggtgccttctatgggttccacaggatcaagaaatatcagggtgttaatttccttctgctggtaggagggtcatctgattcctccattagggtggatgacgttatcagacatgtcaattttctacagtacttgacctgccttctagaactggacaaccgagggtgaaaggactggatcaagcaacaatggcaatgggtgcccaaagaggtagtagtctcagaacagggagagacagactgagtccctccactaactcagcccaacacctgtggatgagtaggggatgcctgagatcctggggtggatgggaggtggggcactgatctgtcaatctgctttttcttcaaggatcaggcagcagagacccagaagcttcatgtctttgtaaggctcttccaagccaacacagataatttgacaaaacactgtatctgcatcccagacctcaccctgtcacagactgaagtggttgtttcatcctactaagggtaaactataccagctatacagaataaaaagactggatagtttagaggatcacccaagaaatagttctttgcctgcatggacaaaaccatcttctgtctttagggaaatggtatcactaccctgaggatttggagcccaggtctcacttatctgtgcagttgtgaaagtcctcacacccacagtgctgaggttaattgaatgttactcttttaatttctgcaaagaatgagacagcttctggaccctcaggaaagatcactaacaagtaaatacaagtatatccggaagataaagttgtaatagactcttcctttcaacctgatccatcatgcatttagggagctgactgggcacaagttggagcagaaagagaaaaatgaaaccacagccttctattttgtttctaacagacttgtaccaaacattctgtggctcaatctaggtgatggtgagacaagaggacacaggggttaaattctgtggccgcaggggagaagttctaccctcagactgagccaacggccttttctggcctgatcacctgggcatgggctgctgagagcagaaaggggaggcagattgtctctgcagctgcaagcccagcacccgccccagctgctttgcatgtccctcccagccgccctgcagtccagagcccatatcaatgcctgggtcagagctctggagaagagctgctcagttaggacccagagggaaccatggaaaccccagcgcagcttctcttcctcctgctactctggctcccaggtgaggggaacatgggatggttttgcatgtcagtgaaaaccctctcaagtcctgttacctggcaactctgctcagtcaatacaataattaaagctcaatataaagcaataattctgg

SEQ ID NO: 23941 - DNA, 2300 bp, Homo sapien
tcagattcttggaaatcatgtctcaactgtgtgcatcctagtatggcaccaatagcatctcaacctcccactttagaagtagctcaatcaattctaaacttttccatttagtttctgaaatattctaagtgatgtgtaggactatatatttgtccaaattactcaggaacatccatccactggtgggtaccactatgttttaatagacaccagtcctctcttccttccttcacatcatcaacattccagtgttgaatggccatgatggaaatatttgacatttaagagtgagcataatttatttaatcagtattctctattggagagcaggctttaagtagaactgaattctgaaaaaaataaataagtagaaagagaatcagatagtgtctgagttctttcatgcaactataacaaactcacagactgggaaatttataaacaataaatatttatttctcacagttctggagttcagaactctaggatcaagatgctaacagattcagtgtcggtgaagctgtctggtggagccagaaaaggcaaaggagacaaattgaatcttgcgtctgcacatggcaacagagatggaagggccaggcagctctctgaaatcttctatataaggccattaatcccatttattgagggcagagcccatgacttaatcacttcccaaggggctctaccttttaatatcaacttaggctttaaattccaacattaagtttggaacatcacaaacatctaaaccatagcagatgggactagacaactcctaacaaagtcagcacataaccatataggaagagtgacaaaagcagctgccttggttacctttgaccaagactttcttacaaaaagggttccttagcaatattcatttatcaacaccagtgatgacatgttgatactgtgtaactcttgataggatgtactgaagacacatccctgctgtaatattcttgccaaaaatgaaaaatctgactttaatcaatagaaaataccaaacaatagaacttaagggacattctgaaaaataaccagccagcatacatcaaaagtttcaaggtatttcaaaacaaagactaaaaaactgtcagagattgaaggaaattaagaaagcatgaaaactgaatgcaatatgggatccagaaattttatcctaaaacattaaaagtaaaaatggtaaatacatgtatcagtggaaagctcagtgaaattcaaatgtagattgtaacttcattaataatagtggattaaccattaatgttaaagctatttgaagtactagaaaaatcagtttaaaatgattttatattcagcaaaactatccttaaagaaaagaaaagaagccgtgactagcatatatctcctataagaaactcaagaagaaatccttcagaattcagaatcacagtaaacgacaatgaacagtaatttaaatccatgaaattaaatgaaagcttcataaatatacttacctcaattcatatgttgttgatgttcacgaaaactgaatctttgtgatagatatcagagttgcagttcccttggtaggttagaggcagaagctattgactagaaaggtgaatgaaggcagcatgtggagaatttcaaatcattcatatttgtatctgggtagtgaatgtgagtactttatttggctgagcagcgaacatgtttgcactttactcagggcacaatttattttgatttataaaattaacagcaaaccaagaccctttcaacacacatgaagaaaaaaataagaagcaccaaatatttacagaaactcagccgtattaaagagaagtgtaataagcactgggaaaatactaggaagtaaaaaaattgacagtaaacacagtaaacatagaaatatatcctgtcccaatcaggctgcatagattgttatttctgccagttttttctcaagcatacaaaatatgttgttcataggaaaggcccccatacccctgcacatatcatgttatttctacaccactgcacccaccaggggatttgcatattgtcccccagggaggaccttcccttgcaagtctgagataaaagctcagcaccaaccttgacttaactaattaggactcctcaggtcaccttctcacaatgaggctccttgctcagcttctggggctgctaatgctctgggtccctggtgaggacagaagagagatgagggaggagaatggggtgggagggtgaactctgggggccccattgcctcccatgtgtgttctgtcctcatgttagatgtgtacgtcttgtactccaggatg

SEQ ID NO: 23942 - DNA, 2300 bp, Homo sapien
atatttctttgtcgataaagagtcaaactctctaaaatatttgaagagatttattctgagccaaatgagtgaccgtggcccccaacacaaccctcaggaggtcctgagaacatgtacccaaggtggttggggcgcagcttggttttatacattttagagaggcatgagacgtcaatcaaacacatttaagaaatacattggtttgatccagaaaggcgggacaactcaaagcaggggtgaggatcgggagtggggaagcgggggagggtccaggctctaactagcatttccttgttgacaattggttgagtttgtctaaagacctgggatcaatagaaaataaatgttcaggttaagataaaagactgtggaagaccaaggttcttttgaagtcatatagtggctgcctttagagacgatagattacaaatatttcctattcagatctttaaaatgtgctacactcttctttaagattgggagagcctggaagaaaaagatctagctatgttaatagagattctttacagatgcaaatttttccccacaaaggacagctttgcaaggccatttcaagatagggcaaagaaacatgttttggggtaaaatattttaattttctgccttgttgcataatgttacaccacagtcaggttggaaagtaagtccagggatatgtagggttaaataaaacccatctgatgagaatttatagtttgtagggcatgactccccagactccttagataggaactgagacaaggaaaaaaaaaatcagagcttagtccttaccttgataaacacaaatgaaaagaaattattacttgtagacattcaataaattatctgaaatcaatttaagaaaacattgttcagaatcacatgaaattatagaggacagtaatttgaatccacaagcagaaataaaggcctcgaaatagtaaagaactgggaaaaaaatagacacaatgataaaaaaaagtttacttcaatttctatgatattcactaccaagtacaaacaaactatcgtggtagatgtcagaaagacagttactttggttgggatggggaggcagttattgaatgggaaggtgtacgagagaatcatccagaaattttgaaacattctatagtttcagctggatagtgaatatacataaaactttattcattccacatttaggatttctgccctttatatgtggtttatttcaatgaaaaaaaaatagaaaagccaagcctagattcttttaaagaaaattggaggcaagaaaaaagaatcagccaatatttatggaaactcaactttattaaagacaagtgcaaaatgtgcctggaaaagtgctaaagaactgttgaaaaacaggtggaaagaaaaggaaatattataatatgtctcttctccaactgaagcaacacagattttatcttggttagttttccttgaaacacgcaggatattttatgtccccttgcccacaagagaagccctcatcctcctgttgttgcgcttagcatcactgcacccaccgggggatttgcatattgtcctctagggaggaccttcccttgtgggtctgagataaaagctcagctctaacccttaccttgactgatcaggactcctcagttcaccttctcactatgaggctccctgctcagctcttggggctgctaatgctctgggtccctggtaaggacagaaggagatgagggaggagaatggggtgggaaggtaagcctgggggtcccactgccttccatgtgtgttctgccctgcccatgtgttagatgtacaggtcttgttctccaggatggggaatgtgaggtttaaatctgtgagagtgaggacaattcaaaaagaagcaaggacctgtgtgatctggtgaagattgtcacacagagaaagggaggtggtgtaggtgatttctagaatcccctttgcggcttgcaaatttggaatatgtttagtgtataaatacaaacaacaaaaaattatatagcctgaaataaaaaatgaaaatttatgataaatgacacatgatatttgtacatatccttccacttctttctatttattttaggatccagtgcagagattgtgatgacccagactccactctccttgtctatcacccctggagagcaggcctccatgtcctgcaggtctagtcagagcctcctgcatagtgatggatacacctatttgtattggtttctgcagaaagccaggccagtctccacagctcctgatctatgaagtttccaaccggttctctggagtgccagataggttca

SEQ ID NO: 23943 - DNA, 2300 bp, Homo sapien
atagtgagagtgggttacttataaaaacaagtttgaccccttcttgctcttactcactctgtcttgcctttccaccatggagatgcagccagaaggaccttaccagataactgcaccttggtattggactttcccacctccagaactgtgagaaatagatttctaactgaaaagataaatcacccagtttcaaatattctgttataacagcacagactgaaacaaatatgttactgtcattatttattttcagagtcaacattcccctattttgtccaaggggagccccattcaagctagttcctaatacctttttctcttaccccatcattttctgagcacttccttagtttctgacacaagaagtgcaggcttatcttatattttttctgctctaaacctgatatcagatatttttccagtaattattctttttaatagagattgatattcaataaaacaagatttgagcactcaaggtgtttattgagacttgtgtgttactgcttctaggaaaaattacctgtctatctgcatatgttttaatctatatccgtataaaactatccaaaaaattaatgaatctacattaatgtctctaattacaatccaaatctacagtttctccttttttatatttgtagcttttttccaaactgagaatcttggctgtaattattcataccatatttacttaaatgatcaaacattttgtgtgacaccaatctcccactgtccctgtcacctaaactttccttgtggacaacttccctcttatgcctcacacaccttcattagtcttgatactccgtgccagtccaccatgaactttgcatctctgcatagctgccctttcccccccgggctctgacattagcaacagtgtcctccacccttgtgactgtcctgctcatcctcatccagctgtgatgtcctgcataagtgggaggaggggtcttgcatcctgcacacccaggtagggatacttgtctctgctaactatagcttcaacgcccaggtgggctttcctctacaccccacaacacgggtgcactttctatactgtgtaggctcagtatctcatacaattccctggctttttgttgcatagttttctttctgaacctgctcggatcaagtgccctaaacccagtcactaagaactgttttctcttaggagctggaagagattggtgatttggaaatatgcaggtataagaaacagagtagtcacagggatagagggtgacaacttggtttagaggacacctcagcttctgaaggggaatggcttggataagagaaataaaaggcataaataaaattcagggagcacagggaaatatctagcatgagactgtaggatggcatacagagctagaatatagctgagaactttcagaagtaaagggagaaaatttatcatgttggctggcccagctgaaagaggtaggaaagaacattcagatatggaggataacaattatgtgtctggagatgggagattagctatgccagatagccagtggcaggacccttccttgctgtggcactattttcaagtattaggttttttttaagttttttatttcttttttaatgagcaaatctatctatctatctatctatctatctatctatctatctatctatcattcatgattataccttaatgcatccattgttggtagcactgacaatttacagcactggtggttccagggaattggaccaaaaaggaagtctctctgaccttaatagtactcatctgtatcaaatgcaggaaacttctaaaatgtcttgagtttctagagatgtttttccctagcagaccttgtcataaatagaaagctagcaagagaagcatgtcatgaaacatgaagagagcaaaagaacactccacatataggacagtaggctgattctgtcctgtagcctgcagggagaaacacatgctctgcagactttggacacctgggaggcactgggcctgtgcagtgttattgagataagacatctttgcagctgtgcagatttgcatgtcccacagagcaacgcctactgccctgaacatttatcaataggctggtgacatcctgtgcagaagtctctctcagtcaggacacagcatggacatgagggtccctgctcagctcctgggactcctgctgctctggctcccaggtaaggagggaaacaacaaaaattttattcagccagtgtagccactaatgcctggcacttcaggaaattcttcttagaacattactaatcatgtggatatgtgtttttatgttcct

SEQ ID NO: 23944 - DNA, 2300 bp, Homo sapien
atttaagtacataggtagtatagggtagcttcaaaacttttttttgcaccaaataatttttataagattttacattttctgaatacgtaagggcaacagattctgaagtaaattaccaaatacaatggcagactccttaaagctttgttgttaattttcatagcgaatagcaatactctctgaaattcaaaaatattaaagaatattttgtaaaaataacatattcttgaattgccttgcaaaagaaagcacgaaagattttttatcatttgtcattttctctcaattcaagcatccatattagatggtagatagaactgatccttcatttaacatactttcagagtaatcctttaaaaccagacataatgcattcaatagtgttcttttttgttagtatgttaagtttagtttgcatttattattttttctttccacctaccaatatttctgaatcctttcactagcatgattaattaagagtctgaaattttcaagactaagaacctgcattgaattggtcaacatcatgggataaaaaagttaaatacacaaaacttacaaaattaaataaaagaaaataataaatattttaaagactggaatataagacttttattgtactcctacctcctcatgataatttgtggtcatcaactcagaatattaacatggagttcgacatttaagatcatttttactcaattactttttccaatcttgttaaaaagtcttattttggtagatttcccaaaagatatgcagaccaagctttcttgtgggatcatacttagaactgcatttgtttgtgttttttaccaagtaagcatgactttgggttaaattacccgagattacatagtactgcaatctattacgttggctctccccagatgttttctctccaggacagtgcgtgtccttgtgaagggatctgatgtaggcacaatctttcaagagctgttcaactcaatcttgagcatatcattgacaaacaaatagttggattgtttccctgttttcatgatcagctgtgtggtagattgacatctctgagctgtgatcgtctttacatgaaagctcaggaaaatgccagtcatgggtaatggtgaccatgagacagtaaagctgtggatccagttcgtgctcttcttacatagagaatttccactcgaattgtgaactcatggctgtggctgcaccacttacaggcccaggggacactcagatctcacttggtagttgacgaaaaactggaagtcctgataggacctcattccacatgatgaggaagactgtgggaagagcttttgttaacaccattcagaaaaacatagtgcaaagttagtttttgttctttctatataattatcctagaaaagtcttcccttaataaatccttctggttaatctggcatatgtgagatgattatgatgggatatataccagattgaacaattggtcaccaggaattttatattcactgcctgaggaataaattgtttcccactttcctcttacctgcactgggctcttgaatctaaatatagagacccacattattttccctatgaggcccttggacagagcgctcttatggggctcactcaccaggtgccaggggagggtagattccaacacttgctatgaacattcttgaacagttatcctggaaaccgcagataccagaccactcttgaactggctcaagactatgttttatttgtaggctgtctgctcatcagtgcttgtaggaaagggtaacgtttccttttttagattagctgggagggagccaagaagaatggcattcatccatattcattctagacatatctctacattgttagggttgttatgctttcctagagttgcatatcctatacaatgggacctacccaagatccaaactgtcacagtcagatccttcctcccattttatatcacattgctcacaggagagacatatcccctgcccgcctgccccattgactctttccacaccactgcatgcaccaggggatttgcatattgtcccacagggaggaccttcccttgtgagtctgagataaaagctcagctgtaactgtgccttgactgatcaggactcctcagttcaccttctcacaatgaggctccctgctcagctcctggggctgctaatgctctgggtctctggtaagaaaagaaggagatgaggaaggagaatagggtgggagggtgagctctagggctccacagcatcccatgatcccatgtttagtcttaccctgtgttagaggagtataatctgtgctgt

SEQ ID NO: 23945 - DNA, 2300 bp, Homo sapien
tgagatgcaataaaccccacccggatgagtccttcctcattcgactgatcatggtccagattcgagaaatacagaggccgctccacaattgaatcaaatagaggctgttcttctacctttttaactgtgtccagcatggagcgaccagctttgtctgctgttgtgaagcctctgtgtactctatttaaaccttcaggagagaggggttcctctttagaattaagaatattattctctaagtttaataatgtagggtaatttcaaggcctttagtatagggtaatttcagagcctttttatgattgaaacaattttttacaaggttttacattttcagatatgtaatgacaagagattatgagataaaacaaccaatcccaatcgtaaactttttaaagctctgtcattaattttcaaaggaaacagcagtactctctgaaattcagcaccttaaagaatactttgtaaaactaagattttgaagaattgactaatagtaaaagcaagcctgacagatttattactgttattcgttttcccacaatgcaagtttctatataggatagtgggtggaactgattattcagttaacaccttttcagactaatccgtttataccagtgataagatgtaccttaatgttctcttttagattgtgtctttacttttatttttcttttcagcatctgatgtttctgactcttttaactattatgatgaattaggagtttgacatttccaaggctaagaaccatatttgacctgctcagcatcacaagaaaaaagaagtcaatgccaggcaccgtggctcactcctgtaatcccagcactttcagaggccaaggcaggtggatcgcttgaggccaggagttcgagacaagcctggccgacatgtggaaacctcgtctctactaaaaatacagaaattagttgggcatggtggagaatgcctgtagtcccatctactccaaagacatgagaactgcttgaacccaggaggcagaggttgctgtgagcagagattgcaccactacactccagcctgagtaacagacagagactgtctcaagaaaaaaaaaaagtgaaacacataagatttacaaaaagtgatgaaagaatagaataaataaaaatttaaatagtgaaatatgatacatttattctaatcctacttccacactacaatttgatattctcaatttaggttactgccatgacgttcaacgttttaaggtcaatatcatttttactcaatttttttcaccaactttgttaaaacatcatatgccagtgcatttcccggaagataatcaggacaagctttgtgtgcaaaacacctagagctctgttttgcttttctgggtgtgtgttctttaccaagtaaatcagatgttgtattaaatcactgaagattacatagcactagaaactattcttttaattgctcccaggatttttgttgtttttttcaggacagtggcagtctctgtgaagtgatttgatgtacgcaccgttattcaggagcagctaaattcaatattaagcacatcactgacaaatgaagaatactcaagttgttttcctattgtaacgatgagttgtgtggtagattcatatgcctgacctgtgatcatctttcaataaaaacctaggaaaatgtcgtccatagtactgctgaccctgagacttaaaaccagggatccagttcttgctcttcctacatagagaatctcattttgaactgtggtgtcatggctgtggctgtgccacatacaggccagggggagacaagggttcaccctcagagttgacaagaatttggaagccctgacatcctataaaacgttacttgcccaagattgaaactttcaaattcaggtccttcttcctcctctatgatgaattaggttttattagtttcctccaagggacactttatatcacattgctcacagagaagacatatctacccccttcaccccccacccaatggctctttccacaccactgcacccaccaggtgatttgcatattgtcccctagggaggaccttcccttgtgagcctgagataaaagctcagctctaaccttgccttgactgatcaggacttctcagttcatcttctcaccatgaggctccctgctcagctcctggggctgctaatgctctggatccctggtaaggatggaaggagatgagggaggaggagggggtgggaggctgagctctggcggccccactgattcccgtgtttattctaaccatgtgttaaaggaatatgccctatgctccagggaga

SEQ ID NO: 23946 - DNA, 2300 bp, Homo sapien
atggagtcatagaattatagagatcatccctgcacacattcttagaatgagcagatgtgacttagaaattgcatatttgagtgacagagacccaagtgggcccagtgaataaaagtgaaggaggtgtcttttatgggcacgcttcaagccacacacatatacattggcagaaagtagattattgaggtcaaggagtttgagcaacacaaatgcctaagttactggtgattaccaaactgtgcagacacaggtagggcttctggctaaaacttaaaatgaaaaaaatcagaaatatcaatcgccaaacagctagtaagggatagattctgcagcataagaccagtcaattaagaggaaattcaacaatcttagaaaaataaaacagaatgcagaattatatattatttgtgagacataaaaaatatattatcaaccggcatttttccattaaaattcctgaaaagaaagagaaaatcataaaccatattgagataaatcagtcagtggaagctgactcttgactgttcctaaatactggattttgctaagagttttaagtggttgtcacataaatgcttcaaagaatattcaaaactatgagcaaggactgaaaaaggaaaatataaagacaattactcaaagaatgagaactctcaacagagaaagggaaactatgggaaaggaacaaataggaattctagatgaaaactataaaaacagtatggaaaattcactagatagggcaacaggagtttaagttggcagaagcatcaatgagcctgaagacaatttagtagaaatgatctaatctgaaaaagaaagaaaatgactaaagaaaaataatcatgaccttagaggtttacaagtcaatgtgaagaagaccagaaatatgcaatgagtcagaaaggagaagacagagaaagtggccaaaaaaattttggagggatgacaaaagctttcaagaagcaatgaaactcattcgtctatagataaaagaaattgaaagaacttattcaggacaaacacaatgatacacataactatacatattataattaaaatgctgaaccagcgacaaggaggaaatcgcaaatgcacaaaaataaaatgactctctatatacagaaatacagtgataaagccatcagctaacttttcatcgtgcccaaaggaggctagaaaacagcggaatgacatatgtaaatgcagggaaacaaaacaaaacaaaacctaggattcaatatccagtgaaagtatgcattcaaaataaaagtaaagtaaaaacatttcttgataaacaaaaatgaagagaaataattacttaaagacatgctgtataacaatttatctaggaaattcttcagattcacaaaaaatgacagcagacagtaacttgaatctgtaaggaggaaggaaggcctcaaaagtactaagggaacaaaaaaagagctagaccaaaccaacatgtttacttccgtttatatgaggtttcgtatagggaaagccaatctatttggacagatgtcagaatgccagtttccttgattgggatggggaaacagctgtttcctgaaaggtaggtacatgagggaagaatctggagattctgcagtattctacagtttaatctcggtggagaatatatgtaaaactttattcggttgcactttttaacatttctgtcttttactttgtgtgtgttttatttaaatttttaaaaaattgaaagggccaaatctgaactcttttaaacaaaaatgaacaaaaacataagaattagtaaatatttgtggaaacatggccttattaacaagaagtataaaatgtgcctgggagagtactatgaaacaagaaatctgttagggaagacagaaggaaatacttaaatttctccaacatagacagcatagattttatgcctattcgtttccctccaaacagagaagatatttaagtcattttgctcacaagagaggctcctaccctccccttggctctttccaccccactgcacccaccaggtgatttgcatattatcccttagtgaagactttccttgtgagtctgagataaaagctcagctctacccttgccttgactgatcaggactcctcagttcaccttctcacaatgaggctccctgctcagctcctggggctgctaatgctctgggtcccaggtaagggtagaagggagatgagggaggagaatggcatggaacggtgagttctggggccccactgcctctaacaacagtgatctctgggggtctcactacactcctatgtgtgttcctttcc

SEQ ID NO: 23947 - DNA, 2300 bp, Homo sapien
ttggtctctcagacttttaccctggctgaagggttcctgaaggatttgttccacattgaactgggctgaccagcaagaaggaactatgtgcatgcagcctatttacactgggaaggaagaaggaaagtgtagcaggaaatagaagatgggtggcaaaagtctcccctaaaagccacctaactcttaggatgactgaagcttcatcccatgtggaaacatggggacaatgcctctgggctattccatctgaggggagagagctggggtatgttatcatactcctgttatcatctactgatagtgtctctcttagtctgttgtgtcttggtataacagaatgcctgaaattgtaattgataaagagcagacaattattctctcacacttctggaggatgggaagtctaagatcaaggaactgtcagattaggaatcagtttatctactttcaagatgacactatgactcccgagtcctccagaaggaaggaagtccatgtcctagcatgactgaagagcagaaaagagagagagagaaaccctactcccacaaatgggaaagagcaaggactcactctcaggagcctgcaacccccacaccccaagcatggaaagaatagaaaatcttgactctcttcaaaggaaattccaagcacctacctagccttaagacgtaagtaagtaacgtgataagcaaggaagtaaaaacagcctaaaatggccaaataagctagactcagaagatggtgggttcccctatagaaactgaaggtgacattttagtatatgtctctgaggtgtttttgaggaaacaagaccccctccaaatgaatctgccagcacacagatctcacaaaagggagaactggggactgagctctgaccatggtactttgttctaaatatcttacagaggggtctggtaaaagtcatatccataaacctgagctaattcgtctcttctgctgaacccaaatgtttaaacaaagcttttcttccttagccaattgtaaattagaaatcttgtaatccacccttgatctgtaagcccctgtttcaagatatcctgcccttttaggccaaaaccaatatgtgacctccatgtattaattttcaatttgacctgtaacttctgctttcctgaaatttactcctgccttaaaaaacccttacctgcaagccatcagtgaggccaggatttgaatcttagctgcctgattctctttacctgatgccctacaaaaaaacaaacaaacaaacaaacaaacctttactttctcctgctgcaaactcagtgtgaatatctgatctgactgagctgagtgagtggactccagttcggttccacagcacaagctctttttatagtggcatttatccactcatgagggcagagctctcatgacttcaacacttcccattaggccccacctcccaattctgttgctttgagataaatttaaaaacagatgggttttgaaggacacagtgaaaccataacactgcccaaagagagggccattcgagcccctgtggtctgctatgcatgcaggcagagctgccttctccaggttcagaaagagcaatgaggggcatagatggccattggaagtcagcagcagtacagcgaaagggaaaggcatagcctgtagacagggattgcaatcttgatatattttctatttagtttcctttctaaaaacagaataatttcatgctaacagaagtgttgtaagtacagcacaaagtgctttcttccaattaagtgcatattgtattttttaaaaaataatctccatctccatacacgaataaaatacattactccatctagtcctcaggaatatttcgaattttgacaattaactcaaaaaagttctttgtaaccaaacagtctccaggaagaaacacttatttacggacaaatctgtgatgccctggtccgacctgggacactggggacattgctcctatgctgagttactgagaagagccagccctgcagctgtgcccagcctgccctatcccctgctgatttgcatgttcgcagagcacagccccctgccctgaagacttattaataggctggtcgcaccctgtgcaggagtcagtcccaaccaggacacagcatggacatgagggtccctgctcagctcctggggctcctgctgctctggctctcaggtaaggaaggataacactaggaattttctcagccagtgtgctcagtacagcctggctcttgatggaagccttcctataatatgactaatagtatgaatatttgtgtttatgtttctaa

SEQ ID NO: 23948 - DNA, 2300 bp, Homo sapien
gggaatattaacatgcactagaagttaaatccagaaaagattggatgttgactttatccagacaggctactacctatccttttcaggacccttttcttttattttaggttatttactctcccttagttgcctatactctctacttccctctcccctataaaggatgtagaagcacctggacctcactgggttatttgggtaatccctctcgtgtgttatccccacacccccaccccgcatgttaaatacatttgtctgcctttttttcctattaatttgtcttttgtttattcattttcagcaaacctttagaaggtttgcttttctctttccccttttccctctacaaaagcaagttcccttaacattcaggtccctgaatagacagaaggagggtgtgtgcagagcttacaccacagtgatttgaccactcctagtcaggcatgagtaatactttccagaacccaggctacagcccacagacactgatgtagttgaatgctgctgctgaagcaggctgagatgtcttgggccctgttagagatgtgagatatgattgggtgcaaatccattaccagttttattaggatccaattaatttctccatatgtatggaaatttgcttgataagaggtggagactctgttctggatgtgagacaggaggctggtatgtggatcagaatgatgttcccactcactgctaaaaagtaaaagaggaaagtggcattcatagtgcaaggcagggacatgcactgagcagcagctgccctcactggtagggaggacttactgtcctgatcttttccaaagtctctccatcacctgctctccagaaatccaggattcagaggagctgtacctgagcacccaggaacatgctggtggggagttcagcattactcaggggatgcaatcttggtcttcctacttgtggagacaactgaaccctggataatttcaagtttatcctaatccagactctgataaatgcaggaagaaactagttatttaagtcaatcagatctggcatcactagtcagctcttcatgctgagaaccccggggaaataatactcaatggcagaagagagggtaaaatatagagatcaccaaaccaaaaataagatgcagcttatataatctctgggtattaaggtggcttacaggtttaaataatggtgaatctgtgagtgataccggccttgaggacttgtggtttcatttttatgcatctgtagtgaattgcgtgaccatacagtcatgtaagaatggcttaaggtcattacaaaatactttcaaatatatttagcattatcttgtaaaattgtctcttttttttaagaaggaaccatttcactctcacagaaatgttataagtatagaacaaagtaccctctcctttgcagagtatattcaagacttgatgttcccaccctctaaaactttactgagtttcctacaaataaaaatattcccctggctggacgtggtggctcatgcctgtaatcccagcactttgggaggctgaggcgagggggtcacctgaggttaggagtttgagaccagcttggccaacatggtgaaaccccatttctactactaaaaatacaaaattagcctggcatggtggtgcgtacctgtagtcccacctaccctggaggctgaggcaggagaaatcgatggtacctggcaggtggaggttgcagtgaggtgagatcgtgccactgcactccagcctaggtgacagaacgagactctgtctcaaaaaaaaaaaaccttaattaatccccatatacaaatagaaaacattacttcatcgagtactcaagagtatttcaaatattaacaattattaaaaaaaaaagttctttgttacaaaacggccccaagaggaaacatgttcttacagacaaatctgtgctaccctcctctgacttgggacactggggacacgagggactggctcagagatgagccagccccgcagctgtgcccagcctgccccaacccctgctgatttgcatgttcccagagcacagccccctgccctgaagtcttcttaacaggctggtcacaccccgtgcagcagtcagtcccagtcaggacacagcatggacatgagggtccccgctcagctcctggggctcctactgctctgggtcccaggtaaggaaggagaacactaggaatttactcagctggtgcgctcagtatagcctggctcttcagggaggtcttcttataacatgatggattgaatggatgtttgtttttatatttccaatctcaggtgccagat

SEQ ID NO: 23949 - DNA, 2300 bp, Homo sapien
ctaaattttctgaatatccctatgcatgaaaaaaaaagaattggcaagtattcagactatactttccaagaatgagggtttgtccactgttttaggttggatctttcagggacaatgatgcccatgcaggcagcatatttataatgcacagtaaacactaggaggaaacaaggcagtgagagaggaaagagagcagcgataccgaaaatgtcctcagcgagaagctaccacagaggatgaatggagatcaagcccacgtggaaacatgggaaaatgtctcagtatttttccacctaagaagggagggagatggggtatgtatacacctccctgtcctcactgattgagggctttccgagaggatgctcattccaggtgctgtgataggccatgtgtacaggcagggctgccttctccagcttcagatagagcagtgaggaaaagatatggccatggggggtcagcagaagtacagcaaagggaaaagggaaagggtagcaagagtgacaactatattcaccccccccacacacacacacacacacacgaaattgtgtattgcaatccagaactgcttctctctgaacctaaatcttagcaagcagtttaccagtaactgcccttgaaattcaggcccctggaaaggagcagggggttgtgtacaggctataccacagcagtctgcccacccttagtgatgcatgagtaatgctccctggactccccaggttctagtcttctcatgtcgatgtagttgattccacttcccttgctgcacaaccaggctgggatgcctgggcagaggcagacatgtgaggtataggggttcaaatctgtttccaagttttatccagcttcaaagcatttctccgtgtacatgagcggtggcttgacaggagatggagactctctttcctggatgtgaggcaaggaggcaggcgtctgagtcaggatgatgtccctactcactgctaaagagaaaagtggctttgatggtgcagggcagggaaatgcactgagtggtcgccaccctcacagaagagaaagtgttcactgacctggcctttccccagggcctctccctcccattgctttccagaaagccatgatttttgagagccacacctgaacactcacaaacattatggtgggaaaagcagatcagagcattaggcaagttgcattaccttggccttcttcctttggagacaattgatgtggggttctagattgacccagagtttcaagtttatcctgattcaggcttcaacagctggaggaagaaacagagatgttttttgaagtaaacagatctagcattactaatcaacccttcatactgatgacctatgggaaataatacccaagggcagaaaaatgggcagaataaggggagccccaaaccaagacgaagctgctgcccattgagaccctgggtattacagagacctatagctctggataatggaagatctatgagtggcacaggcgctgaggaatcacagcatcattatcgtgcatctgcagggaattgcttgtaaatatactggtaattacaaatgtttaaggtcactacaaatactttggagtgtattaaatatgcttctgataaagactgtttttctcacatgaaacaatgggaaccatgtgacaatcacagaggtgttgttactatagcaaaagggattgttactctccacatccctttaagtaacttgaaggcctgatagacccaccctctaagacttcattagacattccctacgaatggttatactctcctgtatactcccaatacaactctaaaatatattattccatatagtccttaggtttgtattaaagtttgacttttttccttcaaaatatctcttgtcacaacagcggctctagagagaaatacattccctccaggcaaatctatgctgcgctggtctgacctgggaccctggggacattgcccctgtgctgagttactaagatgagccagccctgcagctgtgctcagcctgccccatgccctgctgattgatttgcatgttccagagcacagccccctgccctgaagacttttttatgggctggtcgcaccctgtgcaggagtcagtctcagtcaggacacagcatggacatgagggtccccgctcagctcctggggctcctgctactctggctccgaggtaaggatggagaacactaggaatttactcagccagtgtgctcagtactgactggaacttcagggaagttctctgataacatgattaatagtaagaatatttgtttttatgtttccaatc

SEQ ID NO: 23950 - DNA, 449 bp, Homo sapien
gaattcaggtttgtcttatgaataatcaggattcacctccagggaacgatgaccagtgctctgattaagaacttgaaaaaaaagagttcccttgtggctaataaataatgggtctattttagaaagtctacttttcatgatataaatcaaaactttaaaaatgtaactgtaaatttatatcacaagagaaattatgaaagttgctcataatgtatctatataaacttgcacttctctgttattatttcaggatccagtgaggatattgtgatgacccagactccactctccctgcccgtcacccctggagagccggcctccatctcctgcaggtctagtcagagcctcttggatagtgatgatggaaacacctatttggactggtacctgcagaagccagggcagtctccacagctcctgatctatacgctttcctatcgggcctctgg

SEQ ID NO: 23951 - DNA, 2300 bp, Homo sapien
gcagatgtgacttagaaattgcgtatttgagtgacagagacccaagtgggcccagtgaataaaagtgaaggaggtgtcttttatgggcacgcttcaagccacacacatatacattggcagaaagtagattattgaggtcaaggagtttgagcaacacaaatgcctaagttactggtgattaccaaactgtgcagacacaggtagggcttctggctaaaacttaaaatgaaaaaaatcagaaatatcaattgccaaacagctagtaagggatagattctgcagcataagaccagtcaagctattaagaggaaattcaacaatcttagaaaaataaaacagaatgcagaattatatattatttgtgagacgtaaaaaatatattatcaaccggcatttttccattaaaattcctgaaaagaaagagaaaatcataaaccatattgagataaatcagtcagtggaagctgactcttgactgttcctaaatactggattttgctaagagttttaagtggttgtcacataaatgcttcaaagaatattcaaaactatgagcaaggactgaaaaaggaaaatataaagacaattactcaaagaatgagaactctcaacagagaaagggaaactatgggaaaggaacaaataggaattctagatgaaaactataaaaagcagtatggaaaattcactagatagggcaacaggagtttaagttggcagaagcatcaatgagcctgaagacaatttagtagaaatgatctaatctgaaaaagaaagaaaacgactaaagaaaaataatcatgaccttagaggtttacaagtcaatgtgaagaagaccagaaatatgcaatgagtcagaaacgagaagtcagaaaaagtggccaaaaaaattttggagggatgacaaaagctttcaagaagcaatgaaactcattcatctatagagaaaagaaattgaaagaacttattcaggacaaacacaatgatacacataactatacatattataattaaaatgctgaaccaatgacaaggaggaaatcgcaaatgtacaaaaataaaatgactctctatatacagaaatacagtgataaagccatcagctaacttttcatcatgaccaaaggaggctagaaaacagtggaatgacatatgtaaatgctgggaaacaaaagaaaacaaaacctaggattcaatatccagtgaaagtatgcattcaaaataaaagtaaagtaaaaacatttcttgataaacaaaaatgaagagaaataattacttaaagacatgctgtataacaaattctctaggaagttcttcagattcacaaaaaatgacagcagacagtaacttgaatctgtagggaggaaggaaggcctcaaaagtgctaagggaacaaaaaaagagctagaccaaaccaacatgtttacttccgtttatatgaggtttcatgtagggaaagccaatctatttggacagatgtcagaatgccagtttccttgattgggatggggggaacagctgtttcctgaaaggtaggtacatgagggaagaatctggagattctgcagtattctacagtttaatctcggtggagaatatatgtaaaactttattcggttgcactttttaacatttctgtcttttactttgtgtgtgttttatttaaatttttaaaaaattgaaagggccaaatctgaactcttttaaacaaaaatgaacaaaaacataagaattagtaaatatttgtggaaacatggccttattaacaagaagtataaaatgtgcctgggaaagtgctatgaaacaagaaatctgttagggaagacagaaggaaatacttaaatttctcccacatagacagcatagattatatgcctactcatttccctccaaacagagaagatatttaagtcattttgctcacaacagaggctcctaccctccccttggctctttccaccccactacacccaccaggtgatttgcatattatcccttggtgaagactttccttgtgagtctgagataaaagctcagctctaaccttgccttgactgatcaggactcctcagttcaccttctcacaatgaggctccctgctcagctcctggggctgctaatgctctgggtcccaggtaagggtagaagggagatgagggaggagaatggcatggaacggtgagttctggggccccactgcctctaacaacagtgatctctgggggtctcactacactcctatgtgtgttcctttcctgtattggacatgcacatgttgtcctccagaatggggcatgtga

SEQ ID NO: 23952 - DNA, 2300 bp, Homo sapien
tactttgtaaaactaagattttgaagaattgactaatagtaaaagcaagcttgacagatttattactgttattcgttttcccacaatgcaagtttctatataggatagtgggtggaactgattattcagttaacaccttttcagactaatccgtttataccagtgataagatgtaccttaatgttctcttttagattgtgtctttacttttatttttcttttcagcatctgatgtttctgactcttttaactattatgatgaattaggagtttgacatttccaaggctaagaaccatatttgacctgctcagcatcacaagaaaaaagaagtcaatgccaggcaccgtggctcactcctgtaatcccagcactttcagaggccaaggcaggtggatcgcttgaggccaggagttcgagacaagcctggccgacatgtggaaacctcgtctctactaaaaatacagaaattagttgggcatggtggagaatgcctgtagtcccatctactccaaagacatgagaactgcttgaacccaggaggcagaggttgctgtgagcagagattgcaccactacactccagcctgagtaacagacagagactgtctcaagaaaaaaaaaaagtgaaacacataagatttacaaaaagtgatgaaagaatagaataaataaaaatttaaatagtgaaatatgatacatttattctaatcctacttccacactacaatttgatattctcaatttaggttactgccatgacgttcaacgttttaaggtcaatatcatttttactcaatttttttcaccaactttgttaaaacatcatatgccagtgcatttcccggaagataatcaggacaagctttgtgtgcaaaacacctagagctctgttttgcttttctgggtgtgtgttctttaccaagtaaatcagatgttgtattaaatcactgaagattacatagcactagaaactattcttttaattgctcccaggatttttgttgtttttttcaggacagtggcagtctctgtgaagtgatttgatgtacgcaccgttattcaggagcagctaaattcaatattaagcacatcactgacaaatgaagaatactcaagttgttttcctattgtaacgatgagttgtgtggtagattcatatgcctgacctgtgatcatctttcaataaaaacctaggaaaatgtcgtccatagtactgctgaccctgagacttaaaaccagggatccagttcttgctcttcctacatagagaatctcattttgaactgtggtgtcatggctgtggctgtgccacatacaggccagggggagacacgggttcaccctcagagttgacaagaatttggaagccctgacatcctataaaacgttacttgcccaagattgaaactttcaaattcaggtccttcttcctcctctatgatgaattaggttttattagtttcctccaagggacactttatatcacattgctcacagagaagacatatctacccccttcaccccccacccaatggctctttccacaccactgcacccaccaggtgatttgcatattgtcccctagggaggaccttcccttgtgagcctgagataaaagctcagctctaaccttgccttgactgatcaggacttctcagttcatcttctcaccatgaggctccctgctcagctcctggggctgctaatgctctggatacctggtaaggatggaaggagatgagggaggaggagggggtgggaagctgagctctggcggccccactgattcccgtgtttattctaaccatgtgttaaaggaatatggcctatgctccagggagaggaattcatattttgccctgatgatgatttgaaaactcctaaaagcagtgctctgaataatatcttgagaaatgaaagaactcttgtgcctatttaataaagggttcatttaaagagtttgtttttatgatatgaatacaaatttgtaaaaataaaagattagccataaatcaataccataaggcaaatctcaaaagttgttcattatgctttcacataaccttgcacttctctctcataatttcaggatccagtgcagatattgtgatgacccagactccactctctctgtccgtcacccctggacagccggcctccatctcctgcaagtctagtcagagcctcctgcatagtgatggaaagacctatttgtattggtacctgcagaagccaggccagcctccacagctcctgatctatgaagtttccaaccggttctctggagtgccagataggtt

SEQ ID NO: 23953 - DNA, 2300 bp, Homo sapien
gtcttgcctttccaccatggagatgcagccagaaggaccttgccagataactgcaccttggtatttgactttcccacctccagaactgtgagaaatagatttctaactgaaaagataaattacccagtttcaaatattctgttataacagcacatactgaaacaaatatgttactatcattatttattttcagagtcaacattcccctattttgtccaaggggagccccattcaagctagctcctaataactttttctcttaccccatcattttctgagcacttccttagtttctgacacaagaaatgcaggctcatcttatattttttctgctctaaacctgagatcagatatttttccagtaattattctttttaatagagattgatattcaataaaacaagatttgagcactcaaggtgtttattgagacttgtgtgttactgcttctaggaaaaattacctgtctatctgcatatgttttaatctatatccgtataaaacactccaaaaattagtgaatctacattaatgtctctaattacaatccacatctacagtttctccttttttatatttgtagctttttttccaaactgagaatcttggctgtaattattcataccatatttacttaaatgatcaaacattttgtgtgacaccaatctcccactgtccctgtcacctaaactttccttgcggacaacttccctcttatgcctcacacaccttcattagtcttgatactccgtgccagtccaccgtgaactttgcatccctgcatagctgccctttcccccccggggctctgacattagcaacagtgtcctccacccttgtgactgtcctgctcatcctcatccagctgtgatgtcctgcataagtgggatgaggggtcttgcatcctgcacacccaggtagggatacttgtctctgctaactatagcttcaacgcacaggtaggctttcctctacaccccacaacacgggtgcactttctatattgtgtaggctcagtatctcatacaattccctggctttttgttgcatagttttctttctgaacctgctcggatcaagtgccctaaacccagtcattaagaactgttttctcttaggagctggaagagattggtgatttggaaatgtgcaggtataagaaacagagtagtcacagggatagagggtgacaacttggtttagaggacacctcagcttctgaaggggaatggcttggataagagaaataaaaggcataaataaaattcagggagcacagggaaatatctagcatgagactgtaggatggcatacagagctagaatatagctgagaactttcagaagtaaagggagaaaatttatcatgttggctggcccagctgaaagaggtaggaaagaacattcagatatggaggataacaattatgtgtctggagatgggagattagctatgccagatagccagtggcaggacccttccttgctgtggcattattttcaagtattagggtttttttaagttttttatttcttttttaatgagcaaatctatctatctatctatctatctatctatctatctatctatctatcattcatgattataccttaatgcatccattgttggtagcactgacaatttacagcactggtgtttccagggaattggaccaaaaaggaagtctctctgaccttaatagtactcatctgtatcaaatgcaggaaacttctaaaatttcttgagtttctagagatgtttttccctagcagaccttatcataaatagaaagctagcaagagaagcatgtcatgaaacatgaagagagcaaaagaacactccacacataggacagtaggctgattctttcctgtagcctgcagggagaaacacatgctctgcagactttggacacctgggaggcactgggcctgtgcagtgttattgagataagtcatctttgcagctgtgcagatttgcatgtcccacagagcaacgcctactgccctgaacatttatcaataggctggtgacatcctgtgcagaagtctctctcagtccggacacagcatggacatgagggcccccgctcagctcctgggactcctgctgctctggctcccaggtaaggagggaaacaacaaaaattttattcagccagtgtagccattaatgcctggcacttcaggaaattcttcttagaacattactaatcatgtggatatgtgtttttatgttcctaatatcagataccagatgtgacatccagatgacccagtctccatcctccctgtctgcat

SEQ ID NO: 23954 - DNA, 2300 bp, Homo sapien
gggggatggtttggctctgcttttggctacccgaagtccaagattcagagacatgccgacatcggtatggcatggttcacttagggctctgcaaaacatgcagactgggggtggctaccatctagccagtggatgactattttctttcctgagactgatgatggtcattccacccaatggtccaaactacatgcagtggtaatggtcatgcaggcctttctgccacctcttgctatatttttaccaactcatgggccactgccaacagtctagctatctgatcaggaaaatagtaaccgagtgactggactattaaagcatcccctctgtggagaaaaggactatggcaacagcttgccacctgtaagagacaaatatgtcactcagctggatgctgggactaccatgaccacccttgagatgaacttatgccatgtttttggatgcccactgagactttgctttgaccaaggaaagttctttactgcccaaatgatgtcaatggacacactctcatgggacgtgatggactttccatacaccttgttatccaaaggccaatggatctatttaatgctagaacagctgactcacacagcaactgaagagtgtacatcaggacaacctgctaatagagtggtaccccatctgaccacagcaaatggacattaaacactgcactgcagagcaagggaaagacggcacggaggtgcaggttgaaaaacactgagttgagtgaggaagaagttgggcaaggccagtttcctgatagagctgccactgtgaaatcccaaactcagggtttccaatcatttttttccttttatagtgatgttcttgggggtgttgcagtttaggccaccatgataacccagacaggcctcctaactctaattggatggaatgattcccctgggtgccttctgtgggttccacaggatcaagaaatatcagggtgttaatttccttctactggtacgggggtcatctgattcctccattagggtggatgacgttatcagacatgtcaagtttctacagtacttgacctcccttctagaactggacaaccgagggtgaaaggactgggtcaagcaacaatggcaatgggtgcccaaagaggtagtagtctcagaacagggacagacagactgagtccctccactaactcaaaccaacccctgtggatgagtaggggatccctgagatcctggggtggatgggaggtggggcactgatctgtcaatctgttttttcttcaaggatcaggcagcagagacccagaagcttcatgtctttgtaaggctcttccaagccaccacagataatttgacaaaacactgtatctgcatcccagacctcaccctgtcacggactgaagtggttgtttcatcctactaagggtaaaccataccagctatacaggataaaaagactggatagattagaggatcacccaaggaatagttctttgcctgcatggacaaaaccatcttctgtctttagggaaatggtatcactaccctgaggatttggagcccaggtatcacttatctgtgcagttgtgaaagtcctcacactcacagtgctgaggttaattgaatgttactcttttaatttctgcaaagaatgagacagcctctggaccctcaggaaagattgctaacaagtaaatacaagtatatccggaagataaagtagtaatagactcttcctttcaacctgatccatcatgcatttagggaactgactgggcacaagttggagcagaaagagaaaaatgaaaccacagccttctattttgtttctaacagacttgtaccaaacattctgtggctgaatctaagtgatggtgagacaagaggacacaggggttaaattctgtggccgcaggggagaagttctaccctcaggctgagccaacggccttttctggcctgatcacctgggcatgggctgctgagtgcagagaggggaggcagatggtctctgaagctggaagcccagcacccgcccccccagctgctttgcatgtccctcccagccgccctgcagtccagagcccatatcaatgcctgggtcagagctctggggaggaactgctcagttaggacccagagggaaccatggaaaccccagcgcagcttctcttcctcctgctactctggctcccaggtgaggggaacatgggatggttttgcatgtcagtgaaaaccctctcaagtcctgttacctggcaactctgctgaatcaatacaataattaaagctcaatataaagcaataattctggctcttctg

SEQ ID NO: 23955 - DNA, 2300 bp, Homo sapien
taattaaatctcacaagagcaccatctagtcagagactccaaattcaactaatccaattctgagctccctgccttatggtccatctccatggtgtctgtgtgctccacccttatcaaatatatgttcaaataattattttaacctataataaaagacttaaaaaggaatttgtaaagacaatgattcaacaaatagaggctctcaaaaagagacaaaactatgaaaacagacctactgggaatccgaaaaatgaaaggtacaacaactcaattgaaaaatgtattagatagactcaacagcaatttaacatgacacgagagtcagtgatctgaaaaagaagtcaatagaaatgacctcatataaagaagggaaaaattataaagaagaatgaataaaacctcagacattataggtccctgtgaacaataccaacaaatttgtattaggaatcacaaaggagaagacaggaagaggctaaaaactgtgttctcatctttacgcccatgtgtaccccatgtttagctcccgcttataagtgagaacatgtggtatttgtttttttgtttctgcattagttcacttaggaaaatgacttccagctgcatccaagtttctgcaggaccatgattttcttcttatttatggctgcataggattccatggtgtatctatacacagtttttttttttatccaatccacggttgatgggcacaatagacactgggaactactagaggggagacaaagggaggaagggcagaggctgaaaaaatacctatggggtacagtgctcactacctgtttaataagttcagtcataccccaaatcccagcatcatgcaaaataactttgtaacatatctgtacatgtatgctctgattttaaaataaaaattgaaaaagaaaaaaatggagaaataatgaaaaacatttttcacagtgatgaaacaccttaatctatacatgaaagaaactcagtgaaacccttttaggataagcacagtacaattcataactatacacattatagtaccagtgttgaaagacaaagacccagagaatttgaaatgcatcactaaaataccgacttactttatactaagaagcaatattaaaatcattggctaaattttcatcattacaaatggaggtgagaagacagtggaatgatatttttaaatactgagggagaaaagtcagccacaaattctatatccagaaaaacaatcatttaaatataaaagcaaggtagaaatattccttcatacacaaagattaattcattaatagcatatatgccttgtaagagattcaagagaaaattcttcagaataacagaaaatgacagcagacagcaactcaaattgacaagaaggaatcaaggcctcaaaaaatgaaaaaaattggaaagaagctacaaaaaatgtttactttacctgatataaagtttaagtccatgaataaaacaattataatatatgtcagaatatcatttacattgattgtgttttgagcagcagtttttgactgggaaggtgcataatgaaagcagcgagagaattggaaaccttctgtattttgatgtggatcatgacatgaaatgatctggatcttgacattcatttgcacccttaagagttgcaccctttgcactgtgtgttttaccttagataaaataaaataaaataaaataaaataaacaaacctagactcttttaaataaacctaaacaaagaaataagaatcatcaaatatttatgaaagatcaagcttattaaaaagaaacataaaacatgcccgagaaagtcctaaagaactagaagtctagtagaggaaacagcaggaaaatctaaatacgtcccttctgccactcaggcaacacagattttacctctattgatttccttaaaaacataaaatatatttatgtcgttttgctcacaagagacgcccccaccttctccttggctctttccaccccactgcacccaccaggggatttgcatactgtcccctagggaggactttccttgtgagtctgagataaaagctcagctctacccttgccttgactgatcaggactcctcagttcaccttctcacagtgaggctccctgctcagctcctggggctgctaatgctctgggtccctggtaagggcagaagggaaatgagggaggatgatggggtgggagggtgaactctgtggatcccgccacctcccatgtgtgtcctgtcctcgtgttagatgtgtcttgtcctccaggatggggcatatgatgtctagatctgtgagag

SEQ ID NO: 23956 - DNA, 2300 bp, Homo sapien
agccatgttgccaggcacatgtaggggtaaggaagaagaaggtaggaatagccatgttagggtggacccagtttctaatggccttcatttgcatatcaaatcttgccagcctggctctaagagccggagctttcctattagacaagaaacatgtctggagttgctttaaaagaaacaaaatcttaccaaggatgccttttcctctctatctgcctaaaataatttcttaataactcctataaaacttgggttccagagacgaggacctggatatcttttggggtggggacattattcattccaccaaaaattaatatattctccaaaattgtccttctttaaagtaaaatttaaaaaataacaaagtatttttatgaagcaagagagcggtacaaaatctgagacttagagtctgacttataaatcctctaacttgtgagttttagctgttggggtatgctcactccactcctttatctcactcctttatctgcttaaaagcagcttctccagaaggaaactgattgtcaagaaaattcttcctgggaaattttatatcagggaagattaacacaaaataggaatcaaaaatagaagagattagaagttgatgttttatccagacaggcctgttcttttgaggatgcacttctatcctcatctattctctccaggttgcctacacttcccaattacctcttcgctagaaaggaagtatgaaaaactggatctcattgagttatctgagtaatcacaccgttatgatatcccactgcactttaagtgaattttgcttgccttttctcttattagtctttcttttgtcagttcattttcagcaaacatttagaggacaaatggagctttcttcctttctcccaatataagcaagttcccttaaaattcaggtggcttacaaaacagcaggaaggtttgtgcttgggctacagcactgtgatttgtctcccctagtcaggcatcagtaaaattttgtggagtcctaggctgcagcccactgatgctgatgtagttggatccacgtcccctgctactaagccaggctgggacatttttggcacagtagagatgtgagacataatgagtgcaaatccatgtccaggttcatatggatccagctgatttctccatgtaagttggcaattgcttgataagggattgtctctttcctaaagatgttaacagggaggctggtgtctgggtcaggatgatgtccctgataaaacataaaagaagaaagtggcattgttggtgcatgacagggacatgctccatgcagtggtcaccctcaataagagagaagaactttggaaagtaatactcaatgacagaaaagaaggtagacaatgaaggtgcccaaaacaagaataaggtgaagtgaatttagtctctgggtattaaagagacctgtagctcttgataatggtggatgtgtgagtgctgcatgcattgaggaaactcggtatcatctctctgtatctgtagtaaattgcttgatcttatagtgataagaacaatggcataacaccattacctaatacttacaaatatgtatagcatcatgtcaataaattttatttttaatatttttagaaaggaacaatgttaaagctcacagaaatgttgcaagtataggacaaagtacctccttccctaacccgaatcatatgagagtcttttgaagtcctgagaatcatactgtttaacattttactatgtatttcctacaaacaagatattctaaataatccccatacaccaatgaaatacattactccgtcgactcctgaggaatatttcaaattttcaaaaaaatacataaaaaatgtttctcataacaaactactctccagtagaaacacattcactgcagacaaatttgtgctaccctggtctttcctgggacacctggggacactgagctggtgctgagttactgagatgagccagctctgcagctgtgcccagtcagccccatcccctgctcatttgcatgttcccagagcacaacctcctgcactgaagccttattaataggctggccacacttcatgcaggagtcagacccagtcaggacacagcatggacatgagggtccccgctcagctcctggggctcctgctgctctggctcccaggtaaggaaggagaacactatgaatttactcagccaatgtgctcagtacagcctggcccttcagggaaattctcttactacatgattaattgtatggatatttgtttttatgtttccaatctcaggtgccagatgtgtcatctgga

SEQ ID NO: 23957 - DNA, 2300 bp, Homo sapien
gatgccttttcctctctatctgcctaaaataatttcttaataactcctataaaacttgggttccagagacgaggacctggatatcttttggggtggggacattattcattccaccaaaaattaatatattctccaaaattgtccttctttaaagtaaaatttaaaaaataacaaagtatttttatgaagcaagagagcggtacaaaatctgagacttagagtctgacttataaatcctctaacttgtgagttttagctgttggggtatgctcactccactcctttatctcactcctttatctgcttaaaagcagcttctccagaaggaaactgattgtcaagaaaattcttcctgggaaattttatatcagggaagattaacacaaaataggaatcaaaaatagaagagattagaagttgatgttttatccagacaggcctgttcttttgaggatgcacttctatcctcatctattctctccaggttgcctacacttcccaattacctcttcgctagaaaggaagtatgaaaaactggatctcattgagttatctgagtaatcacaccgttatgatatcccactgcactttaagtgaattttgcttgccttttctcttattagtctttcttttgtcagttcattttcagcaaacatttagaggacaaatggagctttcttcctttctcccaatataagcaagttcccttaaaattcaggtggcttacaaaacagcaggaaggtttgtgcttgggctacagcactgtgatttgtctcccctagtcaggcatcagtaaaattttgtggagtcctaggctgcagcccactgatgctgatgtagttggatccacgtcccctgctactaagccaggctgggacatttttggcacagtagagatgtgagacataatgagtgcaaatccatgtccaggttcatatggatccagctgatttctccatgtaagttggcaattgcttgataagggattgtctctttcctaaagatgttaacagggaggctggtgtctgggtcaggatgatgtccctgataaaacataaaagaagaaagtggcattgttggtgcatgacagggacatgctccatgcagtggtcaccctcaataagagagaagaactttggaaagtaatactcaatgacagaaaagaaggtagacaatgaaggtgcccaaaacaagaataaggtgaagtgaatttagtctctgggtattaaagagacctgtagctcttgataatggtggatgtgtgagtgctgcatgcattgaggaaactcggtatcatctctctgtatctgtagtaaattgcttgatcttatagtgataagaacaatggcataacaccattacctaatacttacaaatatgtatagcatcatgtcaataaattttatttttaatatttttagaaaggaacaatgttaaagctcacagaaatgttgcaagtataggacaaagtacctccttccctaacccgaatcatatgagagtcttttgaagtcctgagaatcatactgtttaacattttactatgtatttcctacaaacaagatattctaaataatccccatacaccaatgaaatacattactccgtcgactcctgaggaatatttcaaattttcaaaaaaatacataaaaaatgtttctcataacaaactactctccagtagaaacacattcactgcagacaaatttgtgctaccctggtctttcctgggacacctggggacactgagctggtgctgagttactgagatgagccagctctgcagctgtgcccagtcagccccatcccctgctcatttgcatgttcccagagcacaacctcctgcactgaagccttattaataggctggccacacttcatgcaggagtcagacccagtcaggacacagcatggacatgagggtccccgctcagctcctggggctcctgctgctctggctcccaggtaaggaaggagaacactatgaatttactcagccaatgtgctcagtacagcctggcccttcagggaaattctcttactacatgattaattgtatggatatttgtttttatgtttccaatctcaggtgccagatgtgtcatctggatgacccagtctccatccttactctctgcatctacaggagacagagtcaccatcagttgtcggatgagtcagggcattagcagttatttagcctggtatcagcaaaaaccagggaaagcccctgagctcctgatctatgctgcatccactttgcaaagtggggtcccatcaaggttcagtggcagtggatc

SEQ ID NO: 23958 - DNA, 2300 bp, Homo sapien
gagcaaaaggcttctaagaggtgtcagagattcctggaccaacatctgtccatctctagagggggttgtgagtatgaggaagagcagagcttgtaaatcttctccttgctttcactcccactgtatttcctaacaacaaccacaaccacataatatcatagaacaagcatctactacttccaaggctttggtctcagtaaatcttctctacctctatcacagcatctagaaggtttgatactcatacaaatagtgctgtagctttcttttcataactggaaaagtgggcaagactcagtgtaatgcaggcattccttaagctacttagcattcagtttttagattatcattgcacacatatacccagcatatgtctaatatacatgtaaaaatccatgaagcaagtgttatattagcttgtgttttctattgtattaaatttttctcttatatcgtcttctcctttttgtcattaaaaatctgttcaagtcagtctaaattaattattggatcataagtagataaaatcttttatttcataacacattgacccaatgaatatgtttctttgcaagacacagtcctcatttccaagacaacaagcctgaaaaaattatactggagcaagtctacaagtaatgatggtagtttttccttattgtcagtcctggggcaagaataacataaaagataacaaggtagaataaagattacataagaaagaaggacagcaacaggacatgggaactgtttatagggtaacatttaaataatggatgatgagaagtaatgcgttagacagggatggatgggaatgattgaaggtctgagtactttagcacagattaagatcaaatcattaggattttaagagttgtgtacagttactgaagaaaatgccttagaatttaatttgactgtggataaaacattcttggattagatttaagactaatttccatggtaagtatatttataatgatgatgactgtagtgctgaacatttaaacaatgaaaacaaaattaattgccacacacataatgtcctgaatactactgtaaatgttttatcttattttctttaaactgtctacagcactgtaaggcaggtaccactattgtcacagttacacagatatggaaaccgagacacagggaagttaagttacttgattaatttcaagcaatcgggaagccatggagcatctatgtcagggctgccaggacatgtgactgtaaacagaagtttttaactcaaagagggtatgtatctgggttaatggaaagcttcaggaccctcagaaaacattactaataagcaaatgaaaggtgtatctgggccgggcgcggtggctcatgcctgtaatcccagcactttgggaggccaaggcgggtggatcaccaggtcaggagatcgagaccatcctggctaacacggtgaaaccccgtctctactaaaaatacaaaaaattagttgggcatggtggcaggcgcctgtagtcccagccactcgggaggctgaggcaggagaatggcgtgaacctgggaggcagagcttgcagtgagtggagatcgcaccactgccctctagcctggaagacagagtgagactccgtctcaaaaaaaaaaaaaaaaaaaaaaaaaaaaaaaaaaaaaaatgtgtatctggaagattaagttctaacagactcttcatttccatcgatccaataatgcacttagggagatgactgggcatattgaggacaggaagagagaaatgaaaacacagccttttatattgttcttaacagacttgtgccaaacattatacgggtgtatttaggtgattgaagagaagaaaggcacaggagtgaaattctgtgagcacaagggaggagttctacactcagactgagccaacagacttttctgacctgacaaccaaggcggcgcaggatgctcagtgcagagaggaagaagcaggtggtatctgcagctggaagcccagctcccaccccagctgctttgcatgtccctcccagctgccctaccttccagggcccatatcaatgcctgggtcagagccctggggaggaactgctcagttaggacccagatggaaccatggaagccccagcacagcttcttcttcctcctgctactctggctcccaggtgaggggaatatgaggtggttttgcacatcagtgaaaactccatcaggagttttctctgctcagcaagaaatataattaaaattcaaagtagatgaacaattttggctctactcaaagacagctggtttgatctagattacat

SEQ ID NO: 23959 - DNA, 2300 bp, Homo sapien
tttgagatgaaatggtgagtagaaatgatgagatgaaatgatgagacaaaatgacaaagttgaaaagaaattgaaaggagatgagatgaaatgagatgaaatgatgagatgatgaaatgatgagatgaaacgagatgaaatgatgagatgaaatgaaatgaaataatgaaatgatatgaaataatgaaattgaaatgagatgagatgagatgaaataatgagataaaatgagatgaaatgagatgaacgatgagatgacatgatgagatgaaatgagatgaaaaatgatgagatgaaaaatgagatgaaataatgaaatgaaataatgaaatgagatgaaatgaaatgaaataatgaaagcaaattatgaaatgtaatgaaattgaaatgaaattgaaatgagatgagttgaaatgatgagatgtaatgatgaaatgaaatgatgagatgagatgaaatgagatgaaataatgagatgaaatgagatgatgagatgagatgaaatcatgagatgaaatgatgaaatgaaatgaaatgatggatgaaatgagatgaaatgtaatgagatgaaatgaaatgaaataatgaaatgaaataatgaaatgatgaaataatgaaatgaaaatgaaatggaaatgatgagatgagaagaaatgatgagatgaaatgagatgagataaaatgagatgaaatgatgagatgaaatgaaatgagatgagatgaaatgagatgaaatatgatgagatgaaatgacataatgaaatgaaatgatgaaatggaataatgaaatggaaatgagatgagatgcaatgagttgaaatgagatgaaatgatgaaatgatgagatgagatgtgatgaaatgatgacatgaaatgatgacataaaatgagatgaaatgtaatgatgaaatgagatgaaatgatgagataagatgatatgaaatgatgagatgaatgatgagatgaaatgatgagatgagatgatgagatgaaatgatgagatgaactgatgagatgaaatgaaatgaaataatgaaatgaaattgaaataaataaattgaaatgagatgagatgaaatgatgagatgatgaaataaaatgataaaatgatgagatgtgatgagatgaaatgatgagatgagatgacatgaaataatgaaatgaaataatgaaatgaaattgaaatgagatgagaagatatgagatgaaatgaagtaatgagatgaaatgatgaagtgatgagatgaaatgatgaaatgataagatgaaaagagttgatgagatgataagacgaaatgatgagatgaaaagatgagatgaaatgaaatgatgagatgaaatgagatgaaatgaaattagacgaaatgtaatgagatgaaatgaaatgacataatgaaatgaaaaaatgaaataatgaaataaggtgaaattaaatgagatgatgaaattaaatgatgaaatgaaataatgaaatggaaatgatgagatgagatgaaatgacgagatgaatgatgagatgaaatgagatgaaatgatgagatgcaatgatgagatgaaatgatgagatgagatgagatgtaatgatgagaggaaatgatgagatgtaacgaaatgagatgaaatgaatgagatgaaataatgaaaggaaattgaattgagatatgagatgaaatgagataaaatgagatgaaataagaaatgatgaggtgaaatgatgaaatgctgaggtgagatgagatgaaatgagatgaaacaatgagatgaaatgaaaggatgagatgaaatgatgatatgaggtgagatgagatgaaatgagatgaaacgagatgaaatgatgaaatgatgagatgagacgagaagaaatgatgagatgaaatgagatgagataatgagatgaaatgaaatgaagtgaaatgaaatgaaataatgaaatgagatgagatgaaatgagataaaatgatgagatgaaatgatgagaagaaatgagatgaaatgatgagatgagatgatgagatgaaaaatgatgagatgaaaaatgatgagatgaaatgatgagatgaattgaaatgaaataatgaaataatgaaatgagatgaaatgaaaagaaatgatgaaatgatattgaaatgaaattgaaagatgagatgaaatgatgagatgaaatgatgaaatgttgaaatgaaatgattaaatgaatagatgtgacatgaaatgagctgaaatgatgagatcaaatgaaatgaaatgagattaaatgatgagatgaaaaatgatgagatgaaatgctgagatgaaatgag

SEQ ID NO: 23960 - DNA, 2300 bp, Homo sapien
attgtctctaactacattgcttccccaataggttgacccattctaactaactccttttctctttaaaaaagcaaacttcatttgtatgacttgcaattgtaaacgacaccaattggccagttatcattcaaattctctgttacttaatcctgccttttcctgacgtatgcaaatttgccctaaaaaattggacactttgttgcttactcattgtctttacacattttaaaatgttgctttaggccccaatccctaactacattttcaatgttttgcaagtggagtccatgtgttcttgatttacatgaagctcaaaataatggttatagtaactagtacttcataattaagcaaaaagctcttattgaaaaatgacagaactatacatagggatgacaacatggagagatatttcgtgagatcacaaacttatggtatagcagaagtagaacgctgagtagagactctgtgttcccaatcattatttctaccaccagctttctattttgatggtaataatgttcttatgtgggaaaccctacatatttgccaatgtttagttcattgacaaagaaatagaaagagcttcaagaacactcgaatctttaaaaaataaaatacctataattggccatacgaaataattggtacttgacatatactgagatcgttttattttgtgctagataaatgaagtcatagaacagaatgtgctttaaatattatgaatagtgcctgcgtgtgtgtgtgtgtgtgtgtgtgtgtgtgtgtctatagatgcatattaggccgctgaaaagttttattattctttccaggagagagactgccaacttttgaacctaactagaacaatatattgcttcttcatattttgattaaggcaaagagagtctagttaaaaataattcaacttgtcgtggaaatgctataaattgctgtgaagtgagttgctggctatggcttgtcagagtaaatatattgtacaaatcttaggggagaatcagtgctcgtgcattaaaatcaaatcatcttgcagcacactgagaaaaaggttagatttttaaaataatttcaaagtcatgaaaagagcaaatatgctccacaaagagcctagcaaccctcaatgaccaatgccccttttatatagtttggtatctgaattagaatcccagaatctacaaattcctctgggtgagggtgctgcattttgaggattttataacactgccatcaccaagctctcttttgatattcactttaaggagataatttacgggcaaccagagagcataaaccaaagtagatatctaactagatagctagatacatctccatatcattgacaggttacattctggccgagtgtgagtacaacctatggatgtggttggagagaacatgtgttccacctcaatggcagatcaggattattccttctcatctgctgcaatggctcaatgtgttaaggagaggagcgagacagcaagaaccgcattcattcagtcatacagaccaaaaggaggaatgtcgcccagccctctaaactgacccagaacccagctcatgtctcaactgctacctctcctacttagaaagaagtaactccaccaaagcagggttctggacaaatatatttttattgatcatatacaaatagatgaagatggacttggatgttaagaaaaataatactatacaaaatcaagagtagacagtcacccctagacttaaattaagggtgtgtacattagataatttaatccaatgtatcaggtaaaaacttgaacgaaccttttagcctcttccttaaaattcaggaaagcatgtcctccacaaaacaaaatcaaaatataaataaaagactggcttaagatgaaaggaaaccttacaaatgaaaagaagccagatgagaggcccttaactgagaatgaaaagaaattgagtggacaaaataactatgagatgaaccttcaaatcagaaagagggaaaaaagcttatttgatactatgggaactcaaaagagagtgaacaaaaatgtgaaaattccaggagtacagaaaagaagcatggctaaattaagagaatgagaaaatgtgtacaattttgagtaataagaacagaaatcaaaagtaactgttgtatgttatattttagtagaggaacactgaagaagaatgaaacaagaaataatattaaatatgaacatatggagaacagaataatatttttaaaatttttagtttctaagcttatctgaaattttaattttgttttcttatgtaataccagagttatt

SEQ ID NO: 23961 - DNA, 2300 bp, Homo sapien
gatgagacgaaatgacaaagttgaaaagaaattgaaaggagatgagatgagatgaaatgagatgaaatgatgagatgatgaaatgatgagatgaaacgagatgaaatgatgagatgaaatgaaatgaaataatgaaatgatatgaaataatgaaattgaaatgagatgagatgagatgaaataatgagataaaatgagatgaaatgagatgaacgatgagatgacatgatgagatgaaatgagatgaaaaatgatgagatgaaaaatgagatgaaatgaaataatgaaatgagatgaaatgaaatgaaataatgaaaggaaattatgaaatgtaatgaaattgaaatgaaattgaaatgagatgagttgaaatgatgagatgtaatgatgaaatgaaatgatgaaatgagatgagatgaaatgagatgaaataatgagatgaaatgagatgatgagatgagatgaaatcatgagatgaaatgatgaaattaaatgaaatgatggatgaaatgatgagatgaaatgagatgaaatgtaatgagatgaaatgaaatgacataatgagatgaaataatgaaatgagatgaaatgaaataatgaaatgatgaaataatgaaatgaaaatgaaatggaaatgatgagatgagaagaaatgatgagatgagatgagataaaatgagatgaaatgatgagatgaaatgatgagatgagatgaaatgagatgaaatatgatgaggtgaaatgacataatgaaatgatgaaatggaataatgaaatggaaatgagatgagatgcaatgagttgaaatgagatgaaatgatgaaatgatgagatgaaatgatgagatgagatgtgatgaaatgatgacatgaaatgatgacataaaatgagatgaaatgtaatgatgaaatgagatgaaatgatgagatgagataaaatgatatgaaatgatgagatgaatgatgagatgaaatgatgagatgagatgatgagatgaaatgatgagatgaactgatgagatgaaatgaaataatgaaatgaaattgaaataaataaataaaattgaaatgagatgagatgaaatgatgagatgatgaaataaaatgataaaatgatgagatgtgatgagatgaaatgatgagatgagatgacatgaaataatgaaatgaaataatgaaatgaaattgaaatgagatgagaagatacgagatgaaatgaagtgatgagatgaaatgatgaaatgataagatgagaagagttgatgagatgataagatgaaatgatgagatgaaaagatgagatgaaatgaaatgatgagatgaaatgagatgaaatgaaattagacgaaatgtaatgagatgaaatgaaatgacataatgaaatgaaaaaatgaaataatgaaatgaggtgaaattaaatgagatgatgaaattaaatgatgaaatgaaataatgaaatggaaatgatgagatgaaatgatgagatgaatgatgagatgaaatgagatgaaatgatgagatgcaatgatgagatgaaatgatgaaatgatgagatgagatgagatgtaatgatgagaggaaatgatgagatgtaatgaaatgagatgaaatgaatgagatgaaataatgaaaggaaattgaattgagatatgagatgaaatgagataaaatgagatgaaataagaaatgatgaggtgaaatgaaatgctgaggtgagatgagatgaaatgaggagatgaaacgatgagatgaaatgaaaggatgagatgaaatgatgatatgaggtgagatgagatgaaatgagatgaaacgagatgaaatgatgaaatgatgagatgagacgagaagaaatgatgagatgaaatgagatgagataaaatgagatgaaatgaaatgaagtgaaatgaaatgaaataatgaaattgaaatgagatgagatgaaatgagataaaatgatgagatgaaatgatgagaagaaatgagatgaaatgatgagatgagatgatgagatgaaaaatgatgagatgaaaaatgatgagatgaaatgatgagatgaattgaaatgaaatgaaataatgaaataatgaaatgagatgaaatgaaaagaaatgatgaaatgatattgaaatgaaattgaaagatgagatgaaatgatgagatgaaatggtgaaatgttgaaatgaaatgatgaaatgaatagatgtgacatgaaatgagctgaaatgatgagatcaaatgaaatgaaatgagattaaatgatgagatgaaaaatgatgagatgaaatgctgagatgaaatgag

SEQ ID NO: 23962 - DNA, 2300 bp, Homo sapien
aaaaggaagtcaaactatcactggttgccgacgataagatctttcaccttgaaaaccctatggactcctctagaaagcttctagaactgataaaagaattcagccaagtttccagatacaagattaatgtacacaaatcagtagctcttctatacatcagcagctaccaagcagagaatcacatcaagaactcaaccccttttacaatagctgcaaaaaaaaaaaaaaaaaaaaaaaaaaacttaggaatatacctagcaaaggaatcaaaagacctctacgatgaaaattacaaaacactgctgaaagaaatcatagttggagccaagcatgttggcacatgcctataatcccagctactcgggaagctgaggcaggagaatcgcttgaacctgggaggcagaagttgtagtgagccgagatcacaccattgcactcccacctcagcgacaagagcgaaactccctctgaagaaaaaaaaaaaagaaagaaagaaaagaaatcatagatgacacaaacagatggaaacgcatccccatgctcgtggatgggtagaaccaatattgtgaaaattaccattctgttaaaggcaatctacaaattcaatgcaatccccatctgaataccaccatcattcttcacagaattacaaaaacaattctaaaattaatatggaaccaaaagagagccatgtagcccaaccaaggctaagcaaaaagaacaaacctagaggcatcacagtacttgatttcaaactgtacaataaggccatagttaccaaaacagcatggtactggtttaaaaatacgcacatagactaatgtaacagaagagagaacccataaattaacccaaatacttacagccaactgatcttcgacaaagtaagcaaaaaataaagtggggaaaggacacccttttcaacacatgatgttgggataattggcgagccacatgtaggggaataaaactggattctcatctctcaccttatacaaaaatctactcaagatggattaaaaacttaaacctaattcctgaactataaaaattctagaagataacactggataaactcttctagacattggcataggcaaggatttcatgaccaagaacccaaatgcaaatgcaataaaaacaaagataaatagctgggacttaattaaactaaagagcttttgcatggcaaagggaacagtcagtagagtaaatagccaacagagtgggacccctgaccctgacccctaaccttaaccctaatccctaaccctaacccctaaccacaactctcaccctccccctaacccaaccctaacccctaatccctaacccccaacctctcttaacccctaactctaaatgttgactcctaacccctaactctgaccccaaccactatctccaacccctaaccctaaacttaacccctaacaccaaccttaaccctaggttcgttactacgtttgtattgactatgtcaatgttgattattatgatcgctgtcttaggactgcacggcagcgaggggattgtggatcttatattaatgtttttgtgtcgaggcagtgcattagcactacaggtgcttgttacatgagcaaggggggtgtcatattttgagtgtcatgtctgcattaggaatgctgcatttgtcttccgaggctgcggtgtggatctcgcactgtggccgcctcaccttggctggggagaacctcggtgggcaggattcagaggggcttttggtttcctgttttccacactgaacccttctaactggtctctgaccctgattattcagggctgcaaacaggaaggattttattcaccgtcgatgcggccccgagttgtcccaaagcgaggcagtgcccccaaggtccgtgctgaggagaacgctgctctgccttcacgttgtccccctggtctgtgctgagcagaacgcagctccgccctcgcggtgcccctggcccgcccgggtctgtgccaaggagaacactgctccgccctcgcgatgctctccgagtctgtgctgagcacaacgcagctccgccctcgcaaaggcacagcgcgggcgcaggcgcggggcggtgcacagcgcgggcgcaggcgccgagaggcgcacgggagacctcaggcccagactccactccccagctgtgaaagggtaagaattgagggtggctgaggctcggggttgttcagggcggggtgggctctggacccagcaggcccggcacccaggtcagggatccaggggaggccaggtggggcgaaggccaagaaggggccggggctggtca

SEQ ID NO: 23963 - DNA, 2300 bp, Homo sapien
tacactccactatagctgttactgctgccttacaacgaaggtaatttttaaagtcttctctttcttacaaaattctaagcatatgcagggcagggactctgacccaatcattgttaaactaatcaatgaatggttgaataaatgtggttactttttaaaaggaggggcaattctgattttgatagaaaagagaacatttcaaaaggtatgtgacctctgagctaggccctgagaaacaagtggagaaggagagtgaaagggcacgccagagagaggggacaagtgaagaaagatgacaactaccctgtgcactctattcaaggaggagcaagtgctcaggtgtagtggatgaggttagaaaggtaagcttcggccactctaaaaggggcctgcagcttgtacttgatcctgaccacctgtggccctcagggtgcatgccatggatctgcagatcagcatcacctgggaatttgccagcccctgctaagtcagaaaaactgcgagtaaggctcagcaacctgcaggctcacgagccctccagttgattctggtgcacattcaagtttgagtagcaacagctgtgctgctgaggtggttgctggtaagtctggagaaagcggtttctgtgcagtggtgtgagcagcagccagagtggcaggtgcaaagagatgggcactgagggaggaagacactgctctttattaaagacaacagacattaatgctagagatagaggcggccagtggctgcggcaggagaaatgtttcaagtggagagaagcaagtcagatgagagacaaggaaagaatgcagggtgagctgcatgggaagccagtggcacaggcgcctgccactcaaactgttactacccctgagtccctctgtccttaacaccccttggctccctgctctctccacatgaccattccctatttgggccctcaatgatctctttctcaggctcttataattggcctgcatatgacactccctccctctcggcctagccacagccaggggatttccctaaatggcaaatggggcatgctactgcccacggctgcccaccccacagcccgtgacagcagttctcaataaggcagctaattgcaagcaggtctctggttgccatattgatttggggaggggtatatattcaatggaataaagccattaaagatgtaaaatcgtatctgggacaactccatgcaacaaaactctgcctcgtgtcctgtgtgactttcgaatgacattcatatgggcaaaaattatgcctctgagcctagaacctactttcattttactataatcacaatacttttattttgcatggttttaatatatgccaggtcagtcaagagaggattttcctttgttttgttcagaattgtagcaagagttactcaggacttcagaaaccctgtcaggatggcagtcctgctcatggtaccaagtctgatacggtgactgtcagtgtgcatttagggacagcgttgactgtgactgtgcctcctagcatagctgtcctgagcatttacacattgaaacacattattttactatgatctactttaaaaaaaaaaactttctttatcccacaactaggacagtatagcaaattttaaagatatgattaggaatgttatattgtatatgaatttcatttccgggtaaagggaatattataaattattacaaaaatggagtatatgatctgggtacgggctaaagtcctaatttctgagtttaggatattcttatttatttagcaaactttcatctggtcctatgtgctcagcactattctaagcactttataaatattaactatttggtcctcaccaatcctatgaaataaatattattcccaattttataaagacacttgcccaaggtcacacagctggcttagtggtagagctgggattcaaacccaggccatctggtctgtccttgcttttagctattacatatgcccaccctcaccccatgctcccatgtacaaaagggacttcttgatccctgccagcttgcctgggggtgaacccctcccagaccccatgctttagtcatctcaagataagcatgctgctcccaccctccatgactatctttattcacactcttctctgagcctgaaatgctccactcctccttcccaacctcccaccctcacccctaccccattccctcctcacgccccctgccccctgccccgtgttcatgccctgtgctggctctgcctccacacctgtaatgcttttctgctctcctctgtccctaggcctgctgcctcccaca

SEQ ID NO: 23964 - DNA, 2300 bp, Homo sapien
gctcctccaggtgcctacttgggcctttgggtagacagattaacagacaggggaggctgggtcatggttggaccaccccaggaccctgaacgggggctcagctcatgaccctgagcctgggagagatgaggccatgccctccagggcactcagcatgacccggcccagtggacgggactgggtagcttccttggtgcagggggctgtcatgctaggacagggtcactgaccaggccaggcccctgccccatgacttgtggtggaaatgtccttttgtttttgttttttgcttttttttttgagacagagtttccctcttgttgcccaggctggagtgcggtggtgcaatcttgcctcactgcaacctctacctcccgggttcaagcaattctcctgcctcagctcctgagtagctgggattacaggcacctgccaccatgcctggctaattttttgtatttttagtggagatgggggtttcaccatgttgtccaggctggtctccaactcttcacctcaggtgatccacctgcctctacctcccaaagtgctgggattataggcgtgagccactgtacccggccatgtgatgggaatgttctgtgtccataatagatgctgcatattgctggcccagctcctgaggctctttggacctccaggaatcggtgtctctatcaggaacccttaaccctgacccggactcccggctgggacccggggtgttggagtggcaagagcgctgtcaggcctggtgaagggtgtgagctgtccaacagggcaaggaggaggcagggcctgttctgtagttggacagacagagccctctagctgctttctggaagactgaagggcaggcgatgttggagggagggagtgcaggcaggggctgtgagggagttcaggtcagaaacaggtggcgcctggattcaggctgtggtggtcacggtggggatgaggggctgctttggattgtgctggggatgtggggtggtgcgctgcatgactactgccaggtctctctgctcttggtgtctgcatccagggctgggagggggtcaaatgtatcacactatcggccccaggcccaccaagcctggggaggtgaccacccttccacgatggcatttggatgttccctgtgtgtggggagggcacagggactccattcctagactacctctgggacagtgtgtctacctctgaggtcagatgctctgcactgggacagggtggagtggagggaaacccagcttggggctcattggaggggcttgctggcagacaccgccctttgtgggaaactgactgtgggagaggggaaccccaacctctgtcaccacatccctcttccctgttgtcacacctgtcacctgctgccatagccatgagacttcccaagggtcactgctgccactcactgcacagcctggaagggagtccacaggggacatagagtgagcaagagacctgtgccactcaggcctcctgggggtgtccccagtgcagccatgatgataatcacagctaccattcaccaagtcctgcccacagtctaacctactctattcacaacactcccagcagcaaggcaagtgaggtgctgccgtcatccaggctggacagttcagtgatttgcctgaggccccacagcaggtgagtggcaagtccagcgtcagagcagggcaggctggcagtgccccttgagccccctttgccatgcttaccacatgcacatcctgggcttctgcaggaatgccctgtcccctacctgccctgctccatgcaaaaccctctttgagctgtgcctgggagacatgctgagagaattcatggaaacaaatgtgttactgacagcctctttgcctccagagttcaaatggagacagagaaaccagctagaggcagagggaggtaacacggagtcccccagaaaggtctgggctgcgcgtgcttcaggtaacctcccttgaccttcaggagaacgagaaggctgcctgatcagagtctctgaagaagattctgtggctacaggcttcagcagagtgtgagggagaccccagttgtttcctcaggtgtttccaccaaatcctcctgtctttcgtgaccaacaccccaggcaaggcttggggcccccgtctgctgctggacagtaagtcctggccccgtggcagtgaatctgtggggtgctctgattgtgggcactatggaagctaaaccccatgctccaggtggggtggagggccttcagaggactcctggacagtgccaggctctaggctgaggtgggggacacagga

SEQ ID NO: 23965 - DNA, 2300 bp, Homo sapien
agcctgtttgtgaggcttatgtttgggttatctctttacttagagagactataaatctcaaaagaggattaaagggagaaataaccatatcaactcacatggtaagggtatgcaaacatctcttagtaatggagaaaattgaaagaaaagaaaaaagagaaagggagaaagagaaacagagcgaaagggataatgaaggagagaaagaagaagagaagggaagaggaagaaaagtaaaaaggaggaggagggagagggaggaagaaagaaaggtgaaaagaaagaatgctaaagttttcaacaacataatttatccttccagaatatgaatgtcggtctatttgatgatgtcccacagattccttagtctctgctcattttttatctgtttctcagagtcaatattttccattttcttatcttcaagctcatgacttcttctgtgtatgcaaatatactcttaaatccctctggtgatttttaaatttttatcgttgtagttttccactccagaatttctgctatctctgttgatattcctactttttaatattttttctgaatcctttatttcttcgtttatgttttccttgtgacatttgagtataattaagagagttgttttaaagtctttgtctagtaagtttgaagtctgggtttccttagagatattttctgtcagtttgttttgttcctttgaatgagccatactttcccgttctttgtatgccatgtaactttttttgaaaactgggcattataataattataattactatgtggttactctgtgaatcagaccctcccccacaaacacagtaatgttttggggttttaaattttctttacttattatattgttaaggatttttttttttagtgaaattttccaaagtgatttacaaaactgtttgctttataaggtgtggtcacggaagtctttttgtttccttaacaaatgttaagctaatgttttgacagtgattttcttgtatgtcaggaagtaagcaaacaggcaaatacaacaaaaacaaaaagaaaaacaagtaatcattgtccagcaaaatatgtctctaggccatgcagactggctttgtgctgggttctttaaagccggcacaaagtgtgtgttcactcttgcactgagtgaagttcaagttcactcttgcacagagcttgcactgaggggagggatcggccaaggtaaaagtgtagggtcttcttatgacatttgtcagcatgtggcttaacctatgcatgcatgtgactttctagactctcccatgtacgtgaatgattttgaatgtcttagttttccaaatactcttctccaacttttcttcctgtgctgaagatgatctactatatgtgtaaactctaatttttgccctaagcatctgtggtttgttaggtctccttgcagagtctctcgataatgtccattccttatctgatctgtattctagcaacacagaaaaacaaaagcctttcatgagtcctttaggtatcccccagaccagtcagaacagacacatagtaatttgcaggtaagatcttctcttgttcctttggaccatggaccagtgttcctcactgggaacgtgggcttctgccacttcaaaactgccaatttgctggggcaaaggcaagttaaaaatgtcataaagttttcaagttgtctttttcttgagtctgctttcactcggttgttgtaatctttagactattttccagagttttgacaaagtttattcagacagtttctcttagttgtgtgatgtttctgtggggaaatgacagattgcagctgtctccactgtcattttgctgatgctcctcttttgtcaatttttgcttcgtgttattatgctttgttattagttcatgtattagttttctagggctgccataaccaagtaacacaaactgggtgccatgaacaacatacatttatagtcttatagtcctggaagctaaaagtctgagattgaggtgtcagcagggatggtcccttccagggctatgagagaaagcctgttctatgccttgtttctcacttctgatggtttagtggcagtctttggcattccttggctaatctctgccctcataatcacatggtactctccctgtgtgtatgtctccctctactcaaatttcttcttttaataaggacatcagtcatactgaattcaggctcatctgattgtatcttaacttgatcagctgtaaagaacctatttcctaatgaggtcatattcagtggttggaattgcagcatctatatagaggaaacaatt

SEQ ID NO: 23966 - DNA, 2300 bp, Homo sapien
tttaccattccaattcgatttctgaatacatgggagttaatagaatactcctaatccatttataggatctacactaagtaaaaaaattaaagacatctgaaaactattttgtgagtccttataatccatatcaacaatcatggaatgtattaagtaatagaccaaaaattaatcatcatattaaccaaaaacacatagcaagacaagataactaaatattttcatttggaaattgggaaatttagtcaattttaaaactcagcaaatgagatcatttcacagaagcaagctaggtttgctggtaaattaaaattatgacattttgttttggtttgggagggtagttcctcttctgtaaattgtgtactcacataagaaatatatctatgttctcacagacacttgctgtagaggtaataatatgaagttagctcagggatcagggcctcacagtgcagtgctggtagttttttttttttttttttttttttgccctgcaccttgagtaaaagtttcctgaggcctccccggaagcagaaaccaccatgcttcctgcatagcctatggaaccatgagccaactaaaggtatttctcttgtatttctttatagcaatgcaagaacgtactaatacagctaagcagaggccatcaggaccagcaacagtctgagatggatgagagacaaagctaagctttgagcagcagcaggagctgccagggagacagaaaggaaggatggaatcctaaattccaggatgtctcctttaagtctgtaagaagctcagccaccgtctccttacctgactcctctgggaaagagtttccctaggttaagccatacagggatagggtaggagatgccatttggatctaggagcagagggcagagactcagcaggaaaagtgtctctatgagatggagacacagtggaacaggtgtgtaggttcacagggccagctatgggtagagttgggtgtacatttttagaagccacaattcccaaaaatctcctgactataacatcagtgcacagagccagtcaaatggaggaggagtgggtccaggcaattcaggaagaagaaaagtaacaaatgagtggttgcaggaggacaccttttctgtcgaggtcactaaacaaaacattgtctcctccccttaacttcggaaacaagcaatggagggtaaaagtgttgcctgggccctgggggcaaaggcagtagataacttctctgtcgtgttctccagaagggcccattccagcctcacaggcagagaagtctgttcggttcccaagtactagagatgctgctataagggactcccaaatttccttcctgaaccagaggctgctcagccttttcttcctgttttattttttcccaggaagaaacttgcctgtacaattacaaggttctatggttctaaattccaatctagtcttccacatcattttgaaggtataatattacttgtcaaagtgggatgatagaagatatgtgtggacataaattgttgacaaggaaaaaaactaaaataagaaaataagagagaaaaatatatgtatgtacagtggttaactagaaatatgccttttaaatatttggcatgtggtatgtgggcctcaatgtgtactattgcactagcttcccaaatattaaaggatgtcttttaaaagaaaaacctcttcctaaaaggttaacagttaaaataaccagagtggcacaggtaccagtcattaagtgaaacctttcatcttcccagaatagtacctgttcccaagccagcttctttgaaaatcattttctctcctttactatttagtttacagattgtatagtaacaatacagaaaccacaatagtagcaacaaaataaagaatatttttaaatgaaaactcacatcctaactctaccaaaacatgaaaattaaacctgaatgcttcccattcctgatatatttttcacgtaaatattcagctctgggattgcattgtttttggattgagtggaaattattgcctggtcttgaaatcttccataatatgtgtgtgtgcgtgtgtgcgtgtgtgtgtgtatgtatgtatgtgtggtgaatatatttctttttgttcagagaaaacattttttcaatatgtatatttattttaggcagattatgctagtaattttctacaaatgtgctttttaaaaaataacctttaatttaaaaaaaaattattcttactcagtggcccacaattgttaaaaacgctaccaatggagctgggtatggtgacacacacctgtcatcccagctact

SEQ ID NO: 23967 - DNA, 2300 bp, Homo sapien
agggccccacacaggagggcttgctcagaacctggcttgcagggctgcttacagaccttctatgtctcctgttgtcatgcacaaggaaggacacagccaatgacaaccctcagccatccggggagaagctgtgtctgcagaggacggtcaggagctgtgagtctagagacctgtgattgtcttcaggggcctgtggtcctcggctttcataggagttgtggggacactggctcaaatagcatccaccaggattccaatcagaatatctcattcacagaaggcagtgggtgatatgacagcacagagggactctgtgggtccagctgcatggagcactctgggagagtcactggcacccgtggtagacagagcttcattcaacttctggagcacacggatttagatctctttacatcattttgaaagaccatttaccattctgaaggaaaccactgtaattaactaaggtaacatctttaataggtagaaagaaaaaagtgattattttattgccaagatgattacaagaaaagaaagaaacaaaaatagcatgaaggaaagagcaacactagactgagggctttgggtaagaggttgagacttagtagtgaatgccctgggccatcttctgtcaaaagggagggacaatcagcaaagggaaatatgcagtagaggcaaaatcttggttagtaaaagaatcctaagagaaagcaagaagtctccttcctgagcatcatgttggtgtcgggaagatgcacataatcccattgcatgtcttacacttttcagcaattagggctcagcatgaatttagaagacaccattcacttcacagcagatggggacacagtcaaggcagtggtgagaggcaaggctgggctttcagtctcagagcacagagcaggttccccactactccgcaccctggtgtctcctcccagatgttccacctcattcttgccttaagggctccaagttgttaatgggacagtagccctcttcctttcccagggtttctaagaatttggctctcttttgtgtattgcggggtttgtttgccatctagaggcaggtttttggcatggcaacttataggctttttctacttgtgatagcaaaaataaatacataaataaattcatcataaataataaattgacttaatgcattcaatctgtaaaaaaaaataaggtcagtttgagagcttaaaaggagcctgatgaggttaaaaagacaaattacctttagtaaagagcagttggagcaatagatgattctttctttaatcaataacattttaggagtaactatcaaatggtaaataaaacttgaaataagaggataaactataattttatatgcaaaaaaatatttccaagaaccatacaaatacattttcagattaaaacaaacaaaaaatgtgggtttatcatcatatccgctaaatggaagatttctcaaatgtgtgcttggagcaaaaataacacttatccctatttgaaagttcaagatttttgagttttcgaagaaaacagctttcccttcactctgttccactcacgcttctgaggatggccatggggcaaaaagccacggcggcgggggacaaaaagccgcggcggcgggggtgcaaagagccgccgccggtaaataaccgcggcacggtgggcggggggggggggggtggagagcgcaaaaagccgctgcgggcaaaaagccgcggtagcgcgggagcaaaaagccgcgggggagcaaaaagccgaggccggcaaaaacccgcggcggcaggggggcaaaaagccgaggcggcggggggcaaaaagccgaggtgcgcaaaaaaccgcgatggtgggagcggggggacaaaaagccgcggcggcggggagcaaaaagccgcggcgggcaaataatcgcggcaccgggcgcggtgcgggggagggggcggcaaaaaagccgcggcgacaaaaagtcgcggcggcggtggtgaaaaagccgcggcggtggtggggggcaaaaagccgcggcgacaaaaagtcgcggcggcgggggtgaaaaagctgcggcggtcagggggcaaaaagccgggtcaagcaaaaagccgcggcggcggcggcggcggcggcggcggcggcgggtaaaaagccgcggcgggcagaaagccgcggcggcgggggggcaaaaagccgcggcggcggggggcaagaagccgcggcggtgggggggcaaaaagccgggtccagcaaaaagccgcggcggcaaaaagccacggcggcgggggtgaaaaagacgcggggggcaaa

SEQ ID NO: 23968 - DNA, 2300 bp, Homo sapien
aggggaaatgcatgttatcaaggtccctgtggacagctgggatggcccagtggtgtccaatggcccagtcaaaagtggacaaagcaggtgtttggatggaccggggagatcttgctcagagattctcacaagacaaacataaaggaagggccagagtggtcggagagatggtcacagtctatgggctgcacaggatggaggaagccagggaacaggcagggtgggcagctggggtgcagggataggcaggtgcatattgggagatcagaccctgtgagggctgtgggggcgtcaggtggggtgggctccaggtgcaccttcagtgcactgggcaggtctcagcccaggctccctggaccctggccgagtgatgtggtcactcctttgggggactgctgtcaggccccggccacccaccatgggcagcactgtcccatctcaggactggacttcctcagatcctgcagagggcacagcctccagcccaggaggggcagccccttggtggagcctgagctctccatggtcctggagcatcacctgccagccctgtgctccattttttcccaggtcccacatttccagtgtcagccagcagggaggcccagtcctcccttccctatgtgtctcctgggctgaaacttgcggcgcactgggacagggatggtgctttccttaggcccatttagggaggggactggttcccagcctggcacaggtcctcagctctgccttgattgccttagagtgagatggatcagtcagtgctctgaaggtaaatgtaagagactgtccctgctgtgtgcgaggctggtctagggatggaggacttaacaggtcctcccaatctgtcaggcctggacagcactgtcctgtctcaggactcagaaagtccagtcctgagataggaaggtgttgcccagggtgggtggctggggcctgacagcagtccccagggagtgaccacatcacccagccggggtccagggaacctggcctgagaccttcccagtgcattgagggtgcacctggagcccactccacctgatgcccccacagccctcacagggtctgtcctcccagcatgcacctgcctctccctgcaccccagatgtccaccctgcctgttccctgacttcctccatcctgtccagcaggatgggctgggaagtgggaaagcctgtgtgcacatttcgtggcaagtaggagtgacacaccatccctgggaggcacctgccaaacccaaccccagaagtctccctgaggtggttttaccaaacccataacccacaactgtgattgtggtttgggggtcagcacccgctagtgccagggcactactgggaagctgggacctgaccaatgcccatggtgtctgtggcctgaggacagggtgtcttggggccatgaggacaggccaccaatggccattgggtcatagggcctgagccccagtgtttttccttccctggctgcttctggttcagtcccattcagggccctagagcccaagatgcagcatccaaggttccctccagaaatcctggtggctcgacttattttgtcatgtttcatctgataacaaaaatatcatatcagctgcacagaaaaatggctcaaagtgcttaatgactagaagaaatcgaggagcagcaagaaggtaatgtggagaggggaggacctccatgaccggtgtctgcagagccaggggtacaggcacccagtgcagtgacctggcaccacctgcctctcagagggtgggtagcacactgtccttacctgggggacagcaggcctggccaccggcttttctccctgtccctgcaagcatcacattgctggaagagaatttcatgccagagcttggaccgtccctagcttgggaggtacgggttgtctcttggtgacctaaatgaaaaaataggtccagaacagagttcctgatgctgggcactcatccactctttgaatcatgggaggggaggcctagtcctaggtaaacctaacctctttgaggaaccacagtgcccaaggctggaaacctccagaatcctccggcccccgatcctccccagggacccctgtggcctgtctcaccagagcattcttccatctgtagatgtttcagctgctgtacaagggagtcccatttcaggtgtggggctgggcatggtcactcctgctggatgtctggaaggtgaaaaccaaggacctagggaaataccaggtacagcctttccaccctcatccagagcaggacaaacaggccaggtggtatcaggagcccaggtctccagctg

SEQ ID NO: 23969 - DNA, 2300 bp, Homo sapien
ctttcaaagtaaaagcagatgaggcctttttccaccctctgaggcattaaattgctttgctcaaggttagacttttaatatatctgactaatttgataaatttatctggcaatttatgtaattcagcaatatggaattgtatcatgttatatggtgccatgaaatgctagtgaatgccacctcaagagctctggatgaaacatttaatatgtcttggttggtttgactcccattatcagtagataatgcagttaaagtaggtaactgtaccatatgttttccacctataaacttttgtggtaattgaatgtgaaatctgggaagcatctcattttccagaattcggcactagaaactcagcagtttcactctgcttcttgtgttgtggcaaacgttggttcccataattcaaagagaacctttactttttttacttttttgatatcacaggattcaaaaaaaaaaaaaaaaaaagagagataaaaggcagtggggaaaagagtagctcagtacagaaaagggaaaacttctttactgttcctgaaggcctacaatgtcacatcctcttaatctggctatttcatgtaaaatccaggtagtaaagacagaagacatatgttatgcctgtgtctttttatttctctgtttctgccagccagatagcataaaaatttataccagatagcaaagagtggatgggaataaaagcacaaaatggagaagagccctttttgaaattttagaaaattcttctattcactcaaacagaaatgagcagatttgacaaaaatttcgatgataaaataagagtatcttataattataataattatgtataatgataaaattaaagtaagcacaaaatacttttatcattaaagtggtgataacctgaatcaagtaaaaaaaatcagggaaaaagttctttttattgaataaaataataacaattattattcatcttacttttattaaaggtcaaaaaaggaaataatacaaacaaaagtgaaaaaatacaactttcagaaaatatatgtgatagtacatcttctgctgctgctggcagattaacccaacaaagaaagattgggaaaacgtatcctcagcaatttcccaagaagctgaaggaagagcatgataagtaagcctatagcagtgtgtgtttttttgtttggttttggggtttttttgtttgtttttgtttttttgagatggagtttctctcttgttgcccaagctggagtgcaatggtgtgatctcagctcactgcaacctctgcctcgtgggttcaagcgattctcctgactcagtctccctagtagctgggattacaggcatgtgccaccatgcctggctaattttttgtatttttagtaaaaataggatttcaccatgttagccaagctggtctcgaactcctgacttcaggtgttctgcccacctcggcctctcaaagtgctgggtttacaggagtgagccaccgtgcctggccgcctatagtagtatttcacaggagataattgtcattgtgctataaactaattcaaaattggactaatattccttatgattaacaagttttatatttttaccaggggtatttagccctgcctggtaatcagaaaaatgcaaattaacataaaataagatatattttgtaaagtcatgctgatatttaagaagtaattactagtgttggcaaatgtgaggaaaaaggcattctcatacactgttggtataggaaattagtaaattatttctgaaggttaacttagtgctgtgtatcaaaatttcaaatagcctgacatccctttaactcaacaactccacttctgggactagatttcacaggaaaacataacttgtgtaaacatacacacacttattaagggcattaattatatgttacacataatgaacaataggttaatgaatgtataaaatatatgtaataagaaggtgaattgaaagtattaagaaataattataaaaagtgtggggaaacagatgttagactctttagcctagttttggatgacagtcatctgcagatatagtttgtgtgagagacatctgaaggtgtcatctcactctgtaaatcatttggagaaacaccgcaatatttcataaagatgaaaatttatttctagtgaacttatacgcttgtcaataaatagtaactttaaaaatttagttgattgtaaatgatcttttctaattagggagtaattatgactgtgtgatttaaaaaggtaattttgaacctgtaactttactgaattatctctggtatccttttt

SEQ ID NO: 23970 - DNA, 2300 bp, Homo sapien
ctgaccaaggtgctctaatggacaccccctgacccaggtctcagggagctgccagcacgatgggtccctaaagctgagatccagcaagacacatgtggcctgagggtcccactctctggctggcagaacccagaggtgggagcacactggagtgtccttcagggcatcttcaccccatgagagggctgggggctttgggagtttgcagctggcaggagtgagggcccagtctcctatctctgatgcgtccttggtcaaatcctgtgcctcagcctgcagggcctatcgtggtcaccacatgaatgtgttcccttagtctgggagccccaagcaggcagcaccccctgccaacgacttcagggcacctggaagtggaggctgagaagtctcccacttcgcagagctgggctctggcccagaggccttctcgttggctcaggtggtctctcgggctcctggggccacagatcaggggacaaacacgggcagctctgctctgctctgcctaaagagaggtgcccagtgaatgcaggttccagacaaaaggtggagcctggcatcctgccctgcgtgtgggctccagcctgctgccatctggggaaactgagtcatggcgaggctcgaggatgtttctcagaccacaccagtccctgaaggtcccctgacctcccaattttgatggacagtaagaagaggttcccaggccgcctgccacaggttctgactcggcctgggttagggtaagtctccgggctgctgtcctcaaaagccccatcaggaggctgtgtcaggccaggcgcaccgtggtgacagcagcatggactgagggttctggccgcgggagaggccaggacggggggaggtcaggtccaggaggagggcactggccggcacatggtggggctggagagaccctgggcggggtggtgggaatggcccaggaggagctccggctcctgtggctggagtgagggtgtgggctgtggtgggagagggggtgaaggtggagagaacaggggcccagaggtctgtgctgtaggaagggtatggacttcctagtgaggactttctggtggggggctctcagagaagaggaggccggaggggctgggggtccccaggactgcatgcgccaggcagacggaggggaggccgagccaggagccgcaggcttctcagtgccagaccaacgtcgccctccgctggccgtgtggggaatcgcgcctaggctggggctcccctggccccaggttagggggactccgatgtgtcctggggcgcttcctgcccatccagcctccgccaggcagcctggccctgaatggctttgagggcagcctccgcagcacaggacctgcctccgccctgtggggcagatttgggcgtctgactctggacacttacccagaggctgaattcaactccccagcgaagagcacactcagactccctccccgctgtgcccagcctgaggggaccctggcttggacttgggaggagaaggccagaggccagggcctggctctcaggcactaggtgcaggagaaaatggagcagagttcctgcaggaactgcctcagactgcccccgaggggacctggcctggaaccctccctgtgctaccaggctgctgttggggccaggagggcagggagagcagccacctgtacggcatcaagtaacactatcagtcagcacacccaacacccacacgacagccacagccctctgccctgaggtggctgcaactgagcagagtctcctgtcttgttcaccctgagcgcggagctccgcacaggacaggatcagagcgcaaaccaggaacaaatggatgaaccaaggaaggggccagggcagtaggtccccacccacaccctgaaccctaagggtgggactcagaggctggagacgggctggccccaggatcctctaagtgacaggaacccttggccactgttgattgccccgaggcggggacagggatggtggggctggggctgcctggccctttaagagggcagttctgcccaccaccctgaatgcccctcccctagctactggagaagagatcccgtttcttggcaacaggaagctcttggtttacacagtgtcacccaagcgactgggagccgcgtcctgctctgggactgagccgttggagctgccccgctgaccgcactaggctgaccgcaaccggctgaccacacacagtcctcactcccctggccctggtgggcggcaggcaccatggcgcagacagtgccgccctgcgagctgccctgcaaagagtacgacgtggc

SEQ ID NO: 23971 - DNA, 2300 bp, Homo sapien
aaaatgcaaatattgttaaggtgcttaatacgaaaacaaattacgataaatgtgttcactgtaatactacctatcatttataataaataaatgcctgatacacacaagaaaaagctaaaatatctaagtatttgtgttgagtaaaataagctaaaccagtaagtatactatgttatttcattgttataaatcctgataaataaaaatgcatctaacataaaataatgaagatcagtagttgcccgggaaactggtagaagaagggaaggggaaaggaggaggaatatagctgaacaagaggaaatgttgagaagaattcccatgtacactttcttgataatgatgacagttctatcatgtttattaattgtacattttaaatatgtgaaatgcattatctttcaaataagcctcataaattgtattacaagcaaacaaatggaaccttagacaaggagtaatagaaagacagaacaaatatgttaaatgtcagaagtacctgaaaattaatgtgcctggaccctagttttccccgtattttcagatgagtgctggagtgcagcaaaaccacacatgctcttactacggaaagtgggctctgaaaaaaaacactagacacatccagctttgtactggagttggcttagggagcagtcggagccggtgatgagaagcacagggctagataccagggttcactcatcctagacatgagctcttagatacacacagagccccctccgtgtgtggatttacttccacatctgtaaatgaaaaaatattgactcctacagaacataatttacacaattattttaaaatgaaatagggtgataaaggcaaaatgtttatcacagcacaatttcattaataagacagcgtattttccaaataccataattaccagccaacttctgcgggtaacagcttcttatctggatacagcctacttctcaagtgtcccaccctagcacttgctatatagttggagatacgaaattagtgccctccctctactgatgaaaaccaacccaaacccgaccctgcagctctgagagaggagccttaaccccgggactccaaggcatttccacttggtgatcagcaccgaacacagaggactcaccatggagttcgggctgagctgagttttccttgttgctattttagaaggtgattcatggaaaactagggagttagagtgtgagtggatataagtgagagaaacagtgaatatgtgtggcaatttctaaccaggatgtctctttatttgcaagtgtccagtttgaggtgcaactggtcgagtctgggggaggcttggtacagcctgggggcgttcctgagactctcctgtgaggccactggattcacctttagtagctataccatggattgggtccgccaggctccagggaaggggctggagtgggtctcagttattagcagtggtggtaccatatactacgcagattctgtgaagggccgattcaccacctccagacacaatgcaaaaaactcactgtatctgcaaacgaacagcctcagagccgaggacacggctttgtattaccgtagctgcggtctccgatgtcaccaccaaccgcagcgaggcaagccgccgtggctccagcctccagcatgcggtggtgcctcttccttctgcttgtcttccagcccagcaggagaagctcccactgctagcctccctcctacagctccatcaccaccaccaccaacagggaggcagtgccccaagtgccagactccagtgggcaaaaagagacggacccttctaattctctaagccgagcacgtagcagccccgcacaccaatacagaaaagccaaaaatgacgtgtggctccctccgcatgctttatatactgaggttacggatcctggactacatgttctgattggatgagagaaaaacctctaggcctactctgattggactttattttcatgctgtgattggttatcttaagacttgctctcatccaatcagaacatgataataaagtccaatccgagtaagcctggagtttttttctcatccaatcagaacatgcagtccaggaaccatcatgcgcaaaacctcagtatatatgtaatgccgaagagaggttagggtttctttaggtttccgtactttcctgttgagcactgcggcgcaactcgccttgctgcggttggtggtggcgatggagattgcagcgcggctgaaggggtaggagaatgaaaatagttttgggatagatagaggtgggtagagagtgtggtgttagtgcaaagggaaaa

SEQ ID NO: 23972 - DNA, 2300 bp, Homo sapien
actacaatgagataccatctcacacaagttagaatggtgatcattaaaaagtcaggaaacaacaggtgctggagaggatgtggagaaacaggaaggcttttacactgttggtggggctgtaaactagttcaaccattgtggaagactgtgtggcgattcctcaaggatctagaactagaaataccatttgacccagccatcccattactgggtatatacccaaaggattataaatcatgctgctataaaggcacatgcaaatgtatgtttattgcggtactattcacaatagcaaagacttggaaccaacccaaatgtccatcaatgatagactggattaagaaaatgtggcacatatacaccatggaatactatgcagccacaaaaaaggatgagttcacgtcctttgtagggacatgaatgaagctggaaaccatcattctcagcaaactatcacaagaacaaaaaaccaaacactgcgtgttctcactcataggtgggaattgaacaatgaaaaaacttggacacaggaaggggaacatcacacactggggcctgttgtggggttgggggagggggagggaaagcattaggagatatacctaacataaatgacgagttaatgggtgcagcacaccaacatggcacatgtatacatatgtaacaaacctgcacattatggacatgtaccttagaacttaaagtataattaaaaaatgcaaatattgttaaggtgcttaatacgaaaacaaattacgataaatgtgttcactgtaatactacctatcatttataataaataaatgcctgatacacacaagaaaaagctaaaatatctaagtatttgtgttgagtaaaataagctaaaccagtaagtatactatgttatttcattgttataaatcctgataaataaaaatgcatctaacataaaataatgaagatcagtagttgcccgggaaactggtagaagaagggaaggggaaaggaggaggaatatagctgaacaagaggaaatgttgagaagaattcccatgtacactttcttgataatgatgacagttctatcatgtttattaattgtacattttaaatatgtgaaatgcattatctttcaaataagcctcataaattgtattacaagcaaacaaatggaaccttagacaaggagtaatagaaagacagaacaaatatgttaaatgtcagaagtacctgaaaattaatgtgcctggaccctagttttccccgtattttcagatgagtgctggagtgcagcaaaaccacacatgctcttactacggaaagtgggctctgaaaaaaaacactagacacatccagctttgtactggagttggcttagggagcagtcggagccggtgatgagaagcacagggctagataccagggttcactcatcctagacatgagctcttagatacacacagagccccctccgtgtgtggatttacttccacatctgtaaatgaaaaaatattgactcctacagaacataatttacacaattattttaaaatgaaatagggtgataaaggcaaaatgtttatcacagcacaatttcattaataagacagcgtattttccaaataccataattaccagccaacttctgcgggtaacagcttcttatctggatacagcctacttctcaagtgtcccaccctagcacttgctatatagttggagatacgaaattagtgccctccctctactgatgaaaaccaacccaaacccgaccctgcagctctgagagaggagccttaaccccgggactccaaggcatttccacttggtgatcagcaccgaacacagaggactcaccatggagttcgggctgagctgagttttccttgttgctattttagaaggtgattcatggaaaactagggagttagagtgtgagtggatataagtgagagaaacagtgaatatgtgtggcaatttctaaccaggatgtctctttatttgcaagtgtccagtttgaggtgcaactggtcgagtctgggggaggcttggtacagcctgggggcgttcctgagactctcctgtgaggccactggattcacctttagtagctataccatggattgggtccgccaggctccagggaaggggctggagtgggtctcagttattagcagtggtggtaccatatactacgcagattctgtgaagggccgattcaccacctccagacacaatgcaaaaaactcactgtatctgcaaacgaacagcctcagagccgaggacacggctttgtattaccgtagctgcggtctccg

SEQ ID NO: 23973 - DNA, 2300 bp, Homo sapien
cttctcaaaagaagacatttatgcagccaaaagacacatgaaaaaatgctcatcatcactggccatcagagaaatgcaaatcaaaactacaatgagataccatctcacacaagttagaatggtgatcattaaaaagtcaggaaacaacaggtgctggagaggatgtggagaaacaggaaggcttttacactgttggtggggctgtaaactagttcaaccattgtggaagactgtgtggcgattcctcaaggatctagaactagaaataccatttgacccagccatcccattactgggtatatacccaaaggattataaatcatgctgctataaaggcacatgcaaatgtatgtttattgcggtactattcacaatagcaaagacttggaaccaacccaaatgtccatcaatgatagactggattaagaaaatgtggcacatatacaccatggaatactatgcagccacaaaaaaggatgagttcacgtcctttgtagggacatgaatgaagctggaaaccatcattctcagcaaactatcacaagaacaaaaaaccaaacactgcgtgttctcactcataggtgggaattgaacaatgaaaaaacttggacacaggaaggggaacatcacacactggggcctgttgtggggttgggggagggggagggaaagcattaggagatatacctaacataaatgacgagttaatgggtgcagcacaccaacatggcacatgtatacatatgtaacaaacctgcacattatggacatgtaccttagaacttaaagtataattaaaaaatgcaaatattgttaaggtgcttaatacgaaaacaaattacgataaatgtgttcactgtaatactacctatcatttataataaataaatgcctgatacacacaagaaaaagctaaaatatctaagtatttgtgttgagtaaaataagctaaaccagtaagtatactatgttatttcattgttataaatcctgataaataaaaatgcatctaacataaaataatgaagatcagtagttgcccgggaaactggtagaagaagggaaggggaaaggaggaggaatatagctgaacaagaggaaatgttgagaagaattcccatgtacactttcttgataatgatgacagttctatcatgtttattaattgtacattttaaatatgtgaaatgcattatctttcaaataagcctcataaattgtattacaagcaaacaaatggaaccttagacaaggagtaatagaaagacagaacaaatatgttaaatgtcagaagtacctgaaaattaatgtgcctggaccctagttttccccgtattttcagatgagtgctggagtgcagcaaaaccacacatgctcttactacggaaagtgggctctgaaaaaaaacactagacacatccagctttgtactggagttggcttagggagcagtcggagccggtgatgagaagcacagggctagataccagggttcactcatcctagacatgagctcttagatacacacagagccccctccgtgtgtggatttacttccacatctgtaaatgaaaaaatattgactcctacagaacataatttacacaattattttaaaatgaaatagggtgataaaggcaaaatgtttatcacagcacaatttcattaataagacagcgtattttccaaataccataattaccagccaacttctgcgggtaacagcttcttatctggatacagcctacttctcaagtgtcccaccctagcacttgctatatagttggagatacgaaattagtgccctccctctactgatgaaaaccaacccaaacccgaccctgcagctctgagagaggagccttaaccccgggactccaaggcatttccacttggtgatcagcaccgaacacagaggactcaccatggagttcgggctgagctgagttttccttgttgctattttagaaggtgattcatggaaaactagggagttagagtgtgagtggatataagtgagagaaacagtgaatatgtgtggcaatttctaaccaggatgtctctttatttgcaagtgtccagtttgaggtgcaactggtcgagtctgggggaggcttggtacagcctgggggcgttcctgagactctcctgtgaggccactggattcacctttagtagctataccatggattgggtccgccaggctccagggaaggggctggagtgggtctcagttattagcagtggtggtaccatatactacgcagattctgtgaagggccgattcaccacctccagac

SEQ ID NO: 23974 - DNA, 2300 bp, Homo sapien
agcttcatcttagccttcctgtgtcacaaaaaggggtataattaataaaacaactggggtcagattcaagagagcaatctgttgatgctgcagccatgaaggggattagagtatggaggaaaatcagctgtatcactggagactccttgtaaagggcacagcctagagaaagcacagcaagaaatcattggaattcaatgtcaagaacatttactgcttccctgcccaccacatcacctcctcaccactaggattaatatggattaaagagagaagtgtggcaaggcacagactccgtctaacgactagaatgtagggaaaccaaaggtggtaggagagaacaaatcaaggacagggaagtgagaccaacaggcctctgagaccaacagcttcagaaccaagatcacagcccctccctaaatggccttagatttacctctcatggggcatctgcagggttctcaggtgagaactggcaaaaacaatatgaaggcactttccaaatcaccagtagtactgagcttgctttagctctggaaaaaacaaaacaacaacaaacataagcaggactaaggtcagtgttggaagcacctttctttgggaagacactatgaaggagggcaaattcgaggcccattactgtgcaaatatgccactgtgtgttttggggggctttgagacatagggtctgtgtgtaaagttagaatctgatgggatattcaaacacagaatcctaaaaaagaggctgccccaaagtccccatcagttcctggactcgacatgtgtctggaccgtatcagtgcacctggagctccagggaaggggctccctcgtggccttagtgatcccttgcttgctgtgctgaggtctccctgtaggataaggcctactcctactgtaaggcctatttcctactgtaagagatggtgggagaagcaattgctgccactaaaacttcattctgagccaaggcatagccacttcatactgggcttgatatgctgggtggagaattctctgtgagcccagacaggaacttctatgcagggcaggagctgagcttcaggggggtcctcagggcgcacccagcacaggattcagccctggagcaggtgcacaggaggacagggtggggttttctctcaggaattgaatgtttcttatttcaaagcaataatgacctaaaatttaaataagaatttagcaagtactgatgtaccgttaagtattttattgtatatggagccgatacctaacccaataatttaatgcaaaccatatttaaatggagaaatgtctagtcttttcaaatgtatttatagttaggaattgagtggtggttttattaattcaatgggtgttactactgggagatacactcatcctagaagttaaggtgcagaggtgaaggcccaggaaatgttcaggttgtcagagttccataggaacaaggaatcacattgaggacaatgtcctgggagattgtggttttctgtgagacgagttctgtcttcatggacttctgagcatgtcagaggacaaatatcattaaacaaagtacagggcatggagctcagcatcccactgtggcgtggtccgtgtgtcacctaacttcttcctcaggttggggggcttgagctacgaaataggtagctgcctcatgaatatgcaaatgcactggtgtttaccgaggtaaatacagatctgtccttgcccagagagcatcacacaacaaccacatctctcccctgtagaagtccccagagcacagcacatcaccatggactggacctggaggatcctcctcttggtggcagcagctacaggtaagagaattctaagttccatggctgatgacgggactgggtccagttaagtggggtctcattcactcctctgtcctctccacaggtgcccagtcccaggtccagcaagtgcagtctggggctgaggtgaggaaacctggggccttagtgaaggtctacccaaggcttccagctacaccttcaccttccactacatgcactgggtgccacaggcccctggaaaagggcttgagtggatgggacatgttgatcctgaagatggtgaaacaatatatgcacagaagttccagggcagagtcaccatgaccgcaggcatgtctacagacacagcctatgtggagctgagcagcgtgagatctgaggacacggccatatattacagtgcaagacacacagtgtgaaaatccacatactgagagtgtgagaaacctcgaggaaggaggcagctgtgctggggatgagaagataacagga

SEQ ID NO: 23975 - DNA, 2300 bp, Homo sapien
gggtgattcttccattgaaagcacaagctggtggaaacagttacatgataattccataaatgcctagcagacaagtgtggatagggtagggtaagaactcctgggggccacgcaccccacacttttatgaaatttccctccagaaacttctgggttctcaagatgagaatccaaacagattccctcatggctctgatatcaggagaactgttctctgataaatatgcccagaactttgtccggacagaccctacatagaaaaaatacttttcaagatctttattccatgtgaggagaacgaattcttttccatccaagacagcttcatcttagccttcctgtgtcacaaaaaggggtataattaataaaacaactggggtcagattcaagagagcaatctgttgatgctgcagccatgaaggggattagagtatggaggaaaatcagctgtatcactggagactccttgtaaagggcacagcctagagaaagcacagcaagaaatcattggaattcaatgtcaagaacatttactgcttccctgcccaccacatcacctcctcaccactaggattaatatggattaaagagagaagtgtggcaaggcacagactccgtctaacgactagaatgtagggaaaccaaaggtggtaggagagaacaaatcaaggacagggaagtgagaccaacaggcctctgagaccaacagcttcagaaccaagatcacagcccctccctaaatggccttagatttacctctcatggggcatctgcagggttctcaggtgagaactggcaaaaacaatatgaaggcactttccaaatcaccagtagtactgagcttgctttagctctggaaaaaacaaaacaacaacaaacataagcaggactaaggtcagtgttggaagcacctttctttgggaagacactatgaaggagggcaaattcgaggcccattactgtgcaaatatgccactgtgtgttttggggggctttgagacatagggtctgtgtgtaaagttagaatctgatgggatattcaaacacagaatcctaaaaaagaggctgccccaaagtccccatcagttcctggactcgacatgtgtctggaccgtatcagtgcacctggagctccagggaaggggctccctcgtggccttagtgatcccttgcttgctgtgctgaggtctccctgtaggataaggcctactcctactgtaaggcctatttcctactgtaagagatggtgggagaagcaattgctgccactaaaacttcattctgagccaaggcatagccacttcatactgggcttgatatgctgggtggagaattctctgtgagcccagacaggaacttctatgcagggcaggagctgagcttcaggggggtcctcagggcgcacccagcacaggattcagccctggagcaggtgcacaggaggacagggtggggttttctctcaggaattgaatgtttcttatttcaaagcaataatgacctaaaatttaaataagaatttagcaagtactgatgtaccgttaagtattttattgtatatggagccgatacctaacccaataatttaatgcaaaccatatttaaatggagaaatgtctagtcttttcaaatgtatttatagttaggaattgagtggtggttttattaattcaatgggtgttactactgggagatacactcatcctagaagttaaggtgcagaggtgaaggcccaggaaatgttcaggttgtcagagttccataggaacaaggaatcacattgaggacaatgtcctgggagattgtggttttctgtgagacgagttctgtcttcatggacttctgagcatgtcagaggacaaatatcattaaacaaagtacagggcatggagctcagcatcccactgtggcgtggtccgtgtgtcacctaacttcttcctcaggttggggggcttgagctacgaaataggtagctgcctcatgaatatgcaaatgcactggtgtttaccgaggtaaatacagatctgtccttgcccagagagcatcacacaacaaccacatctctcccctgtagaagtccccagagcacagcacatcaccatggactggacctggaggatcctcctcttggtggcagcagctacaggtaagagaattctaagttccatggctgatgacgggactgggtccagttaagtggggtctcattcactcctctgtcctctccacaggtgcccagtcccaggtccagcaagtgcagtctggggctgaggtgaggaaacctggggccttagtgaagg

SEQ ID NO: 23976 - DNA, 2300 bp, Homo sapien
acagaagcaggcactcaggaaccagcagggaaacccagggagcacttggcaccacatgggggctcaggaccattgtggggctcagtgatcaggcaggctcaaggctcagcatcagggcaggtgtaggaagcagagaaaggcactggagatagggttttgtgtcaccttctcattgcaccaatagactccctccactacatctattctaatgaatatgagtgtttatgtgtttagaaaataatatttatactataaatctatagccatatgggggcacatcaagttaccctcatcaacttatgtggaccccattcattaggaataagtccctgtacttgaagatttcataaattaataattacgtagagtcactttcttttccagcctcctttcctctctctttctttcccagcctcctttcctccctctttctttctctcacatacactgacaaacacaccgggtgctgtaactttaattacctgatatattaaagaaaatttattcatttgcaacttgaccagtttagctgttgttcatgttgtcgtaagattaagaacatgtttctcaactgtgtacttgtctaagctgagcagcagctttatgggaaatacacagaaactgaaaacaatccaaatattaatcagcagctttatcagtaaacaaattgtggaaaagtcacttactggaatagtaccactacaacaatcaattaatgttggatacgctcaagggcatggttaaattcataagtacttatgctgagtatgataagccaaagcacatacatatgatttcattttataaactgtacaaagtgaacactcattgcaagttacataacaaagatccctaactgacttctacctggtaagaggagggaagatgtaggaagggatattgtaggagaaaaagagaaaattgtgaggctaattgatttgttttctttgtgagtggtaatgattatgccaatatttgtcaaattgagatattatgtgaatattgttatttgtcacgattacaaataaaagtgtatcatttggtagaaaaagattaagagagagataaaactaataaaagaaaagtcatagacttctgaatacacacgtcaattaatcgtcaatttttctacattatttagaaaaacactaagatacagtcaaataatatcatgatatcattataagaaaagggttttgtaaaccttacacggaatttctagctcagtcctagagttaatttagggagcagtcagatccagtcgtgagaaacacaggccagacactgagactggctcttaccagatgtgagcttttttttttttgagacggagtctcgccctgtcgcccaggctggagtgcagtggtgctatctcggctcactgcaagctctgcctctcgggttcacgccattctcctgcctcagcctctcgagtagctgggactacaggcacccgccaccacgcccagctaattttttatatttttagtagagacgaggtttcaccgtgttagccaggatggtctcaatctcctgacctcgtgaaccgcgcgcctcggcctcccaaagtgctgggattacaggcgtgagccaccgcgcccagccgatgtgagctcttagacacattcgtccctccatgcttgggggtttacgttcgcatctgtaaataaaggaaaatttgactcccacggaacacacttcatgtgcatctataagtagaaatgctaatgagaattaattatttatgaagtataatcattcacatccactctgggacacagcccactctgaggcatcccttccagaactccctacatagtaggagacaggcaactagggccctccctttgccgttgaaaaacagccgagccctgaacctgcagctctgggaaaggagcctcagccctgagatttccaggtgtttccattcggtgatcagacagggaactcaccatggagtttgggctgagctgggtttttcttgttgctgttataaaaggtgatttatggagaactagaaattttgagtgtgagtggacgtgagtgggagaaagagtggatatatgaggcagtttcccaccagggtttctctgtgtttggaggtgtccagtgtgaggtgcagctggtggagtctgggggaggcttggtacagcctagggggtcctttttgagggaaaatgcacaagggtgaaatgaagctgtggaagctgaaggcatatgagggaagtgtgtccttgagtgaaggagagagggaggcaggactgggtagaactttcctatatttctgtgctgtgaaaata

SEQ ID NO: 23977 - DNA, 2300 bp, Homo sapien
agtgcttcttacatccaaacagggcacttccatgtcctcctctggtggtcaagcacagacaaagctggagtcatccaccattggctaaggtttaatgagcactcaccagaggctgggctctgcttgggtgctgagcatatgctagggtggggaaggagaggggcagatgggggtggctggaggatgccctgccgagggtagagtctggtcaggaagatgaacgtcgagcggagaactccaggtgggaggagggggtcacagagatagggacaaacccccttgaccctggccgggctgccttcctcatcctctgaagcctctttcagagattgctgcccctctgccttatcaaaggagggctgggactgctgagctccactgagttgcccctgggagcgagctttccccaaaggctcaggcccaagtaggaatgagttagcaacaaaggcttgaaataagtaggaaatcaccaaaccaaaccacaaacaaaagccctccaggccaggtaaggacattattaggagttgataggatcttcttgttcttaattagtatgtgctgataggaaatctccaagcagctttcgctggactgcctgagggtcatctcacctctcttcaggctgcggcttcctgtggccaccttgctttaaggcttgttcccaggacggtctcctggggaggaagaagatgtcctctcagaggccagcaggtccaactaacgagctatgagatgcccaaggtggatgaggacctgggctcctaaagtcccacagcccattgtgtccagagagatgctgccctggggacccgacacaatggcaccttggttgcagccgtccgggctggcagctcacagaggcacagtggggttttctcatttcaaatgcctggcccctttccagaggcacttagaatggccagctgatgggcgtgctacttttgctttggaaaatgcgtccacgaatatacttctctccctagggactgggaaggaggaagaattgtgcagcagggagaggtgaaggccccactggagagaaggggagccccttgtcctgcctgcagcagctgccaatggaaagaaagaagagttgggagtctaagctggaggttgcggggccaattcccttttggcaggcgagaatccggactcgggcggatttcaggcttcagtgtttgtaggaggaaacacagcaatcacactattaatagtaaattaaaataaatgggcaactgctgcatggtaatacttttttttttaaggcaaaaaataaaaaatagtgaaacagagaaacaaaacatgaaacaccggcagtcaacaggcaggcaaagaacctgggggtgggggtagcagcggtcccaccctcaaaaggcccgggctgcccagaccaagagaaagcgatgaatctcttctggtaacgtcccttcctgtcgcatggattcaaggccgacctgccccagcaccaccaccagcagccttctgctggggccggcacagctgggagcaacctcctactctcaggcagacgcgcagcaccaagcagagaggcccggtgcaggatcccagcgccgaaccagcgccggctcagtggacgcggaaggggccggcggccgcggccggtcccatcccccactgcagacccccagcctgtggcggtggtccagttccgccaggaaaccgccgcctggagctgtgggtcgcgcacattaacgcatccagcggaaaaatgaaggagacccaaattcaaagttaaagtaatggtgacccgagaggtgccttgatgagaaggtttggggtcccggttactgatggttatcattcttacgagatgctggtcacctacgaagggagaaaggcacgaggagcgcctgaccaaagtggttttgccctgcttcccgcaagaggtggcacccacggctggaacgcaggagtcagacccacagtccccagctctggacgcccgcagcggggcctcgaagaggttcagggcggtgcccgcggcgctcgggccgggtctcccggggcgtggggcggggggcggggttgggcggcggccggggctcctccctcttctgccccgggctcccctgctcttaacccgcgcgcgggggcgcccaggccactgggctccgcggagccagcgagaggtctgcgcggagtctgagcggcgctcgtcccgtcccaaggccgacgccagcacgccgtcatggcccccgcagcggcgacggggggcagcaccctgcccagtggcttctcggtcttcaccaccttgcccgacttgctcttcatctttgagt

SEQ ID NO: 23978 - DNA, 2300 bp, Homo sapien
caaggagtatttttgtggtgttctctgtatttcctgaatttaaatgtttgcctgccttgctaggttggggaagttctcttggatgatatcctgaagagtgttttcgaacttggttccattctccctgtcacttccaggtacaccaatcaaatgtagatttggtcttttcacatagtcccatatttcttggaggttttgttcgtttttttactcttttttctctaaacttctcttattgcttcatttcattaatttgatcttcaatcactgataccctttcttccacttgattgaattggctactgaagcttatgcatgcatcacgtagttctcgtgccatggttttcagctccatcaggtcatttaaagtactctctacactgtttattctagttagccatttgtctaatcttttttcaagatttttagcttccttgtgatggggtttgaacattctcctttaacttggagaagtttgttattaccgaccttctgaagtctacttctgccaacttgtcaaagtcattctccatccagctttgttctgttgctggcgaggagctgggatcctttggtggagaagaggcgctctggtttttagaattttcaggttttctgctctggtttctccccatctttgtggttttatctacctttggtctttgatgatggtaacctacagatggggttttggtgtggatgtccattttgttgatgttgatgctattcctttctgtttgttagttttccttctaacaatcaggtccctcagctgcaggtctgttggagtttgcaggaggtccactccagaccctgtttgcctgggtatcaccagtagaggctgcagagcagcaaatattgcagaagagcaaatattactgcctgatccttcctctggaatctacgtctcagagggacacctggctgtatgaggtgtcggtcggtccctagtgggaggtgtctcccagttaggctacacgggggtcaggggcccacttgaggaggcagtctgtccattctcagagctcaaacactgtgctgggagaaccactgctctcttcagagctgtcagacagggacgtttaagtctgcagaagtttctgctgccttttgtttagctatgccctgtgcacagaggtggagtctacagaggcaggtgggcctcattgagctgcggtgggctccacccagttcgagcttcctggccgctttgtttacctactcaagcctcagcaatggcggacacccctcccctagccagggctgctgcctcacagtttgatctcggactgctgcgctagcagtgagcaaggttccatgggcgtgggacctgctgagccatgcctgggatataatctcctggtgtgccgtttgctaccaccattggaaagacacagtatttaggtggcagtgtcccggttttcccggtacagtctgtcacagcttcccttggctaggcaagggaaatccctggaccacttgtgcttcccgggtgaggcgatgccctgccctgctccatgggcagcacccactgtccaaccagtcccagtgagatgaaccaggtacctcagttggaaatgcagaaatcacctgtcttctgcgtcagtcacactgggagctgcagactggagctgttactattcggccatcttggaacggaatcctattcaaatgactgctgtaattttaatttaattgaagaacctaccttttaaaatctttcctgtcttctaatcaaagctgtatttttcaggtttttgtatgatctagaccattacctatgtatcggggttaatattctgattttgaagctaaaacagtatataatacttttagacgtttcctgaatacatacacatttatagacattttgtacatacgtgtacaaataggcatttcctaaatgatgtgcctatgtgttactagttctgtaggagatagaaaaggttttactccaaaaaggatgccagatggcagaactggattaaggaaaggcaccaaaagtatttttgcatctttgtgaatgttgcaatctttaatgcactgccatgcaatatgaatctcccaagagaaatggagggtgtggtgttcccaaatgtatttaaccatggaacacttctacttcggctatagaacagtattcagttccacacacagcactgcaaaactttgccatatttattaaacaagtgttttttgacagtctgtgcctggaaggtagtcaaatcattaccatcggactatgaccactgtcacgtgggtgtttgtgtatgtgtcacacagtggccagtgttcatgca

SEQ ID NO: 23979 - DNA, 2300 bp, Homo sapien
tttaattatgatgttagggtgtcgattttagatctttcctgctttctcttgtgggcatttagtgctataaatttccctctacacactgctttaaatgtgtcccagagattctggtacgttgtgtctttgttctcattggtttcaaagaacatctttatttctgcctttattttgttatttacccagtagtcattcaggagcaggttgttcagtttccatgtagttgagcggttttgagtgagtttcttaatcctgagttctagtttgattgcactgtggtctgacagacagttagttgtgatttctgttctcttacatttgctgaggagtgctttacttccaactacgtggtcaactttggaataagtgcgatgtggtgctgagaagaatgtatgttctgttgatttggagtggagagttctgtagatgtctattaggtctgcttcctggatatccttgttaaccttctgtgtcattgatctgtctaatatggacagtggggtgttaaagtctcccattattattgtgtgggagtcaaagtctctttgtaggtctctaaggacttgctttatgaatctgggtgctcctgtattggatgcatatatatttaggataattagctcttgttgaattgatgcctttaccattatgtaatggccttctttgtctcttttgatctttgttggtttaaagtctgttttatcagagactaggattgtaacctctgctgtttttttgctttccatttgcttggtagatcttcctccatccatttattttgagcctatatgtgtctctgcacgtgagatgggtctcctgaatacagcacactgggtcttgactcttcatccaatttgccagtctatgtcttttaattggggcatttagcccatttacatttaaggttaatattgttatgtgtgaatttgatccagtcattatgatgttaactgattatttttcccattagttgatgcagtttcttcctagcatcgatggtctttacaatttggcatgtttttgcagtggctggtaccggttgttcctttccatgttgagtgcttccttcaggagttcttgtaaggcaggcctggtagtgacagaatctctcagtatttgcttgtgtgtaaaggattttatttctccttcacttatgaagcttagtttggctggatatgaaattctgggttgaaaattcttttaagaatgttgaatattggcccccactctcttctggcttatagaatttctgctgagagatccgctgttagtctgatgggcttccctttgtggataacccgacctttctctctggctgcccttgatattttttccttcatttcaaccttggtgaatctgataattatgtgtcttggggttgctcttctcaaggagtatttttgtggtgttctctgtatttcctgaatttaaatgtttgcctgccttgctaggttggggaagttctcttggatgatatcctgaagagtgttttcgaacttggttccattctccctgtcacttccaggtacaccaatcaaatgtagatttggtcttttcacatagtcccatatttcttggaggttttgttcgtttttttactcttttttctctaaacttctcttattgcttcatttcattaatttgatcttcaatcactgataccctttcttccacttgattgaattggctactgaagcttatgcatgcatcacgtagttctcgtgccatggttttcagctccatcaggtcatttaaagtactctctacactgtttattctagttagccatttgtctaatcttttttcaagatttttagcttccttgtgatggggtttgaacattctcctttaacttggagaagtttgttattaccgaccttctgaagtctacttctgccaacttgtcaaagtcattctccatccagctttgttctgttgctggcgaggagctgggatcctttggtggagaagaggcgctctggtttttagaattttcaggttttctgctctggtttctccccatctttgtggttttatctacctttggtctttgatgatggtaacctacagatggggttttggtgtggatgtccattttgttgatgttgatgctattcctttctgtttgttagttttccttctaacaatcaggtccctcagctgcaggtctgttggagtttgcaggaggtccactccagaccctgtttgcctgggtatcaccagtagaggctgcagagcagcaaatattgcagaagagcaaatattactgcctgatccttcctctggaatctacgtctcag

SEQ ID NO: 23980 - DNA, 2300 bp, Homo sapien
ttgattcttgtttggactagaaaacttatacttaggaaggatagttattagttatcttagtggttataatggaggcaagaggacagggaagacgcctatatcatggttgataaaatgtcagggaaacgaacctattggtaagtaactgagatttgaatgctggcttttaagcagttagagggaaaaataaaatatttagtgagagttttgtggaggaaagtaatagaattgtctcttcttgggctttccaagtgtaaccgtctgatgtgtgcaaaggatgatttaattttgctttcattacctcagtgatgcatgggtaaagctgtaagctgacctccacttctcttattattcaataggagatcatagaccattgcttgaaaactacagaattaagaaaagaaaccctgtttcgttacagtgactgcagatgagctgtggaaaggcgctttagcagagactggtgctggagcaaaaaaaggaagaggcaaaagaactaaaaagaagaaaagaaaggatctgaacaggggtcagatcattggtgaaggtaaacttatttataaaaatagctaaagtgctttgtaagtttcttaccccagattttatagatattttacaaactagaagcatcaaaacatttcttatgaagggcactacgatctatggttttagaattcaaccagttgacttactcattgccccaggattctgggggaggaaaatcccatagaaatggatttattcattcagcaagcattaaatgtccctaggtgtcatctcctataatagtgcctgccctcaaataggttataattagtgataaaatagagactaaatggagagttggcgaatattccctgcaaagggaagatagtaaatgtttctggcattgtgagttacatagtctgttttgcaactgctcaactctactgttgtagcacagaaacagccacagataacacacagtcgaataggcatcgttatgttccagtacaatttcatttacaaaaacaagtcacgaactgagttggcctgtgggccttagtttgttgacacccagaacacgtgattgtttatactcatgcttttggaagagtaaaaatagtgtagtgtacttcaatcagcccgtcttgtactgtgcttgctgacaaaccatctttgatagtaatggccttcagggataaagaaaacacctggcaccacacttccagcatcgcatgtctacttggatatttttctttattacttatatcttatttttttaacactttttttttaaattataagaatcatgtatttatactttctcagtaaaaaatgtagattatagagaaacttgaagtccccctggatgcttcttctaccttcttcaatcctattgtctccctcaaggaaaccactggcctcatattggtgtgtttccttcagttttttaatacataaatgcctaaaaaggtatttatgtattaaattttaggtatttatacataaatacctaaaaagatgaatacaaaaggtattatgtattaaattgttattaatttatatataaatagctaaaaagaaatagatatcttcttttttaaaaaaaatttagattatatcacatggtacatgctgtcttacagtttacttttttcactcaataataggtcttggaaatcattccacatcagaacctagagagttaccttgttcttttgatttagtgcagagtgtttcctatgctggagacgctgtggttcatttaaccagtccataattgctggacatttgtattagttgcatttcttgcctttgcaaataatgtttcagtggacgtccttgtccaagcatccatatgccttgtacctgtatgtgagtgtttctctaggtaataccatgaagtatatttaaaattttgattgtgccaagtgacctaccaagttaataatgttagcttaagctccagtgaacagtgtgtcatcattatctgtacatgcattgcctgacattttaacacttgaaaaatgagtactttaacaaaattattatttatatttttaaaccttcagggcgttatggttttctatggcccggactgaatgtccctcttatgaaaaatggagcagtgcagaccattgcccaaagaagcaaggaagagcaggagaaggtggaggcagacatgatccagcagagagaagagtgggaccgaaagaagaagatgaaggttaaacgggagcgaggatggagtggaaactcatggggaggcatcagtcttggcccccctgaccctggtccctgtggaggtagcaaactcc

SEQ ID NO: 23981 - DNA, 2300 bp, Homo sapien
tctacatgtgacacaactgcatagaactacacacacatacacaaatgagtgtatgtaaaactcataaaatctatggattgtaccgatgtcagcttcctggttttgatgttgtactatagttatgtaagatgtaccatttggggaaactgagtaaaggatacatgggacctctctgtactatttttgcaacttcctatctgtatctttgaatctgtaattatttcaaatttaaaagttagaaacaaacgactaagtaatcaaaacttgctttgggccttaacagagtctggaggcttgaccattgaccagcaacttaccatgcagtttaagctgctcatcatgaactggctgttgtatgatcaccaagccataaagttgtgtgtgcacagcaacactccatcatcgaatggaagtggtacatatgaaactgaactggagcaggacctgaacatgcaagctacatgatcttctctctctcaacccctacccacagcttcatgaggaattacctgtgaccagttgcctgaagaagaaaactcttgggcttggtttactcatggttctgcatgatctgttggtatcacctgaaagtggacagctgcagtactgcaatcccactctgggatgcttctgaaggacggcggtgaagggaaatcctcccagtgggaagaagataagagtaatgtgcctggttgttcattttgcctggttagaagtatagatctatactttttcatgagcagtggctaatgacttggctggatggtcagtacttgagaggaacataattaggaagttggtgacaaagaggtctaggaaacaggtatgtggatggacttcagcccagaatgtgaagataattatttcccacatgagtgcttatcaaagggcgacctccacagaggattttaatgaggtggatagaataacccatttagtggatgtcagtcagcctctttacttagccaaatggactcatgaataaagggctagggatggaggttacacatggggtcaacgtggactttcactcgccagggacaatctggctacagctcctgatatggcaacactcctgggggctcagccagctatctggttgtaggttggaccatggaaggggcagcaattgttctcactagaatagacactttggatatggatttgctgttcctgcccacaatgcatctgccaaaacaactatccttgggtttaattatttcacacactgttgcctctgacttaggaactcactccacagcaaatgaagtgtggcagtaggtccttgctcatggaattagctggtcttaccatgttcccaattatgctgaagcagttggctttacacataggtgtaatcaatctcttttctcttaatttcgccaactcaatatataaaaggcctgttgaaaatggtgtacatcaaaataacctggagtgaaataagttgtctatttcagcaaagaaaatgggaaaataatagatgaaacaactgtgttcctcttgataatcgttaagtctagcttgtcagtatttttactcttcggtatgtttgaaaatttttatgctagactcgaaaaccagactaccctcttacaagacattgtatctgagcaggctaccctcttacaagacattgtgcccttctgtgttgcaggtgtgtgggtcacttgagtaggcgtagatggtatggaggcaataaaaaaaccatggcccagggctgagatatgcatgtgtgaccaaacgttagaatcagtatgaatccacaagtgtatgtgaaatgcaggtcatttaagtgcttaatctaatgaaactcagagctttactggagttggggatgaacactttctctacattcctcgcttattcatcccttggatcctcattgcacttggcccccttccgtgcttctatgaacctcgcaggggtccgcagtgccagctcgggtaagtccgagggtcccccgccagcggaccccttcagagctcctgcacgagcagccaaatccacccggccggtcctgccctctctccggcgctgcaggagccagctagccccgcccacgcccggccgccagtccaagccccgccctcgggtcctaacgggaggcgcccgcggggctgtccgcggtcgcgccgggctccgcctgcagtgtggcccgtccggacagtccctcaccccggcctgcgctgctgcgtggactcgggcctcaggaattccgctgcggcccaaggcttgccgtttgacgaggagcagtcgcggtaggcggtgggcaaggctgccctgggcggaggccgagg

SEQ ID NO: 23982 - DNA, 2300 bp, Homo sapien
gactgtgcaggccggagctaggcagggacagcggggcgaaccgggctgatagagtcggtccctgctcctgtgaggctctcaccgaatccctgctgtttccgggcagctgaagagcgctgggccctcgcgtcgcgggcgtggctgtggccgtgtctcctggtagtctgagcccactgtgcgtgtggatccacgtgggagctgggttccagagcctggtcctgaggaggagccgagccgggggtaggaggccggacttggcgagggaagagcacgaccccgggcagcagtgcgccgcgctgggcgcaccggggtttgccggccctgctctgggccctgcaggtccgctggccccgccgcgcctagtggggatgccccgtgtcccccaggcagccccagcctgcgtcccgctccctgaaccctcgggaggaccacagggctgtggccgaaagacagagatttggacctagtgaaaggacgccgctccttagccccagctatggactccacagcatcaggtttggctctggagcgtgcagagggccaggagccctcttggggagctagtaccgagcccgatatcaggaggaccccaggaagaggccggggaatcccactgaagggtgaggctgtacttcatctgccttccgtgtggcgacatctaaccttccagacccagaaggctgaagccgcagtctcctgggtctggcaggggtctctagatgaccgtggcggaggtggaggggatggccatggaaaattgtcccaatggccagaggagagcagaagaggatctgatctcttcctgctgcggcagggagagggcaagcaaacccaagagggagtggcccttggccagggatcagaggacgatagggccatttggagccttgtcatccacctccttaatcacctcactaataaggttcttccagtcgttctagctcagcggtgtataaggtcagcagtgtacatggtgggtatctcctctgagccccttcccccaatagcgttgggggcagggcaatccaggtgacccaggaggttttaagccagtcctaagtttagaacgtcctatctctaaccaggtgggcattttaatccgactgttcatccttcagtgcacatgctcaaggacacataactggccagtggaagaactgggcccagtccgtgggcttcccaccccctcttttttcctttatacccttgttaatcagtgtggctctgggaacagcagaggcattgcccagaagttctctagaattgcagactctggggccccacacatcctcaaacagtgtcttagcaagtcttgagccagagtttaacaagatcctcagggatccacacacacatgaagcttgaggaatgcctaactgtgctatgcttacacccatgttgttagccttaactacttctctggcatggtttgggttagtttttttgtttgttttaaggcttttatgaacagtatgatgcaaagctttataatgaaggagctctcaagtgtgttgcagagacctaacagagcttgggaacaccaggggcagcttctcagaaagaggtggcctctgagctgggttcccaaggatgaggggagaggtgtaacttcctccccttaaagcctcataatcctgcatggccttgccttgggtcttgtgtaattgttaacctgtaggctagatttaaagttccttgaagttcttttccatatttatatttccaaaagtcctaggagatgacctgcatacagtatgcccagtaaataacttcagtggtatggccagactggtcacacttcactcacttgtagactgatgtgggctgtggacaggtgggagcctcatgcagctgtgtacaggggcacttctctcaatgtttgaaggctagaagctgcctctcagatccttttgatccactggtgtcctcagaacaacggaggtgacattcagagctgttctgggtctcaggcttgggaagtctgagagctgtgtgtgctggctgggtcagcttcccttatgtctccttctaccttcccagcttccccttctcagaatcctgctcttcctccagagagattcccaggagaagagggaacaaccaattcattcctgaaagccaggcctcgggtgagttgtattcttaatttttcctcaaatgcctgaacgatggttagctttgcctacttttcaccaaaaagtagcctcttttttcactaagggaactgacccaatgctgtctctgcaggaggctgagcccatccaagtgaatgatggctccctgacctgtccggggtgttc

SEQ ID NO: 23983 - DNA, 2300 bp, Homo sapien
aacagtgctttgagatcaaatggtgcactagagcactgagcaggagagagaatattcctggggtaatgaatgtgcattgtaacaaacaagggcctctggatcaagatctgtcccaaaggacacaatgtaagagtggggaatttcagacactgcagcaggcctacagaatgggcatcagggaaaggcagtggccctcaagttcttctgaagtagttccatttctagttctgttgagccatcaatgagatgaaaatcttttctcatttgtccatcccctcacctttttggttcggagcaccgaagatggaaaagctcctatatcagccatggttcccagacaatgtccccctgcgtggaaaagggcttgcttgctgcgccatcctggccatctgtgccactggaagtgctggcagaaaagtgaaacagagactgcaaaagcaggaaaggagaatggtctctttgccttgatttcgtgttattttgtctttgccttgattttgtaagttattttgtcctgaactcctaaatagggttgataaaccaatctctctgtcctcacaagtggcccttctctggctgaggactgcctccagaaaaccaccgttttaatactcagactgtgtcttaggcattggcgctgctataacagagtgtcttaaactggggaatttgtaaacaacacaaatttgttgttcacagttctggatgctgggaaatgcaatatcaacgtgccagccagttcaggggctggtgagggtacgtttctcatagatggcaccttctgtgtcctcacatggcaggaggagcaaagggggcttaaggcccgtttttatttttatttatttatttaatttattttttgagacggagtcttgctctgtcgcccaggctggagtgcagtggcacgatcttggctcacaacctctgcctcccgggttcaagcaattctcctgtctcagcctcctgagtagctaggattacaggcgtgcaccaccacgcccagctaatttttaaatatatttttggtagagacagggtttcaccatgttggccaggctggtctcaaacttctgacctcaagtgatccgcccgccttggcctcccaaagtgctgggattacagatgtgagccaccacgaccggtctaagggctgtttttaaagggcactaatctcattcatgagggcagagtcttccaaaggctccacttcttaatactatcaccttgggagttaggtttcaacatatgaatttgagggggacacatacattcagaccatagcaggccgtttttccatttcttttgggtcctaaatgatatttgtttctggagtaggagggcgttcaaagtcctcttttgttcttcagcacccttcgctgaattcaggggcagatggagaaaggcaagaggcacggggcagcctgtagaagcagtatctagcactgagtccccagtatcccctaggcacgccaggagagcctcctggaaatcctcactcagcagatccagggtaggaacgcggcttctgttgaatagccttacatcgagatatgcaggttgggggcggtggctcacacctgtaatcacagcactttgggaggctgaggcgggaggatcatctgaggtcagaattcgagaccagcgtggctaacatagtgaaaccccgtctccactaaaaatacaacaaattagctgggcgtggtggcgggaacctgtaatcccagctcctacggaggctgagacacgagaattacttgtacccagaagacaggttgcggtgagccgagagcgcgcccctgcactcccacctgggcgacagagtgaggctgtctcccccctccccccaaaaaacgagagagatatgaggctcagctaccaaagtcacgcgcgagaagggaaatgcttgtaggtccctgcccttgggggagagcggagtgaaaaccggcgcgtggccggcgagcacggcccctcccagcggaggtcctacaggcgcccgcgagccccgcctctccagcttcgccgcgccagcaccccgccaccggcgctggctctgaagggccccggcggcggccgcgtctgcgcaagctcgggacggcctcgggaggcggggctggcgcggggcggacgcgggggctggcgcggggcggacgcgggggctggcgcggggcggacgcgggggctggcgcggggtggcgggcgggggctggcgcggggtggcgggcgggggctggcgcggggtggcgggcgggggctggcgcggggtggcgggcggggcctggtcctgtgagcgttcggagact

SEQ ID NO: 23984 - DNA, 2300 bp, Homo sapien
gttaaacagcatcagacggccataacatcctgcaatttggcagagcctacaagcttctgggcccaagagatacctgttttactctaaaaagatggatgtatgtcacttcttggctgcttagcttccatatgctcctcctaactcttttgagaatatcagttaaaattctcttaatcttcccagtaacatggccgattagatggcctaaacagccctcttaataaaaaaactaaaaatgctgaaaaattgcaaacatctttataaacacactgatgagcaggcatgaaagtgaggaatttgtaaacatttaaaaaaataaagtgaaatgggccaggtgcagtggctcatgcctataatcctagcactctgggaggccgaagagggtggattgcttgagcccgagtttgaaaccagcctgggcaacatggtaaaaccccatgtctacaaaaaaatacaaaaagtagccagacatggtggtgcatgcctgtagtcccagctactcttgaggctgagatgggaggactacgtgagcccaggaggtggaggttgcagtgagctgagagcatgccactgcattctggcctggctgacacagccagagcctgtctcaaaaaataaataaagtgagagctagaattctgagaatcgagcaacaaacctgacttttagactgctaaatcctagagcacataaacttccactttggcagctacctggaagcggtaaagacaaagcctagggcctgccagtgggtggggaatattctagaaggaaacactttcaggaccccagtttccaccctcagtataaggctaaataataaaaaccaccacacagaagggaacaaaaaaaaaaaagtatttctcttatggatgttgtgactttaatcaagctctaatctcctaggaaggtccaaaccccttagtacaacacaaaggcagccacaacctggccttacctcaagatagttattggcccctaaacctcatccacaaggcattcattttgctactaattattttcacttttatcctctagactatgcctttgcatgtactattcactgtttagatcacactttttttttcttaagtatttaagtataccagtgaaaggaatcctttcccacctttcccggccatagttaatagcttcctccattgtactctcatagtatgttgaatgtgacataattatagaacatactgcctctattgtgattttacattctgattttttccattggaccaagagttcatttggggcagtaacttactcatatttgtaactgtgccttgcttatggtgagcaatttggattttttgaatgaaagtgtagtcttatggagatggagagtagaaggatggttaacagactgggaagggttggcggggtggggaagtggggatagttaatgggtacaaaaaatagaataagaaatagtataactagtatttgatagcacatcagagtaattacagccaataatattgtatattttaaagtaactaaaagaatataactggatcgtttgtaacacaaaggacaaatgcttgaggtgatggatatcccatttgtcctgatgagattattacttattgcatgcctgtgtcaaaatatctcaggtggcccataaatgttcacacctactgtgtacccacaaaaacttaaaaaaaacccaaaccactaataaattaacctggaaaaacgtagctttgttcctgaagtaagattttatcatattctttgtaattttcagtcttccctgagatgtagctcagtggttcctagctttagctgcacattagagtcacctgcagctcttttcaaactgtcgctccacagctgggcctcaggcatcaatgtcgaaagctctccgggtgattccagcttgcagccagggccgttccagcaactccaaggctggctggtgtgcgctgaagctgtcgggagtcggaccagctgcacagttaatacatatgtgtcctaggctcctctctccttccaacgcaaatatgtgtacaaaccctgcctggaaccgcagccctgctctcagaatcaaattcctgaaagtgggcaagcggaagcggaaataagccctctcccaacgccagctgactcgatttcgtctcggtcttccccagagctggacacgaggcaccatgatcagagagacacattccctgcggacggcgctcccatcggatactggagggacgcgacactagaggcaggcagtacttcagggtgaccataagtctcccaaacagccacaacggctcgctctcccagctaaggcg

SEQ ID NO: 23985 - DNA, 2300 bp, Homo sapien
atgtgcccatgggttctgctgctggtaactttggttccccgatccttgtggctgcttcaggacgtcctttcatgatatcctttcagctcgtcacccacttgtcctgacatttcttagttcacattcccaaggaaggatgtcatcttttcaagccagatcacatctcaatctactagtcatgtgtgcattacccacctgtggcctaatcagtgtggctccgggaataagacacagggtcacatggtacaaaacctggctgcccaagggatgctcctttagcaagggctatgagtggggtatttttcctttgaagagactggattgtctttgatatgtcttgtccatgtagtcatttataaaattgctaatggcttttgcccagtaatcattcagggcaatattgaatgtgaatttttacgtactgtgtgaatcttacacagttcttgactctcaggaacagaactctgcctctagcatcgtggtaaaaaccaccaccacattgtggtctaattcgcagttccatggttgttggctctaattctggggtggtctgggattgttcctggctttgctttacttagacccccttttgtaaggtattgaggatgacatatccccctggtatgtgcttcatgggtcaaaagactatgcgacaggactggtctttctcctaccttctttctcaccccccacttctgcctcattaggactctgcccttgtccacaaggagagcacacaggagagaatggctgctgtgtctccgaccaccagatgccaggtgaggtggacttttgtgttcccgaaatactccattcatctccagaatgtaaccacttttctttctctatcctggagcctctttgagcagacccagccaggcagatgaaggactccacagggagtatttctttcctatttgacttgaggtatcctttagtgaccttttcttgctgtgagcatgtgcccattagcttgtcaccaggcttaacaactcctggagccttcactgtgagtgattttgcctagaagccaatggtagggtctgattggaaggtttggggaatagtgggctggttctggtcctgacagtccctttggtacattcatgtgtggactgagaggaggctccagtgttccagggagtgtggggctaggctggggcgtgtgatacacactgtagagcacctctgtggggtgctaagagccctgaagagagtctcctgtgctagagactgtgtggcttgctccattcctgcccgagggcagagtcttaaattctgcatcctggcctagaacttttgcagacacactggagactcatctgaggttttagaactgaaggtaaagagatgcaatcttacagaatcacagagcattagaatgaaatgagagggatcctacagatgatctaatcaacaccattattctaaggatttgtaaaaaaaaaaagacaattggtgaaatttgagtaagattgtagattagataatagtataagatcaatgctattttctccattttttatagttatactgtgattataacaacagtacatccttgtttttacaaaatacacactgaaatatttaggattaaagacacatgatgttgacaagttagtcaagaggcctaacaaaaagataggagaatgtgtatctagagagagacagaaaaataaagtaaatgtggaaaatgttgacagttgaggaagccaggtgaagggtacacaggaatttttttgtgctgtttttagaagtctgaaaaaagagtctgatattcagaagctcagctgtaagtatagtggtgtgagattctgaccaagaacttcatgtcttgggtgatgaggccacttttcccaaatgctttaaagttctactcagtcagaactgtttttctttcctcccaccatgcgtcctccagggctgtcatctttgacatttttggtctggtccaagtaaagagaaggattaagagtaagggagaatgtgattgtattttcaggaatcagtgacattcgaagacgttgccgtggttttcacagatgaagagtggagtcgtctggtccccatacagagggacctctacaaggaggtgatgctggagaactataacagcattgtgtcattgggtaaggggagcctccatgaggaggtacagtctgtactatgctaatgtggggctgagagggctgaggaattaataccgttctcctccccgctgagttctgagccacctgagagataaagtaagagtcgaaagatgtggcatcagagtacagcaacggcgggctcaatactga

SEQ ID NO: 23986 - DNA, 2300 bp, Homo sapien
caggaagctgggacctgaattcccccaccactagtgcacccgagtcagaagacacaaaatcgcctaagcggcaggtgctcgggtgagggctgtgtccatcttgctgctgatggggtggttagaaagccatcccaggggaaggcattctttctaacagcctaaattggagggagaaggagaagggagaagcagtgaggccctggagagaccagcccttcctcaatgcagcctctgtggaaccaggagcccccaacatagatgctgggttcaggtgagtcgggaggaagggctgtgggagggcctaggcacagcctgcactgagcttcacaacacagtcataggcagtgtggctaggggcctctctgcacaccctggggttggacccctacaggaggagctggccctggaccctccctggggtccatggccagctcccaccagacctagggtgccaggacacccctagactattcttcactgcatccctgatcctcatctctgaatcaccctttgatgaagccccacttcctgtctcaccccactgtaactggactatgccttctaccattgtgttctctcatcccctggctctgagaaagtcacagaggcagcaatggggagggtaagagctctactgtgggcccagccctgattcacacgtaaggccctaattgcctgataaccctaccagggacagcaggacatccctgagcctctcacccaccctgcagaccatcctgaactactgccctgggctgagcttgggggtcctgggagccatggagccagcccttctctccaaggctcccagtcaggggcagggagctgccatggaatctcacaaactttgattacttatttaaatacgagtaacacgcgtttagtgcacagaaatgaggaagtacacgtgagcaaaggagaatgaaaaattgccggcaactccactgcaaaatgattgctgttttacaccttcactgtgtgtactgatctgtaatcttctttttttttttttgagacagattctcgctctgtcacccaggctggagtgcagtggcacgatctcagctcactgcaagctccgcctcccgggttcatgccattctcctgcctcagcctccccagtagctgggactacaggcgctcgccaccacgcccggctcatttttttttttgtatttttagtagagacggagtaatcttctgtttgaggaaatgatcaccattttacaccttcgctgcgtgtgctggtctgtaatctgctattggcggaaatgatcaccgttttacaccttcactgcgtgtgctagtctgtaatctgctatttgcacttatgagtgcatgtgaatatttttcagtcacaagagacatttccacggcatgttctttagcaactgcccagtgtgtgatgtaagaggctcattttgctggttcctcagtggtggctttcaggactgtttctgatatcctccagcccttcagtgaatttccccatgacctgctcagctacaggcgactttctgggcattgggcatacagctgttcacaaaacagagacctgtgcagacacgtttctggtcatatcctatcagttctttcaactgctgactggatgaggtatggccaggccaaagggcatacctctgggatttgccctcccaaaggcctgtgcgtgtcagggtgggcctctgttcaggattggcctggcagtgggcaccgggcatgacctgcagggacagagcaggttccagatgaagcagggagagcaagcctgggtcctggccctgtgtctctggttttatgaccattttgaccagggcttcaccaagcagctgttttcccagctcctagactgggctgctggggctgggcatggaacagaatatttgaaatggggccattctaggtgatcccaagctgctgaggtgcctttcggacccagctggtggcagccgttgcctgcaaggatctaggtggtggggagcccaggcttccacccgaggccaccaagggcggtcccagcctggccctgccccctaccctgtgcctccacccctgcccttcctatgctccaaggcaggcagggaggcgggaggccaggtagctcaggaacccaaacctgtcgggcaggttttgagagctgtggagagagggacagaggctggagaaggatgtatggcctgccctgggcttgtctgttccctcctgagcctgagccccttaccttcctgaccccatgaagcacacactggctctgctggctcccctgctgggcctgggcctggggctggccctgagtcagc

SEQ ID NO: 23987 - DNA, 2300 bp, Homo sapien
ccttgagttcttgctgccaccaggggcagtaagagccatggcagtcctcattttacacttgaggacattggggttcagaggcccctgcccccctcatccaccctcagggatccccttcaggcctctccatgaactttgtcataacccaccttcccccatttcaggtgccctctgtggaccatgtcctgcaccagctaaaaggtgtccccgaggccaacttctccagcatggtccaggaggtgagagccacctggtctgcctgatttctccctcacctgccaagtgagggcctctgtttcccccttttgggcaggaacccagttgaacctaatatttggggtcccacccaccacacagcaccctgggcaggggactcccgacgaccatccttggtgtgcacacaatctgtgctcagatgggagagctgggcccttcaaggcggcaggcgtctgggggtggcaagggagcagtgctcagtctgagcccagagggcaggcggctcccctgggtggagatgggccaagggggaggatgcggtgttgtgagtcagcgcccaggacccaggacctggagctggggaaatgatgagtcagccatgctgggtggctggagtggaaggttccagaaggaaggaagtcagagctgaggctagaagggtggactggagctggaccttcaggagctagacctggcagttgtgtggagggcggctgagagttcactgcaatggtgggagagggatgggggtaggaagaagaggtccgggaggagcaacgttttgggaagttgagtcagactgggccaggggatgggagaggagggcagcgaccaagagaaaagagggaaactgggagcactgaggggggccctccctctaggcctggtgactttggggtctcccaagaggggacactgggcagagatggggaggcccagcactacttggttcctgcaggagaacagcaccttcaacgcccttccagccctggctgccatgcagacatccagcgtggtgcaaggttaggccacacgggtcagaggcagctgccaggcatggcttcccaccccacccctaccagggaggcttgttgagagaggactggggtggcgggggactgtcttccctctgtggttcccagatgttcttcctgcccgcttgtcttgttcctgggccccagggtgccctccgcatcccacaagtccctgttactttgggcagagctgaagaaggcagtggcccagcagccggaaggggtgaggacactggctgaagggttcccgggcttggaggcagcttcccgctgggcccaggcactgcaggaggtggaggagagcagccgcccctacctgcaggaggtgcagagatacgagacctacaggtgctgggcaccgcagggtgggatggggtggggtggggtgggcagcccagcctctatgccaccctgacaccctgagccccattcccagcctctatcagcccctgactgtactgagcctctgtgttttttgtttgtttgtttgtttttgtttttttcattttttttttttttgagacggtgtcttgctctgtcaccaggctggagtgcagtggggcgatcttgggtcactgcaacctctgcctccccggttcaagcgattctcttgcctcagcctcccaagtagctgggactacaggcgtgcgccaccacgcccagctaatttttgcatttttagtagagacagggtttcaccatgttggccaggattgtctctatctcttgaccttgtgatccaccagccttggcctcccaaagtgctgggattacaggccttagccaccgcgcccggccgcttctgcatatttttaagccaagacccctgactccagaggcctccaagtccctatgaggctgtgtgcccttggaacctgagcctggagaccacacaagagcagtagggcctcaggaagagtctgtatctgcatttctgaagccccagccttggggttagaggccacacccggtcgccacgtcccgcacctgtccatgttggtgccagccacctcctttcttagtgacacccatgtcctctctgtggcaggtggatcgtgggctgcgtgctgtgctccgtggtcctattcgtggtgctctgcaacctgctgggcctcaatctgggcatctggggcctgtctgccagggacgaccccagccacccagaagccaagggcgaggctggagcccgcttcctcatggcgtaagaaagggctgggagaggggaagggtcccctcttatagggctggctgattactctcgctcctgag

SEQ ID NO: 23988 - DNA, 2300 bp, Homo sapien
ctgctgtgtaagccgtgggcatagaaccgccagcgggatctcagcatccacggtgctcactctaggaagaaggcaacaggctttgggacctggctttaccactccctagcctgtgacttgggccagtcttttagcttttctgggtctcaccattatcatctgtagagtgagataattacacttttctcccaaggtcactatgaggactcaaaatgctcaatgcgtccctgcttgcggaggcgaggcttgctcagagtcaggagggcaggactgtctcaggcagtgaaaggaggatggggctgggcacggtggctcatgcctggaactccagcactttgggaggcagaggcaggtggatcacttgagccccagactttgagaccagcctgggcaacatagtgagaccccatctctacgaaaaaatacaaaaattagccgtgcatggtggcatgagccttgtagtcccagctacttgggaggctgaaataggaggattgcttgagcctgggaggtcaaggctgcagtgagccatgatcataccactgtactccagcctgggtgagagagtgagaccctgtctcaaaaaaaaaaaaaaaaaaaaaaaaagcagatgagctcccaggatgccggccctgagctggcagccatgaaggcgcttgcctccctccacttcctagggtgcagtgtgggtggggcgggggcagctagggagtcctccgggctctgccgagccccttccccagtgtgaagtccagcctgttctgaagtcgcacagggccagacacctgggctgccacctcccctctggaaacagtcctccttgcctcggtgggtcgacagctccaggctattttcttcccctgaggatctgaaagttggaggtaattggttggctcaaaaaaaaaaaaaaaaaaaaaggaaaagggcatgcaagcacaattgtgcaggctgcaaaggagggaggcatcctagggcttcgtctccatgggaactactggcacaggctggctcctctgggctccaaaaagggaaacttggcaaaggtttcaggcacctggctcctgagtggtttgcttgggggccaagcaaatgcccaggagctgcccgcccaagggacaggacacagccccctctctcagggatgcctgggagccctcggccccatccttcaccctcacaccccaggagatcccgtcaggtcctcagccaccctggatgcatcctgacttgggagctgggaggggacccagcacagctggagagcatgagcaggtcatgctttggggagacacccgtgcttcgaggccctcggatgggtgaatgggaggtagttaataagggacagatgaaagaggtggaaggaccctgagtgtcaccctgctgatgtagccctggtggctgttgctgtttctaggatgtgagccccagaccagcaccttgcagaccagcacctcaggccaggaccctgagagaggacgcttcagatgctgggtgcagtggctccctgctgtcctgggggccccttgggctgagatcatcataagggtggcactgtcctgtgtctgtgaagagtggcaggcgggactggggcagtgggggtgtcctggcttgttctggaaaatacctccaggaatgatcccttccttttccacttccacagtccctcctgggcactctgggttcaactgctgctcctccccacttcttggggcagaaactcctgccctgaactcccctctccccagccccagctccctgcaccctctacccccattcctccttggtgaccaaaaagggcaaggagcagagaaagaggcagcgggcaggggaggcacagagagccgctggtgacagggtaggggagaggccaggagagccagacagaggcttggacaggctctgagagaccaggattaggggccatggagagagagagagaaagaggggagagagagagagagaaagaggggagagagagagagagagagaaagagagaaagggagggagcgaggaggcagaggggtggagcgatagaagccggcagggaggaaggggtgggcagggggagggcgagaagccgccgttgacaattacgtctgggtccaagcaaacatgaggcagctgccagccggcctgggcagtcttgtctgcctcggctgtgaagtggggaggctggcaacagttttcttcagcgcccaggatgcagccggctaaggtaggtgctgggggaatggggtcttgctctggaggggggtcggggggaggaatggaggcttctgggggttgctctggaccagga

SEQ ID NO: 23989 - DNA, 2300 bp, Homo sapien
tgagcttgatcccatgagctcttaggagaaaggagcgaaagacccgcagtttctgcgacaggcgctgctgtcgcggtgttgaggctgtggtgtcttcacagctcagcccgtgcactgggaaccccttttgcctggcttccagccttgttgcagggcactgtgcgagatgggccctaatttgctcccacatttcaaaagaccccaggctgcactgggaagaaaggggctctgcctcagccctccaggtagagcccaggagaagggcagagctgagagccagaagcctgagggtaccaacgcccatctaggacattgtctcccgcattatctccctggaccctcacgcagcccacaaggcagctgttggtatcatccccacttcacagatggggaaacagaggcctgccccagactgcaggctacaagagttgtggctgagatttgaaccctgctctgtcttactccagagcgcagcaagtccctagggcttgggggttgcggaagaagacgcaggaggagaagggcatgcctttaaccagatggcagaggaggggcccatcccagccgtgcggccggtggtctgttgtgccctctgagccctccagtgagtgcacacaagccagactccacctggccgcatcccctgcgttagccacgtgacctggagctagctgcctcccatttttggactgtggatccagagctaggaagtaaaggaccccaacattttaaattcaggctgccttgtcttatcaagaccttctgtgtgaggcagggaactgctttactgacttagcagaggggccttagagcccccctgccctccccagcccacccctgggcatcccagtgacttccaggagcagccaatgtggcttctgcacggaagaaagcactctcagtttccaaggtgaagcagaagaggggagagaagttagcacgtctttctggcctagtgcccagacctggggcaggcaggagcctgagagtcgggggagggcacagcatggggcgagtcccgtgctgcttcctgcccagggctcccggcctcagctgactgatgttgcctttgagcaggtgcgtctgtcatctgagatcagcccatgccttagaaggccaaagagcagccctgtggcagggaaagaagcaaggggacctgcagagttggagagggagcagctgagctgagacgggagggcagcgtgggggtggcgtgtcccacactagagtcggcccagcctccccctctgacctgccacctcagctctctgcccagcatgccctctccatcagcctggccatgcctgggccaggctcagccaggaaaagcagctgctggtcttttctggcctcacctcccagcctgcccaacgcccccagccttccccagcctttatcacatggacagtaggcagatgccagggtaggcaagggacaagtcccctgcatcccagtcctctgctgctggtgccacatgcccctgtgcccagctctgtcgtgggatcctctctcaagatgggcactctggacagtgctccagagaaccaaactgtagccccacctctgccccactgactcagggcctcagtcttcccatctgggtctgagagatgctcacagcatctgccaggccttgtgatgagcagtgcagggctgggaggcacgggcctggctgactcaagtcagggccactgccagcagtgccccacatgtgcacacaaatgtccatgggtcttgcgcagagccctgatcctcactgtgcgggactaaaggaccccgggcaggagacaggcatggccaagaggcatcatggctgtgccttgttggctgtgagccctgactgcaccagcagacctgggctcagtccaggccctgtcacacactggctgtgtgtcctctgacaggttacttagctcatctgtgccactgtgtcctcattttcctgggggaagtatgaatatcacagaacccccagataaatgtgatcctataccaaccagcttggcctggcccctggcacagagtgaggcctccacacatgaagggaatacctatgccatcccttctgactgttgaggagagcctgggaaggccaccaagaggcaatttggccatgggcaactcaagttcacccctgggttaacgtgacaccctcactgccaggcagcatggggagcttgtccttgtcaaggtggcagccatcagagcaggggtggacagcccagctctcctgctccagtgctgccagagggctggggcccagggctgtgtgtgtgtgtgtgtgtgtgtgcgcgctcata

SEQ ID NO: 23990 - DNA, 2300 bp, Homo sapien
ctggtgccacatgcccctgtgcccagctctgtcgtgggatcctctctcaagatgggcactctggacagtgctccagagaaccaaactgtagccccacctctgccccactgactcagggcctcagtcttcccatctgggtctgagagatgctcacagcatctgccaggccttgtgatgagcagtgcagggctgggaggcacgggcctggctgactcaagtcagggccactgccagcagtgccccacatgtgcacacaaatgtccatgggtcttgcgcagagccctgatcctcactgtgcgggactaaaggaccccgggcaggagacaggcatggccaagaggcatcatggctgtgccttgttggctgtgagccctgactgcaccagcagacctgggctcagtccaggccctgtcacacactggctgtgtgtcctctgacaggttacttagctcatctgtgccactgtgtcctcattttcctgggggaagtatgaatatcacagaacccccagataaatgtgatcctataccaaccagcttggcctggcccctggcacagagtgaggcctccacacatgaagggaatacctatgccatcccttctgactgttgaggagagcctgggaaggccaccaagaggcaatttggccatgggcaactcaagttcacccctgggttaacgtgacaccctcactgccaggcagcatggggagcttgtccttgtcaaggtggcagccatcagagcaggggtggacagcccagctctcctgctccagtgctgccagagggctggggcccagggctgtgtgtgtgtgtgtgtgtgtgtgcgcgctcataggtgtgtttgcaggcatgtgtacgtgtgtgtgtatgtgcatatgtgcacacatgcatcttcagggactcatgacaacctcggctcccccgacaaggcgagctgccttgcctatgtctgtctgtgcccaggggtgggtggagaatccaggctccccaaagcttccccattccataccctggggcctgcacgacacaacgcccaccactgcttcctgccatctgtcccgagtgatggaaatagagccagtgacagcaagcagtgctgggtgggccagtctgcaccgcagcagccgtggacagggtggggggtggggagccccacatctgagtagcctggatgtctcatgctggccctggcctcggtgaagcccttccggaaaggaagggggtgagaatcgggggaccccctttgcctttcaggcaaggccaagaattttctatctggagggacagacactctaaacaaattccccaagctgcattttcagatctattgaggagctttataagaacagagtagcccagccctctctgcatcaaacaatccagctcctgggcaggcagatggtgagagcctccccacgtgattctggcatgtggcagctgagagcggcacattgggcctccctgccaggcatgctaggctgtgggtttggacagccagaccctccctgggatcagaagggcgaggaacactgactctcccccactgggggctttgtcaccttgccttccccttaaccctgtgagggcacattgtcacccccattttgcagatgagtaaactgaggctcggagctgtcaggttctctgtcagggtcaccgagctgggaagcgagggtgcgggattcatgtaactggttggccacagacccctcccactgtcctcggctgctggaaatcacatccacctgccttcgatctcctgccctgcccccaactagccgtgccctctgagcccacacccaggggccctggtggcacatacgaagccactcacttctgttttgcatccgttaagtctgtagacatctgggaggagtcagcgatgcatcttgcccatgcatgtactcctagaacgccacccgggagcctggatactttaacgcaggttttccaggacccccacttctcacaggctgtcatgtgccccccagtcacctctgccacatctgctctggaaggctttctgggagtttctctggagcacagttgatgagaaccatggagactgaactagcggctcgagggtttcaccttggcacactcctgacagtctgactccatcttctcagccagatgggcctcctcaagacgaagctgtgccatgctgggcatggggcaaggagtgggacgctgctccgtgggccacctggcctctcaggggacctagagtgtagggagccacgaggcaaaatgtccggtccaggtcctggaggtttgttccaagtgctcagcctctgt

SEQ ID NO: 23991 - DNA, 2300 bp, Homo sapien
ttctggaacaaaagagtggtgggattccttaaccttcactatttctagaagcaaagggctaaggtaaaattcaatactgtcaatagtcaggattgaaatggctacatcatatggtaggtgtatgtttaattctcttcatacactgacaaatggttttcgatcgtggtggtactattttataatcccatcagcagtgtacaagaatcccaggtcctccacattcttgccagtacttggtataatcagtcttctttgtccattctagtaggtgtgagatggtgtcacattgcgcttgcaatttgcatatccttaatgattaatgatgttgagcatcttttcatgtcctaattttttctttctttttttttttgagacagagtcttgctttgtcgcccaggctggagtgcagtggcacgatctcggctcactgcaagctccacctcccgggttcccgccactcttctgcctcagcctccccagtagctaggactacaggcgcccaccaccacgctcggctaattttttgtatttttagtagagatggggtttaactgtgttagccaggatggtctcgatctcctgaccttgtgatccgcctgcctcggcctcccaaaatgctgggattgcaggcgtgagccactgcgcccagccttcatgtcccaattttctgtctgtatatcttatttgatgaaatgtcagttcaaatattttgtccatctaaaaaattgaattgtttgattttatctactgacttttaagcattctttctatattctggatacaagtctttttatcaaatatagcctttacagatattttcttccaggctgtaacttagcttttcagaaagtctttgggagctatggcttagtgaaacccttgtgccaggttctcctcagcgaatccccctgatcacagccacccccataggttccatttcaatatctgtggtgaccttctgcaagctaggctgaagtcccaagctccagacccatgtctccaactgcccaccgttcaatgccctttggatgtcccatgcaaatcggagctcaccatcctctccccagacccgctgctcctccaggagccctgtctccatgaacggccctgcacctaccgagctagagacccaggagttggccttgtacctccttccttctcacttccacctcctgtcattcagagctgtcagttcttcctcctgaacatctctggacactcaccttctccaccacgcaccgcaccaccattgttctcaaccgcaccacccacccagacacctttcctcagacgggtggccagagaaaaacttctcaaatagaagtcgggacatggcacgccactgagaaccttccagcggtctcctgtgcacgtaaacaaggtccagactccttcgtgggacaagtaaagctcttgatgatctggtccttgagtaatgtgggggccacttgtacagagcccctcacactgttcaaagtcggcagctgaagagctgagcagtagctgtctgtggagttcagctgccactccctacacgcctgccctctgcaggggatggagtcccgtttccccacttccccacctgcgcccagcagtgcaggtgaaggcctggctgcggagagtggctgggaaacgctgcgctttggggtcaggaatgccagctccactactcaccgcctgtgtcaccctgggaaaacagctctggccccaggttctccataagtaaaacgggggcagtcatccctcccctcctcaacgacatatgtcagaatcagaagccacaaatcattctctgccacccagcacgctgccttggtctcctagaccactttccccaacaatgggaaaggcgccaggcccagaacaaggccgagaccggatgaggccagcgaagcgcccagggacaaaccttcgggcagcgcccactctcgagttcaggcaagtgcagggtccctccgagagagagcgtctccagagaacgcggctggcgcctggctgaacccgtagcctgaagacccgccggagccgcccgccccacgatgggcccgcccctccgggattggcgccctgctagtggccattgcctgtgacgtcacaggatcgcgcccgcttttctctcgggtgatccggccgagtggccctgggttagcagctgctgcatttccccggctggctgcggtcactggtggcagtgctcaggcgcccgccgcccttgaccttcggccccgcgagctctaaccctacagcgcaggaagatcggccgccgcggccaggtaggacgagcctggctgggtctaggc

SEQ ID NO: 23992 - DNA, 2300 bp, Homo sapien
tccagtgtgagattgaagaactaggtgtcatcatcaacaaggtggtgtgatggctcctgcacaggccctgcacataggatgagggcatctgctcccactcagcctagcccagggaaaggcccagtgacaggtgtggacaggtgccagccctgcaagccgcctcttctcggtagaagggagaaggacagagctctcttcaataaattcgtcaggtcaaagcagcagctttgcttctgctgtttgtcttcttttgggctttgtttcatgggacaagttggggcattttgtgggactggggaagaagagagcaaatacacacacatatgccaaaaagatgctgctgggctggggaaaagacaattcgtgtcgtccccttgtttatcacatcaaagaagggaaaaagcaagagatggcaagggacaatcaagcctcaatgattatatttatagctaagggtttgcagcctcctctccatcttctggctctaggacacagctgtgttctggggctcagaagtctcagcacaggctccttctcacagttctagctacaagtgaactgccggatgaactgttctagtttttcctgattgtccaggctggcaaaagtaggggacaggtggagcctggggcctgcagggctcggcgtctgctgcagaacctgggccatggaagatgggccgtgagtgcactcaccacagggactgtgtccacatggcccaggggccaggcctgtcccccagaaacctgccttgagacctctgaccccttaggcctcagtgtttgagtgcaaatgctgcctcaaagcagccccaataccccacctagaaggatgagccagtgatttgggagaccaagaggcaggaaaccatcccaccttctccaacccatcaccacgtctattgctggaagacaccaagtaaatcccagggtcttaatgaggcaccatcaggccagccctgtggggtgatgggaacatagctgggtttccctgagccactctattggggtgggagcagggggacagaagatggtgacactggctcctctcacccctaggtctctgaaggtccagatagcactgatggcaagctttgggtctgcacactctggaaagaagagagaagtgaaggctctaggtagggaggacagggagacactgggcacaggcttctctcctcttgtttaaagaagcccagggagggatagatctccgactggacagaagactactctgcagcccgccttcctagagttgggttgtcactgtccggcagggggcagcagccaccagcaaacaccactgcctgcaggagcctgggctgactggttgggactcaccaaagatcccttcttcctgggcggtggcctgcaggaactggaacagctgttggagaggagaagaaaaagaagacatcaaaaagaaaatctagtgctgggtggatatagagtatgaagatgtggagctgggaaaacagaggatgtggtgggatggggaaggaaaggttgtggaaggcctgcaccccgtctcagttcctccactgcttcgtcccagattctgtttttgttttcctgaatcagacttagtctccctccattctcccgtcccctgtgtgcccccatcctggtcctgcctcactggacagcctctccgcggccttcctcctccctgctccagaattctacttggtgccccccaaccccactcgactcattgtccacctggcctctgaggccaggcaccctcattcccctctcccacccaccccacccaaggaagcccagcacagaccatctcatctcactccaccatcacttctttgccaaatgcatttccaaacaccctcatgagctttgctgatctctttgccatctctccctgccccactccgatggctcctcctgcctggtgaagactgccctgggtatcccagaactgaacctgcagcagccagcacagctgaccttggggcgataagcagccagggaaaggctttcttaaaaaaaaacaaaaaacaaaaccaataactcagtaagcagattaaacaaaggtagagacggagccctccacccctctcacacactcatcctcacacccagctataccacaccccacaaatgttgcttatgtttccttggtcattctgtccatcctcctgtctgtccaaagccaaggacactgctctactctaaattttttgtcccgaagcccccaaatactgcaaccctgacccaatgcacgaagccaccccaaaatacagcagaggacaccaggactttcattttccctcagtatggccc

SEQ ID NO: 23993 - DNA, 2300 bp, Homo sapien
ttggcactttcctgattaacctgaaagctccagaactggggacagctggttcccctttcattcccccatatggaggttgggttgggtggcctcgcaaagccccagctgcctttacatattttggtagcggttcaattgtctttctggaaaataatcatttcagatcactaatttaacccacccactttcacttacacatacaaagaatgtgcagggaggaagcagagttttctttcatcctggagctgtggatgatggacagagaagctgactgctttctctctgcacactctctgaaaaagccttagttcctcctccctgcactccctgcagcccctctctttaccctcccaagacctttagtgctcacactttatccagctcatgtagatactattcccagtaaccaaaatctcccgccattattaacacaagaggaatagaggagaaatccatcccccatccctactcctgtcagagcaagacagccaccccaaacatccgttcatctccagaattttcccactactaataaggaatggtcaagatcaaccctttgggtgcctttttctaacctcctttcccaagtgtagctgacttaattgaaacattttctaaagccaaaaacttgcacttgaatttgctgatagtttgctggagacacctcatggtccacagtaccatatctgagagtaaaccacacagtcaggtaattagccattgtgaaagatgggggtggtagctgcttgttattagggattctatacatttcagatctctctctcgtatatgcaatatatatatgtaatgtattatatatgatactggaagtaaactacatattaaacaatatataacacatatattcatgtatatgtataatatacatatatatattatatatagctaaagacatagatacatagatatgtagatagatatgtacctctagctctacctatggtatttctttctgactcgtcgtcactgttgctcaggctggagtgcagtgctgctatctcactcacttcaaattttgccccccaggttcaagctattcgcatgcctccgcctcctaagtagctgggagtacaggcatgcgtcaccacactctgctaatctttgtatttttagtagagagggggtttcaccttgttggctaggctgatctcgaacttcttacctcaagtgatctgtctgcctggggcaccaaaagtgctgggattacaagtgtgagccaccacaccaggcttataatacattcctggatgaggtgttttggagcaaggatgggcaaaaaggctgctaggtagggtcctggagggatactgcagggaccaggagcagtgcttggaggaggagaggatcaggacatactgcagaaattgaccttcaggaatagctggaggtggccaggcacagtgatggagctggatccagtgaggtggggcggagatttctgctgggctggaaaccaagaggactgcccagagacacttctgtcaaggttgcagccaaagagtataagctcactgtatccctggcactaaggttcttttaagaacgctagttgttacttcatgaacagtcatatcaaggcatactatttttggaaaggcattttcttccctctgccctctccttaaataagaaacaaagaacaataacaacaacagcatgtcctattgatgctatttgtatggaacgaaacttgaacttttataaggtaaagatcggtcaagatagctttcctagcatcctgactctagagctctcctgttgattccataaggtattcaataataagagcgtcgactttttgctctgtcctggttctgcttctgtctccacttactttatgggggccttcgctttttttgatcctattgtgtcagccttgtttaatatgtagtttactcccagtatattcttctcagtatggaatttgatcctggaagagaatttgggctggttattttaagagctgtagaagccatatggtcccagccgctttttatcttatcctgcactcttgcttattgatgtgtgcaaactcccaccctactcagtttcagcagctcttttttaattaccttgcacactttctaatgaatcctcgttgctgacttggggcgttctcaaatctacatgtgttctgttcaccctctctgcttcatcctgaaaggattctgattcctcatggatattgctgttgcacctgatttgtctgtgactattcatatttgggatttttgtagggtacattgtcactcagtgttgttgtagatattgttcatgaa

SEQ ID NO: 23994 - DNA, 2300 bp, Homo sapien
agaagaggtataagtggaggaggatgaattcagagtaaacatgtcatctaggaaatccaggtccccggagtgccatgtgtagctacgggcagagatgactagagctgagtagaggaagctgcattcagttccccatgagaagtaaaacaacatttagagaaacttacagatgatgacagaaagattttacagcaacttaagaaaagcaaaaagacaaaatggttcagaaaaaaaaaataatctaagaagaatctataaggagctgataaaaatgtgccataaactagatgtggagctgctccaggaaagaaccaataacatgcctaaaaaatttttgtagtatttgaagttcataccttagaacaagcttgcccaacccacggtccgtgggccacatacggccaaggacggctttgaatgtggcccaacacaaattcctaacctttcttgaaacatgatgagatttttgtttgtcattttatcaaagctcatcagctatagttaatcttagtgtatttcatgtgtggcccaagacaacgctttttctaatgaggcccagggaagccaaaagattgcacaccactggcttaggtgatattatttattcaacaccatagatatgtgtgtgtgtgggggtatatatatatgcatatgtgtgtatacatatatatgtaccacatatatatatataatatatatatcatatatgtgtctcctccttctaagagggaggaacttttccaaatagtaataacataggtgaaatgtaattcttatcctaaccatgatcaagcaagcttttttggaatctttgagtggatgtaattttatattcccctttatcaaacactgaccacagggaatattcccctctaataagcttcttttgtagcttttttctgaaaaactggacaaatgtaatgtgggagtcagacagcatgtgtcactaagctgagagcagtgacatatgcaggtgacatttgcatgtcctggcagcattgtccagcaaagtcttcctttctttggggatggaccctccctcctcacctggagcagctccacgtcaggcatgtggcacgtctcccacagctctctgtacatgtctttcatcctttctaaatgttgggtcattctcacttgactgtcttgtagttgttggaaaagcccttttgcttctctgtccagtgcctgcagatgaagttgcttctcctcatcgagaaatagacgcatcttttgatattgaatattgattatcaccttacttaatgacacatagttctgcggagacatttggttaaaaggattacatactctcactctcaacagaaaacttcaaataattatatgctgggtgtaatcaagcaatctataaactttctgcctcactcttgcaaggagtcttgaatatttgttatttctttctgtccatctttttcaatgttcctattctctctccctctttaaatcaaaacctatataaagacttctagtttctcttcctgagatgcttattcacagttcttactgagtcaattatctactctattaatctcccttttaggatttttccatgtctgattcacctaaatgttaaaacacatttagccatacactatattatgcagattgatttttccttttactatatttttactctatatactattttatatactattctatttctttcctcttcctcacacccaatcttggtgaaatgtctcatctccagtgtctgaaaaggtttataccaaccttcaaatttgaactagaatacatatcacgccatttatccaataaactagaattaatttggttagcttgtgtgggcttctctatttgcaattcctattatatcaattatatcaaaccccctctctactaaaaatgcaagaaaaaaactagccagcgacagagccagactcctttcaaaaaaaataaataaataaagataaaacttctgttctgaagaaacttaatcatctatgttaacacccacctacgccctgtgaaatgcaatcaattggaagaaaggggtgtggtcttcagagatttataaaccgacacttcaggagccaagctcattcttctccagagcccacagagtagctttgcaactggctttggggacttccgaaagctaccagcactgcactgtgagactctcatccctgagctgaatccatctgattcgacagcaagctttggtgagaacatagatatatttctgaggtaagtacacaatttccagagaaggatctactattaggttacaaaccaaaacaaaatttggggacttt

SEQ ID NO: 23995 - DNA, 2300 bp, Homo sapien
attttgacttttctatagtacaaaaagtaaaaattgataaagaggataacttggaaaaaattaatataacaacactgagacacattcttgactagcactctatttctgtactaaatttaggaggcatgtaaatggcacgtttcctaagtgaaataagacagacacacagagaaaaatccttcatggttccactcatatttgaaatctatttttaaaagttcaatacattaaaaaaggtggttacattggtgggaaggaaataggtaaatgaagggcaaaagttgtaaaggcgtagtagaataagtgaatctgatgtacaacctgtaggcatatttgataatgtattgtttttgggaaatattctgagggactagatttttggtgttcttatcataaaaaagaagcacagctaagtgatatgatagatttgttaattttcttcattatagtaatcatttcattatgtatatgtgtctcaaaacaacatactttgcaccttgaaaatataaaataaaataaatttaaaaataaaggtaattttgttcttccatgtcagctgaaaataagtgaagactgggtcagtaataacattgctttgctgaattcagagaattctaataaaatatttttagttgggaagctatctgtattaaaaaaaatgatctaaggctggtaacagtggccatacttataatcccagtgctttgggaggccaaggcagaaaaatcacttgaggccaggagtttgagatcagcctgggcaacatagtaagaccttatctctaccaaaaataaaaagaaaattagccttgagtggtggtgtgcacctgttgtcccagctactcaggaggctgagttgggaggattgcttgagaccagctgggagtttgagactgcagtgagttctgattgtgctattgcactccagcctgggtgacagagtgagaacttgtctcaaaaacagcaactaattattttgcatagccattttacctgaaaggtataattatttcttctacaattaataaatctgcatatgtctaggccagctatatcaggtagagcttgtcctctagtacttacatctataaaacaaataagacagttataaggaggctctaagaaaaacaattttttctcattctggactttgaggtcttaattctttaaactaattttctgtctcaatagtggatatcaccctgaaacttaatttgtccaaacacctcacataatctgaaattttacaaaacataaagttcataggatcaatacattcttgtgccttaagtctccaggcattcaaggatactattatgtggaaactcaggccttctactgcattattgaaggagcacatttgagactcacagcacttgttgctgttaacaggtctggacaatgagtgatgtcagtccagataattctgaggaaggctttctgccttgttataaggaggataatcactggagactctagacaagttcccagtcatcattccagcgtttagttgctgtttttgtaatctcagcatttttggaggccaaggcaggtggatcactttaggtcaagagttcaagactggcctgttcaacatggtaaaactttgtctttacctaaaatacaaaaattagcggggcatggtggtgcacacctgcaatcccagctactatggaggctgaggcaggataatcacttgaaccaaggaggcaaagatagcagtgaaccgagatcatgccactgcactctagcctcggtgacagactgagactctgtctcaataaataaataaataaataaaatcacctcttgcatggagggtgaataaggagtataacatgaggacgtgtgaggaaaatatgcattagaagggaaggagaacatacttaacatgccagtggaaggtgaaattctaaattatctgagaatatttttgagaactttgtttaattctcagtgtagaaagatgtaccctttgaatgacattaaaaattcactagaagagtgaatagttaaaatgtcacataagtaacaagagtctcaaaacaaaaagtgttctaaaagtttaaagtccgtatttgagatagaggagagaataaataatagttcattaattagtctttattatgtgaaaagacttttctaaaattcttccataataattgaagatataaattacaataattaaaatttacaaaagaataaaagcattaaaataaagtgtgaaaaatttaaaaagggtaaagatgaaaattatttaatttttaatctcaaaaatccgaaagtgattttatcaatgtc

SEQ ID NO: 23996 - DNA, 2300 bp, Homo sapien
caagagtctcaaaacaaaaagtgttctaaaagtttaaagtccgtatttgagatagaggagagaataaataatagttcattaattagtctttattatgtgaaaagacttttctaaaattcttccataataattgaagatataaattacaataattaaaatttacaaaagaataaaagcattaaaataaagtgtgaaaaatttaaaaagggtaaagatgaaaattatttaatttttaatctcaaaaatccgaaagtgattttatcaatgtcctaagaaaattaaaatgaaaacaaacttaataatgtaaagaaaggaggtttctgccgggctgggggcgggagctacggcttctctggggacgcggaagcgagaagcagggaccttggggcgcgcccggttttccgggacggtgccccggcccccagcccacgcctccggccgctggcatggtgctgctggctgggacccggccgcagggtggctgggagcgctgcatgaccccgccaccgccgtccccactcctaggcgcacaggtcgaggaggaccgcgctgactacaaagagttccagggccccacacctgcagcatagcctgggacgactctgtaccctttccaggacgaggaggagcacggcgtcgagggcttggagagcgtcccggaggagggcgtccaggaggcatggggctgctgcggacgctggtgcggcgaggggtgagcgttgagaaggcgcaggagactgaccacaatggctggaccagccttaatgtcgcctgctaccacggctttgtggatataccgtggtggccttagctgagtaaccccacactgacgtcaactggcaggacagggaggggaacgcagccctaaatacagctgcacaggcaggagctgcctctggccccatgggcaccgttgccttggacactggctctcagccttgtgcttcctggtcagcatcacgtgggctggttcatttgagctttaacacagatctggtggaaacacaggctgccaggccctgcccctggagtctttctttgaataggcctggggtggggcccaagaatgagcagaagaacaggtttcctggtgaggctgatgccgctggcccagggttctcacgttgaggaccgagagctttgaggttttcatacctgatgatgtccaggaacccttctcagtaggcactgaagaccatcagcagaatcacagaccccaggagagatgtcgtcagacagacacagaggcatcaccgaattaaagtgaaaatgaagaaaggagctgagcatctgtttcatgactttcgtggctgttttactaaagaggctatcctggcccagtcagggcacgctatcatcaccaactacttgttgaactacgttcagggtcttgatcttgaaggagggacgcgttcgggttgaaagccgccatgcagggtcgaacggatcgcatcggagccctgagctagcaggggcgggtgtccacgcgagggcccccgccgtgggatgtcgccagaggagtggccacttatacgtccgcctcatgcagaggctcctggagcgcccctgccgggagctgttggggaaaaagtaccagcttgagctgccgccgctccccgagaggccgcaaaagcccgagggctccaagaactgcctgcagaggctcagggactgcgagctgtccgcgctgacgccgcgctccatgcggggcccagaggaccggggcgccctggaccacatggtcaggatgaccacgagcctctaacagccccgccggggccctcgcgtgccagactatgtgccccgagagcaccttgtgctgggggaagaggcggctggcggtgcaggaaatcctggcggcgcaggaaattccggcggcgcggcgaggggtggggggaggcaggcgcaggaggcgggcgaagaggagggcgcagagtagcataagccgctcggcctagcggccgctggctccacaaaggcctccccaagagccggcctcccacctgcccggctgccggggtcctggggctccgccgcccccgccccgcggacggccagcctcctgcccctgcagtgcctgcagcagagcagcttggggcccagcgtggtggtgcccaggtccgcctcagcaaggtgcccgcgcccaccttccaacccaaaaggccggcgcggaagggcagcataaaggcagcggccacctgcggatacccaagtggccttacaaggtggccaaggaggagaaacgggaggcggaggaggccgagaagaggcgccaggccaaggtgcaggagaagcgcccg

SEQ ID NO: 23997 - DNA, 2300 bp, Homo sapien
aaggaaatgagtcaaagtgaatagaagaggtataagtggaggaggatgaattcagagtaaatatgtcatctaggaaatctaggtccctgcagtgctatgtgtagctatgggcagagatgactacagctgagtagaggaagctgcattcagttccccatgagaagtaaaacaacacttagagaaacttacaaccatgatgacagaaagattttacagcaacttaagaaaagcaaaaagacaaaatggttcagaaaaaaaaaacacctaagaaaaatctataaggagctgataaaaatgtgccataaactagatatggagctgctccaggaaagaaccaataatatgcctaaaaaaattttgtagtatttgaagttcataccttacaacaagcttgcccaacccacggtccgtgcggccaaggacggctttgaatgtggcccaacacaaattcctaacctttcttgaaacatgaagagatttttgtttgtcattttattaaagctcatcagctatagttaatcttagtgtatttcatgtgtggcccaagacaattctatttctaatgaggcccagggaagccaaaagattgcacacccctggcttaggtgatattatttattcaacaccatagatatgtgtgtgtgtggggggtatatatatatgtatatgtgtgtatacatacatatatgtaccatatatatcatatatgtatctcctgcttctaagagggaggaacttttccaaatagaaataacataggtgaaatgtaattcttatcctaaccatgaacaagcaagcttttttggaatctttgagtggatgtaattttatattcccctttatcaaacactgaccacagggaatattcccctctaataagcttcttttgtagcttttttctgaaaaactggacaaatgtaatgtgggagtcagacagcatgtgtcactaagctgagagcagtgacatatgcaggtgacattcgcatgtcctggcagcattgtccagcaaagtcttcctttctttggggatggaccctccctcctcacctggagcagctccacgtcaggcatgaggcacgtctcccacagctctctgtacatgtctttcatcctttctaaatgttgggtcattctcacttgactgtcttgtagttgttggaaaagctatttggcttcgctgtccagtgcctgcagatgaagttgcttctcctcatcgagaaatagatgcatcttttgatattgaatattgattatcaccttacttaatgacacatagttctgcggagacatttggttaaaaggattacatactctcactctcaacagaaaacttcaaataattatatgctgggtgtaatcaagcaatctataaactttctgcctcactcttgcaaggagtcttgaatatttgttatttctttctgtccttctttttcaatgttcctattctctctccctctttaaatcaaaacctatataaagacttctagtttctcttcctgagatgcttcttcacagttcttactgagtcaactatctcctctattaatctcccttttaggatttttccatgtctgattcgcctaaatattaaaaaacatttagccatacaccatattatgcagattgatttttccttttactgtatttttactctatatactattttatatactattctatttctttcctcttccttacacccaatcttggtgaaatgtctcatctccagtgtctgaaaaggtttataccaaccttcaaatttgaactagaatacatatcataccatttatccaataaactagaattaatttggttagcttgtgtgggcttctctatttgcaattcctattatatcaattatatcaaaccccctctctactaaaaatgcaagaaaaaaactagccagcgacagagccagactcctttcaaaaaaaataaataaataaagataaaacttctgttctgaagaaacttaatcatctatgttaacacccacctacgccctgtgaaatgcaatcaattggaagaaaggggtgtggtcttcagagatttataaaccgacacttcaggagccaagctcattcttctccagagcccacagagtagctttgcaactggctttggggacttccgaaagctaccagcactgcactgtgagactctcatccctgagctgaattcatctgattcgacggcaagctttggtgagaacatagatatatttctgaggtaagtacacaatttccagagtaggagctactattaggagctacaaaccaaaacaaaatttggggact

SEQ ID NO: 23998 - DNA, 2300 bp, Homo sapien; identical to SEQ ID NO: 23993

SEQ ID NO: 23999 - DNA, 2300 bp, Homo sapien
acgcacctgtgccctccagtggctgcatttccctgggactgcatgctgaggggatgtcacccagagaccccgacccccctcaacacacagcaccgttgttactttgcctcattttcctgctcccatgtcccagggagccagtcagtaccgcatagtagggcaattgatcggttctggctaatccataagggaggggagatctcagcctgccgcccaatggggagcatgtggcactctggaaagagcatgtgctctagagccagagggcatgggttcaaggtctcccttctacctttctagctgtgtgactttggggaagctgcttgacttctctgagtctccacttactaatctataaaagcagaagtcggatgggagctgagaggaggactctcacaagcaacctcagaggtgaataactgtgacctccaagaagtcaccatgtccttgccactctggtgggtctgggcatcttctgctgggctggcagagtaggaggcagaccaggctgctggaagcagcagctccagggcagtgctctctgcctttatctggtttgagaagcaggatgtagctgtcttccatggggcctgccataatatgaaagggactcatgccttttgacattatccaagatgctgggataggcctgggtagggcgaggatggaggctccagccaaacaccagagactcaaactctttgtgagagtggccctgcctcagtagtaacttcatgctttttgggtaggtccagccttgtatattccaaaccagaccatcagtgactgagagacgtagtgtgtttcctgctttcctctctctctccaccttttgccctctgcacaatgctgggcactcggaaagatcccaatgcagcggtatggtaaggattgactgctaacatctgcaagaggcattcaagcagttctcagccctgctgcccattggaatttcctggagaggcttaaaagatacccagaaattttgccctaattggtataggctgtggcatcaggtaaagaaacatttatttatatccttagaaaatgagccaactcagacttattcctgagcacagccccttccttgggggagaaatacagtatatttcaaggcagtcttgatattcttaaatatagtattctttattacagccttattctaagtaatgatttaagtttagggatagttttttttaaattaattttattgaggcatagtttgcacatactacaatatccccattgaaagggtacagttcatgagtttcgacaaatgtatacatttatgtaaccaccaccccggtgaagatgtagaataatccaccatcccagaaagttctcttgtgggcgtgggattttcgaagctctccaggcgattctatggtgcagcggactctgagcatcatggaggctcactcaacaatctctgctttagaatctcagagaggttgtccaggacagcacttctcacactttagcatgcatctccttggatctggctgaatgcccattccatcccagagtggggcccggaaccctgcattcctaacaagcccaaaccacactttgaggctctgctacaagtctctcattttggaggtgaaggaaacggaggctgagagtgttgatgtgagtggcttgcaaatcctgattctgaagctcctggactaatgacaatcatatcccttgcccttcaatctctttttcgacagccaccctaacccagaatcctaaacaagaggcgtagccatgataggatctctctcctatttcccttctgagtgttgtccattgcttctagcctattcccatctttcttgtcctgacccaagtcaccttcctggggaagggccccctcctctgcctgtttctgtaccagcacctaccttttccctatcaacagctcgctttcctggttcattccattccttaatatgtatcaactcaatttaataagcaagtgtttatttagcaatagaactgggtcagaccctatcgtgcccttgaggaggaaggcaaactagaagctgtgattaagttaacagataagacaaataaataacaggatatataaggtgaggagagaccttagtgactgcccagctcagttcctcattttataagtaatgtttaagagcaatgacccactcctactttcagcaaagaggtgcacatagcatagacccatagaagaggaaggatctgagaaggagtttgaaaaaagtgtaggagaggctgcgagaaaacaaggcaggtgtcctggctgagggcaggaaggagacattgcgatggaaatt

SEQ ID NO: 24000 - DNA, 2300 bp, Homo sapien
agggggaaggagagcatcaagataaatagctaatgcatgtggggcttaatacctaggtgataggttgataggtgcagcaaaccaccatggcacatgtttaactatgtaacaaacctgcacatcctgtacatgtatcctggaacttaaaataaaatagaaaagacaaagaaggatattacataatggcaaaggcttcaattcaacaagaagacctaactatcctaaatatatattcatccaacacaggagcacccagattcataagtaaagttcttagagacctacaaagtatgtttcacagtaatagtgggagactttcacactccaatgacagtattagatcattgaggcaaaaaaatgaacaaagatattcaggacctgaactcaacattggatcaaatggatctgatagacctttacagaactctgcactcaaaaacaacagaatatgcattcctcacatcatcatatgccacatactctaaaatcaaccacataattggacataaagcaatcctcagcaaatgcaaaacaactgaactcataccaaatacacactgagatcacagtgcagtaaaaatagaagactaagaaaattgctgaaaatcatgcaattacatggaaatcaatcaacatgctcctgaatgactttttaataaataatgaaattaaggcagaaaacaagaagttctttgaaaataatgagaacaaagttgcaacatactagagcctctggacatagctaaggcaatgttaggagggaaatttatagcactaaatcccacatcaaaaagttaggaagaactcaaattaataacctaacatcacaacggaaagaactagagaagcaagacaaaaccccaaagctagaggaagacaagaaataactgaaaatccgagctgaattcaaagaaaccgagacatgaagaaaaaaaaattcaaaagatctacgaattcagggtaggtttcttgaaaatattaataagaaagtctgctagcagactaatacagaggatgattgaaataaacacaattagaaatgacaaagggaatgtaattaccactgaccccacagaaatagaaacaaccatcagaaactactgcaaacacttctgtgcatacaaactagaaaacttcaaagagatggataaattcctggacaaatacaccctcccacaactgagccaggaagaaattgatttgctgaacagaccaataacaagctccgaaattgaatcagtaataaataacctaccaatcaaaaaaagcccagaacatgatggattcccagccatattctactagaagtacaaagaagagctggtaccatttttacaggaactatttgaaaatattgaggaggaggaactcctccccaactcattctatgaggccaacatcatcttgataccaaaatctggcacacacacacacacacacacacacacacacacacacacacaaacttcaggccaatacccttgatgaacatcaatgcaaaaatcctcaacaaaatacgggcaaaccaaatccagcagcacatcaaaaagttaatccatcatgatcaagtatgcttcatccccaggatgcaaggttgcctcaacatacacgtcaattaatctgattcatcccataaacaaaactaaagataaaaaccatgtgattatctcaatatatgcagaaaaggctttcaataaaattcaaggcctctccatattaaaaactctaaaaaatctgggtattgaggaaacatagctcaaagtgatgagctgtttttgtaccagtatcatgctgttttggttactgtagccctgtagtatagtttgaagttgggtaacatgatgcctccagctttgttctttttgctgaggattgcttggctattagggctctttttttttttggttccatatgaattttgaaatagtttgctctagttctgtgaggaatgccattggtaatttaatagggataacttgcatctgtaaattactttgggcagtatagccattttaatgatgttaattcttcctatccatgagcatgaaatgtttttccatttgtttgtgtcttctctgatttctttgagcagtgttttgtaattctcctagagatctcttagagatctttcacctccctggttagctgtattcctaggtattttattttttctgtgtgtagcaattatgaatgggattatgttcttcatttgactctctgctttactgctaggaatttttgcacattgattttgtatgctaagactttgctaaagtttatcagcagaaggagctttgggg

SEQ ID NO: 24001 - DNA, 2300 bp, Homo sapien
caagaaacaacagatgctagagaggctatggagaaacaggaacacttttatactgttgggaacgtaaactagttcaaccattgtggaagacagtgtggcaattcctgaaggatctagaagcagaaataccatttgacccagcaatcccattactaggtttatatccaaagaaatctaaatcattctattttaaagatacatgcacacttatgtttattgcagcactattcacaatagcaaagacatggcatcaacccaaatttctatcaatgatagattggataaagaaaatgtgatacatatgcaccatggaatactatgcagccataaaaaggaatgagatcctgtcttttgcagggacatggatgaagctggaagccataaacttcagccaattaacacaggaacaggaaaccaaacaccacatgttctcataagtgggaactgaacaatgagaacacatggacacggaggggcagaacacacaccggagcctgttgggaaggtagggggaaggagagcatcaagataaatagctaatgcatgtggggcttaatacctaggtgataggttgataggtgcagcaaaccaccatggcacatgtttaactatgtaacaaacctgcacatcctgtacatgtatcctggaacttaaaataaaatagaaaagacaaagaaggatattacataatggcaaaggcttcaattcaacaagaagacctaactatcctaaatatatattcatccaacacaggagcacccagattcataagtaaagttcttagagacctacaaagtatgtttcacagtaatagtgggagactttcacactccaatgacagtattagatcattgaggcaaaaaaatgaacaaagatattcaggacctgaactcaacattggatcaaatggatctgatagacctttacagaactctgcactcaaaaacaacagaatatgcattcctcacatcatcatatgccacatactctaaaatcaaccacataattggacataaagcaatcctcagcaaatgcaaaacaactgaactcataccaaatacacactgagatcacagtgcagtaaaaatagaagactaagaaaattgctgaaaatcatgcaattacatggaaatcaatcaacatgctcctgaatgactttttaataaataatgaaattaaggcagaaaacaagaagttctttgaaaataatgagaacaaagttgcaacatactagagcctctggacatagctaaggcaatgttaggagggaaatttatagcactaaatcccacatcaaaaagttaggaagaactcaaattaataacctaacatcacaacggaaagaactagagaagcaagacaaaaccccaaagctagaggaagacaagaaataactgaaaatccgagctgaattcaaagaaaccgagacatgaagaaaaaaaaattcaaaagatctacgaattcagggtaggtttcttgaaaatattaataagaaagtctgctagcagactaatacagaggatgattgaaataaacacaattagaaatgacaaagggaatgtaattaccactgaccccacagaaatagaaacaaccatcagaaactactgcaaacacttctgtgcatacaaactagaaaacttcaaagagatggataaattcctggacaaatacaccctcccacaactgagccaggaagaaattgatttgctgaacagaccaataacaagctccgaaattgaatcagtaataaataacctaccaatcaaaaaaagcccagaacatgatggattcccagccatattctactagaagtacaaagaagagctggtaccatttttacaggaactatttgaaaatattgaggaggaggaactcctccccaactcattctatgaggccaacatcatcttgataccaaaatctggcacacacacacacacacacacacacacacacacacacacacaaacttcaggccaatacccttgatgaacatcaatgcaaaaatcctcaacaaaatacgggcaaaccaaatccagcagcacatcaaaaagttaatccatcatgatcaagtatgcttcatccccaggatgcaaggttgcctcaacatacacgtcaattaatctgattcatcccataaacaaaactaaagataaaaaccatgtgattatctcaatatatgcagaaaaggctttcaataaaattcaaggcctctccatattaaaaactctaaaaaatctgggtattgaggaaacatagctcaaagtgatgagctgtttttgtaccagtatcatgct

SEQ ID NO: 24002 - DNA, 2300 bp, Homo sapien
ggtcttgatctcttgacctcaagatccacccatatcagcctcccaaagtgctgagattatagatgtgagccaccgcacttggccaggattccctatttaaatggtgctgggaaaactgactagccatatgcagaaaactgaaactggacctcatccttacaccttatgcaaaaattaactcaagatggattaaaaacttaaatgtaaaaccccaaaccgtaaaaaaccctagaagaaaatctaggaagttccattcaggacataggcataggcaaagattttatgatgaaatcatcaatagcaattgcaacaaaagcaaaaattgacaaatgggatctaattaaacgtaagcacttctgcacagggaaagaaactatcatcagagtgaacaagcaacctatagaatgggagaatatttttgccatctaccaatctgacaaaggtctaatatccagaatctacaaggaacttaaacaaatttacaagaaaataataaccccatcaaaatgtgggcaaaggccatgaacagacattctgaaaagaagacatttatgcgtccaacaaacatatgaaaaaaaaaaagctcaacatcagtgtttattagagaaatgcaaatcaaaaccacaatgagataccatctcatgccagtcagaatggcaattattaaaaagtcaagaaacaacagatgctagagaggctatggagaaacaggaacacttttatactgttgggaacgtaaactagttcaaccattgtggaagacagtgtggcaattcctgaaggatctagaagcagaaataccatttgacccagcaatcccattactaggtttatatccaaagaaatctaaatcattctattttaaagatacatgcacacttatgtttattgcagcactattcacaatagcaaagacatggcatcaacccaaatttctatcaatgatagattggataaagaaaatgtgatacatatgcaccatggaatactatgcagccataaaaaggaatgagatcctgtcttttgcagggacatggatgaagctggaagccataaacttcagccaattaacacaggaacaggaaaccaaacaccacatgttctcataagtgggaactgaacaatgagaacacatggacacggaggggcagaacacacaccggagcctgttgggaaggtagggggaaggagagcatcaagataaatagctaatgcatgtggggcttaatacctaggtgataggttgataggtgcagcaaaccaccatggcacatgtttaactatgtaacaaacctgcacatcctgtacatgtatcctggaacttaaaataaaatagaaaagacaaagaaggatattacataatggcaaaggcttcaattcaacaagaagacctaactatcctaaatatatattcatccaacacaggagcacccagattcataagtaaagttcttagagacctacaaagtatgtttcacagtaatagtgggagactttcacactccaatgacagtattagatcattgaggcaaaaaaatgaacaaagatattcaggacctgaactcaacattggatcaaatggatctgatagacctttacagaactctgcactcaaaaacaacagaatatgcattcctcacatcatcatatgccacatactctaaaatcaaccacataattggacataaagcaatcctcagcaaatgcaaaacaactgaactcataccaaatacacactgagatcacagtgcagtaaaaatagaagactaagaaaattgctgaaaatcatgcaattacatggaaatcaatcaacatgctcctgaatgactttttaataaataatgaaattaaggcagaaaacaagaagttctttgaaaataatgagaacaaagttgcaacatactagagcctctggacatagctaaggcaatgttaggagggaaatttatagcactaaatcccacatcaaaaagttaggaagaactcaaattaataacctaacatcacaacggaaagaactagagaagcaagacaaaaccccaaagctagaggaagacaagaaataactgaaaatccgagctgaattcaaagaaaccgagacatgaagaaaaaaaaattcaaaagatctacgaattcagggtaggtttcttgaaaatattaataagaaagtctgctagcagactaatacagaggatgattgaaataaacacaattagaaatgacaaagggaatgtaattaccactgaccccacagaaatagaaacaaccatcagaaactactgcaaacacttctgtgcata

SEQ ID NO: 24003 - DNA, 2300 bp, Homo sapien
agagcctccaggggcaactgaaagcctctctgccactgcttctgcagtggaactgtccttgctaccctcagactgatgaaggagctaacacccttatctacaccttcaacaagctttaattgaccaaagcccatctcccacgggttttacacactccccactgctcataacagacagggaacccctggattggcccccacagcatgaattctccatcctgcttgctgattgcaataaacagttgctgacctgtattctccgggggtagaaccctgaggagacaaacaaaagacccttggctacaaccactactaatgtcccttcctcttcttccccaaagttagggaagaaatataaacactgagattgccccagagctgcagtgggcagcctaggagtgccaagccatgatctacagccagcactcaaggaggagagaagcacattttcagatcattgagagtgaacatggctgcaactgtgaggaaacataggggagccacatgaccaagcaagactctaccaactgaccagtaagcccaagtgccacctactggatcacatcccaaagcttcagcaccaaaaataccttactaatatactcccctctgaaaccagaaatgagaagtcagcttcaaataaagaacctgcacaaagcctcagcctggtgaaaacatctgaaaataagtctacggactgtactcaatctacactgcaattaaaggaaaacccataggtggaaatgagaagaaaccaatgcaagaactccagtaactcaaatggcctctgtgtcatatgtccttcaaacaaccacaccagttctccaacaagagttcttaacctggatgaactgtctggaattacataaatataattgagaatatggataggaaaaaaaatcatcaagactcaggacaatggcagaacccaatccaaggaaaataagaataacaataaagtgttataggagctgaaggacaaagtagctggtataataaaaaaagaaactaactgatctgaaagcgccaaataacacaatacaagaatttcacaatgcaatcacaagtattaacagcagaaaaaaccaatctgaggaatgaatctcagaacttgaagattggttctctaaaataagatggacaaaaataaaaaagaatgaacaaaaccttcaaggagcatgggattatataaagaagccaattctacaaatcactggcatctctgaaagggaggtggagaaatcaaataacttggaaaacatttcaggatatcatctatgaaagcttccctaaccttgctggaaaggccaacagtcaaattcaggaaatacaaagaactcctacaagattctacacaagaccatcctcaagacacataaacatcaggttttccaaggtcaaaatgagggaaagaatgttaaaggcagccagagagaaaggggcaggccatctacaaagggaaccccatgaggctaacagcagatctctcagctgaaatcctacaagccagaagggattgggggactatatttaacattattaaagaaaatcttcaaccaagaatttcatatccagctaaactaagcttcctaaatgaaggagaaatgagatcatttacagacaagcaaattctgaggtaattcattaccaccacatctgccttacaagagattttagaaaggaggactaaatatagaaaggaaagaccactacacactaatacaaaaacatacttaaacacacagaccagtgacactataaagcaaccacacaaacaagccaacataataaccagccaacagcacaatgacaagatcaaatctacacaaatcaatactaaccttgaaagtaaatggacaaatgccccacttaaaaggcagagtggcaagctagattaaaaaaaaaaaaaagcgagacccaatggtatgtcgtcttcaagagacccatctcacacataatgacactcatcgtctcaaactaaaaggatggaggaaaatctaccagacaaatagaaaacagaaaaaaagcagaggttgcaatcctaatttcagacaaaacagatttcaaatgaacaataatttttcaaaaagacaagggggcaggggcaagatagccaactagaagcagctgcaattcgaggctcccactgagaagaactaaaacagtgtgcaaatcctgcaccagcaactgacatatccaggttctatgatcaggactgactaggtagttggcatggcccatagagaacaaggaaagatgggctggtggattggcccacctgggagccacatggggcaaggg

SEQ ID NO: 24004 - DNA, 2300 bp, Homo sapien
tagctatttcatgaaacttctttagagaacaacatgatactcccaacaaggctattttagaaacaaaaattatgctggattctaattaactcctaaaatggtcattttcaatgaatattgcactgatttctgaatgaaaaactgatcaatatctaatgcttgtagcagttttactttgtatatgtatgtcaaaattgataattgatgatatttttattgaggctaatatattatcctttgttgccacgactggatgaagaaactttcggaaggctaaactagtggatacaagaaacttaggcagattgttacaccatatggttgagagagataatgaatattatctactaggtatcagcaaacagatatccaaggtgattaatttagcacacttccactgaagtgatgtgaagtgtacattcaactgaattgtcgtcgtaattgtgtgccttctcagttattgggcaagttaaagagcacgatgaatgtttgtagtataatggtgtaaatccttttaatttgttgcatgaaagataagtgggatcatgtagcacctgctttgacattgattctcaggtgtatgtgttgctcctctgattttagatcactttgtcctcatcactcggcatatccacgttgatattgacatggttttattttagtttttggcatatgacaaatcataccatgtttgaaattctaagactatatttcgtggagcctgtattcccttttctcagcgtatttctgtcatgttctagtccccagacacaaagtagaagccatcaaagcctacgctaatacaggcaggaggacagaggttgatgctaacactgcatgaatatgtggataattttgtcatttttacatatgagtgattatgaatcccttttacttttcagtgtcttctgagcaaccaccaggcttgaaggtaatgaaactgtcatttatgttgtgaactagtaaatgtatagtctatgaaacatactttattaatttattattgcatttcaaattccattcaggctacaagagatgagaaagattctcttttgaatatagccagaggaaaaaagcatggagaaaaaactaggagaggtaattttgaaaagagatttaatgtcatgttcagtccagatagataagaaattctcttccgtgaataaatcagcggggggctcgttgaagctgcacattctgattcagcagtcctgagattcttcatttcaaataagttcttgggtgatgatgatgctgctggtctggaacatgatcttcgccgtaagattatacacttccccatattgaaattgggaagaagaaatatggagagcagttcaaggcataaggggctctggggaacaacataattttgctttaattctccagcttgttttcagtaagggtggaaggagaaagagaggaagtatagaatttacacacttcagatcgtactgccaagaaaagacagaaagcttgttgtaacaacccgtagacactgttaggagaactaaggagacccctggtgtagcaactattttcctaaggaagacagattgtgaggcaggaaggtgtgaaaagaggaagtcatttatataattttggggtttctgctgagaaaacctgagtgaactcacttcagatgcatttggaatattttcataacaaatatttgattttggctgctccaggaactactggaagcaggaaacaatggtataattggaatacaccaccacactgactcattactcctcttggttactaggaggcatcagagatacatgttttgttgattttagttataaaaatgagataatcttgaatatgaataaatttgtttccttgttcaaggagctacctcttggataaaatagctatttaatgaaacttctttagagaataacacgatactcccaacaagagtattttagacacaagaatgatgttgaattctaactaactcctaaaatggtcattttcaatgaatattgcagtgatttctgaatgaaaaactgattaatatctaatgcttgtagccatttcactttgtagaagcatgtcaaagttgataattgatgatatttttattgaggctaatatattatcctttggtgccaagagtggatgaagaaactttcggaagcctaaactagtggatacatgaaacttaggcaaattattacactacatgggtgtgagagataatgaatattatctactaggtatcagcaaacagatatccaaggtgatcaattcaggacacttccactgaagatatgttaagtgtacgttcagct

SEQ ID NO: 24005 - DNA, 2300 bp, Homo sapien
tactgagaatgatgatttccaatttcacccatgtccctacaaaggacatgaactcatcattttttgtggctgcatagtattccatggtgtatatgtgccacattttcttaatccagtctatcattgttggacatttgggttggttccaagtctttgctattgtgaataatgctgcaataaacatacgtgtgcatgtgtctttatagcagcatgatttatagtcctttgggtatatacccagtaatgggatggctgggtcaaatggtatttccagttctagatccctgaggaatcgccacactgacttccacaatggttgaactagtttacagtcccaccaacagtgtaaaagtgttcctatttctccacatcctctccagcacctgttgtttcctgactttttaatgattgccattctaactggtgtgagatggtatctcattgtggttttgatttgcatttctctgatggccagtgatggtgagcattttttcatgtgttttttggctgcataaatgtcttcttttgagaagtgtctgttcaaggacatacattactctttcgaattctgaataaaaattctttctccaggtgttaagttgctggaattttattgttttttttttttttttttttttcctctctctgtctctctctctctgtttgtagtaagaatgtttcagctttcaggtgaatgatcatggttaattcttgggatgtgttattttatagtaaacaaattaaactttttattacataagtatttacacaaaacaaattgtcgagtaaatgctaaccagtattattaggcatatattatgaacacaagcttttcttttaagctgatatttgattgactggtcatgtctctttttttgtttgtttctccctccttcccctttgtttaaaaataacttacctcagtctaatattttccttgcagaccgcatgtctttagtgtctattctttcatttcacctctgtttctgttgtcaggatacttagttacagctttctatttagtaactatgtgtggccttcattcatgaatcattgctccataaggtggatggttgctttgttctgtcttttttggaaggagcggaggttatacaataatttgtttttagcttttgacacacagaatagaagcaacttacactgtttaaagatagtactactaaaaactacattctcacattttttcccgcagaaagtaattcacacaaatatatatcatgcctaagtattttgaaaaataaagtgattaattgactttttattattagttttgttcagtcatactctaaattacagatgagtaaatttttgtcccagtttgttgtggttaataaaagaaactaatggatatcatagtatttgtataataatcaactggggttgaaaggagtaacattttgagaatatctgtatcaccaatcataatcatcatcccatgtgaatatgtagataagtaaatggcagacttgaggtttgaatctacatatgagtgacttcaaagtccatcctttttgtgttagatcatgtagtaatggtggcaattatcattattttaacttgctgcatgttattcttaaacctattgtgtctttcttctagaatatttcagaaccatactttacaaacagaaggactatttctcaacaatctgcagaaaagtgtaagctatttgaaacctgactattatattatctactgattcttttttttctttctttttctttcttattttttgtagacagagtgttactcaatgttgcccaggctggagtgcagtggcatgatcttgggtcactgcaacttccacctcctgggttcaagtgattctcctgcctcagcctcccgagtagctgggattacaggtgtgcaccaccacacctggctatttttgtatttttggtagagatggagtttcaccatgttggccaggctggtcttgaacacctgacctcatatgatctgcctgcatcggccccccaaactgctgggattaaagctgtgagcccccacacccggttcttatttactgattcttaattacatgcatttcatctactcttgactttgtttttactgtagtagatgctgcatgtggcattgacaaaacagaaaatggaaccttgtttgaagaccaaaatgttgataaggtaaatgaagatgtggttaaaagccaacatagaataatcagagtccagtcctgttcaccaactcactcttatctgttaatgatctttaattttacaatggtaaattgttttatttggaaaatagttttccca

SEQ ID NO: 24006 - DNA, 2300 bp, Homo sapien
aacaggggcagtgagggaagtaggagaagttacaggacagccccgtttctagcctactttctggtggtatggacagagaacaggctttgggagaagtgagttggcccaaaaaggtagtttggagagagagagttttggtacctgacatgcttgtggagacactgaggaggcagctgcatataggagcctggagctcagaagagaggttggggccagagacactgcgaggctttagcatacagatggtgtttaaagccaaggagatgaatgagtccctgagtacaggtgggcttgggggcagcatgtgtcaagctcagctgtcttgaatgtgctgagtggccaactgagcaaggacagaaagtagaggttgttggtgaccttgaccagccctctgctgttctagtctcttgatctgcctaccttgacatcagccatcagcctccctttctgtgtttccttccctccaagcctagctcagattgcaggctcggggtgctaataatgctctttcgagggagtcatgggcatgaccccccgctgtctaccttctctttgcacctgagcagcccagcgttgccagagaaacacataccagtggactggtttccttgctaagtgcaaatgtcacagggacacatggcactctccagggctcccacccagcctgctccttcttagacttatccactgtcaactgattccccatctcatgcttcacagaaagataaaagccatcacatggggacttgctgcttatccagcacatttccctgctactacagctatgtgtctgtcctaaattaaagctggtcctatgccggtgcagtggctcacacctgtaatatcagcactttgggaggctgagcggggtggatcacccaagagctgaagaccagcctgggcgacatagaccagccagggcaaacttgtctctccaaaaattagccgggtgcactgttgcgtgcctgtggtcctagatgcttgagaggctgaggtgggaggatcgcttgagcccaggaggcagaggttgtagtgagccaagtttgtgccactgcacttcagcctgggcaacagagcaagaccctgtcctaaaaaataaatagagctggtcctcctgttgggctgcagggacaaccccacccacctgcccaccagggattttgcccctgcagttatcccctttccttcttctattactaatccttcctttttatttcaccttttctggtagattgtgaagaccaggctgggttctgcctggagagaggcttggtcctctagtctcctttagggtaaattgaggcagatgctctgattctgatgtgaggcagctccaccatgaggtcgtgggagagtagcagcgtctggtgggcatgaactctggtgtcagaacttccagtcccagcactgctacttcttagcgttcactaccaggaagcagttctgtagcttccctgagtctcactttccttcttctgtaaaatgaggatagtggcggggcctgccctaaggagcactgggcagccctccaagtgccacgggccgagcgtcactccttgccgcacctcaggcctggtgtccctccccaggctgttcagctgggcgctgctgaggttcctgaactgcctgttcctgaatgtgcagctccacaagggtcagatgaagatggtccagaaggccgcccaggcagtaaggcccgccctccattgggttggggatggtgggagcagaagagcagaggctgggccaagcccttaagtcaggagcagtccccatctggtcctgcttcctggcctctctgttcccagccatacagcagtccagtccccatcagctggtgggaaaaatcccctgctctttgccgaccttcccttatgtctcacggccctgctcccatggggcttcctctaacgtctttccatcatggtcttaacaaccatgacgtcagtgcgtcggtgcagttaccttaagagttgtctaaaggctcctttgcttttgggaaatgtgctcagaggaagaactctgcagctgaactgtccctccctctggggctgccctgggtctttggctgcctgtgtcctcagggtggggcaggttggcacttccctctggctctccccggagcagggcttgccgcttgtcctcctctctactcacaaaaccctcctggatgggatcctgctgccctttatgctgctctcccagggcctgggtgtgcttcgtgtggcctgggactcccgcgcctgctcccctgccctcaggtaaaaaccttttgcctctagacatacatgggagaagtc

SEQ ID NO: 24007 - DNA, 2300 bp, Homo sapien
gagggtaaacgagatatgcgcggctgcaaggaggaaggaacagggctgagacagaataccaggaaggggacaaagagcctgtaagccagagccaagaggaagaaaaggcgaacaagaatgaggcgaacagtcttgctagagggaatagcctgagctttggccctgggcaggaaaggactaggtttgctccagaagctgacgtggttggaagccagcaagtgaggggtcgagagctgtgggaggtgaaatcgagaggcagaagggatcaaatcatgtaaggccgtgcaagtttggactggatctccaagtgcagtgaaaaccagttgcaaggttttaagtgggaagtgacatcatgaattggggtcaagagtggagaccagaagggcatctggaaggctgttttgttaatccaggtgagagatcatggtggacagtagaggttgaaaagtggattgagaggtcgaggtgatattaacaggactcactgagggattggacagtgggaacaggggcagtgagggaagtaggagaagttacaggacagccccgtttctagcctactttctggtggtatggacagagaacaggctttgggagaagtgagttggcccaaaaaggtagtttggagagagagagttttggtacctgacatgcttgtggagacactgaggaggcagctgcatataggagcctggagctcagaagagaggttggggccagagacactgcgaggctttagcatacagatggtgtttaaagccaaggagatgaatgagtccctgagtacaggtgggcttgggggcagcatgtgtcaagctcagctgtcttgaatgtgctgagtggccaactgagcaaggacagaaagtagaggttgttggtgaccttgaccagccctctgctgttctagtctcttgatctgcctaccttgacatcagccatcagcctccctttctgtgtttccttccctccaagcctagctcagattgcaggctcggggtgctaataatgctctttcgagggagtcatgggcatgaccccccgctgtctaccttctctttgcacctgagcagcccagcgttgccagagaaacacataccagtggactggtttccttgctaagtgcaaatgtcacagggacacatggcactctccagggctcccacccagcctgctccttcttagacttatccactgtcaactgattccccatctcatgcttcacagaaagataaaagccatcacatggggacttgctgcttatccagcacatttccctgctactacagctatgtgtctgtcctaaattaaagctggtcctatgccggtgcagtggctcacacctgtaatatcagcactttgggaggctgagcggggtggatcacccaagagctgaagaccagcctgggcgacatagaccagccagggcaaacttgtctctccaaaaattagccgggtgcactgttgcgtgcctgtggtcctagatgcttgagaggctgaggtgggaggatcgcttgagcccaggaggcagaggttgtagtgagccaagtttgtgccactgcacttcagcctgggcaacagagcaagaccctgtcctaaaaaataaatagagctggtcctcctgttgggctgcagggacaaccccacccacctgcccaccagggattttgcccctgcagttatcccctttccttcttctattactaatccttcctttttatttcaccttttctggtagattgtgaagaccaggctgggttctgcctggagagaggcttggtcctctagtctcctttagggtaaattgaggcagatgctctgattctgatgtgaggcagctccaccatgaggtcgtgggagagtagcagcgtctggtgggcatgaactctggtgtcagaacttccagtcccagcactgctacttcttagcgttcactaccaggaagcagttctgtagcttccctgagtctcactttccttcttctgtaaaatgaggatagtggcggggcctgccctaaggagcactgggcagccctccaagtgccacgggccgagcgtcactccttgccgcacctcaggcctggtgtccctccccaggctgttcagctgggcgctgctgaggttcctgaactgcctgttcctgaatgtgcagctccacaagggtcagatgaagatggtccagaaggccgcccaggcagtaaggcccgccctccattgggttggggatggtgggagcagaagagcagaggctgggccaagcccttaagtcaggagcagtccccatctggtcctgcttcctggcct

SEQ ID NO: 24008 - DNA, 2300 bp, Homo sapien
tggggaacccaaggaggagagggagggcttagagggtgttccagaagcatcgtggacttagaaccctgggcagaattgggtgggtggctgggaagggagaggctcctagatgggcctgatcgaagtgtggtagggatggggaaacatgattagaccagcccactcatcagggtcgtgctgacaaatagggaagaggggcttttaggcccaaatttttgagccaggagtcgttcagtgctgtttgaaggaacataggtatttattagttcagggaaatattgtggtgggaaggaggggctgaggagatacaagtggcgtcttctgtggagaacgttaatgtgagaggggagtgattgtggaaaagtctgtctttgtccccaactagatgctcattcctggtgagtaggcctctgtgttctgaccctgagttgtccctcttctattagccagcccacattcccgtaatgtttgggtggttacagggctgtctcctggtgaggaggggagggcagctgagtaggacctggtggcctcatggcgatagtcttcttcctccttggcagtcttgtgcctccttccttccaatccagccctcattctttccctctgcacagaaaggatcagcatctccggtacagcccccatctgtgctaggagatggccgggtgggtgtggatgctaagacaaccgatccccctcatgttggcccgaggagggccctgacctggatactgtgagaccttttgaggacagctggctcctttgtgggatcagttgggtgtggggcagggccttgacctgagccagcccctagtttccagcctaggttctcctcaccactaatggcctaagtgatgtctgtctgtcctgtgatggggggttgcagttaccgcaggaggccctggattatggctcagattcttatggctccatccttgcacctttccccggctcaggtttctgtggggagaaggagagtgccagaggtgactggttcatggttcttctaggctctcatggccaccatgttggaaggcagatgccaaactcagccaaggagcagccccagtggccgagaggtaatgtggctcctcccattcctcaaatcctctctgccctgccaccccttctgctgtgcccctcactcctagagcctccattgctccatctttccctctctcctgccaaggactttgagtcctctcatctctcctcatcgccctttccaggctagcctgtggtcgtcaggctttgggatgaagctggaggctgtcactccattcctggggaagtatcgcccctttgtgggtcgctgttgccagacctgcacccccaagagctgggtgagtgatggtagggccaggccccaagcaggaagcttggttctgggagccgaagctctgggaagctgcttcctttatgtccctgcaagcttggctcttccctgccccatgcctctgcttctgtctttcaggggaatggatgcactggtattggttgtatggttgggcggtggcttgttcccaggcctgggagagttgggtgggagaagtacagaggggcctaagtggtggtagggtgtgcccagagggctgggttcttatcatgcctgtgtcagttttgttgttcagttttgtggacatcacccactcagacttccccagcactcagcacatgcttgaagacctcttttttggtttgtgtcatgtgatggtggtgagggagcccagatttctcatggagacccaggctgcgttttctctgctgttgagaagataacttctggagactttcatataccactctgaaagagggtgattctgtacaggatacagcacttcagttttgagcatgggcccctttttcctgagccagcctagaatctggggtcaaacaccttttgtgaaatactgtgctgtaatcttttctcctggaagacttagcaggccaccaggcagagccagaggggcagtacaggggcgtttctttaccagtttgcaaaggccccccaggacatgctgtctctccccctgtcttgcaggagtccctcttccacagaagcataacggacctaggcttctgcaatgtgatcctggtgaaggaggagaacacaaggtagtcagagctatggactggagcaggcttggggacagggacccttgggtgcagggctgctggggccctgctttttggtgccattttcttcctctgatagagaaagaagggccccgtcctctgttccatacacaagcctgcagggaggggcagacttggagctctcttgcagttccttctgtgag

SEQ ID NO: 24009 - DNA, 2300 bp, Homo sapien
gagagagagagagagagaagggaagaaagagagagcctgcatgcaaattctcttttcctctgccttttttctatcaaggccctcaaccgattggatggtgtctgcccccattgggtgaaggtgaatattccttactctgtccagtgattcaaatgccagtctcttccagaaacaccctcacagatatacccagaaataatgccttgccagctctctgggtatctgggtatcccagtcaagctgacacctaaaattaaacatcacatctccttttctctgccccgctggtggtccccagacagactggcaagagcccctctgcccattctaatgccagctcaagtccttttctccaggtgatatacaggagaaaggcctgtcagtgccttcagggaacacctgcccccagccacagggagggcctttgtccctctgggcgcaggcagtcagttaggtgcatcaggatattctgggtaatgcattctggcatgagtccaggatggggctcaccaagtccagtccaggttgggcagggcccagctcaaatcagtttatgtttctctcagggtcgggtcagtcacaatcagtgtgtatggcagctggcctacaggtcttgctgcactgcagctctgcctctcctgcaaactgcttgagggagaaagagcacactgagtcctcggtcccagacccaatctgggtctgagagggatgcttcttttcaaatgtccaaattgcagcaaacaaccaccaccaccataacaaaatacgtttcttccaaagaagcagcacatctgacagctgaactctgagatgctgcgcctcgtctctacagtcaatccatgcaaccttctagtctaaagtctctgctttggggctacttctcagcatgagaactccttaagaggtggggacgtgttcacaacggcaaaactcggctgcctgtacagatggtgttcccagaactaagaggcgtcagccttcggtaaattcaagtctgcactcttaggaggcaacttacaacttcgaagtgaaagtctatatttttcgtttttcagcgtcagagtctcaggatctcgatgtggacaggcaccctgatacaaaagaacggtaagatggggtacaaaatggattctgcaggtaccgggaggacgttgcaaatcccaatgaaggtgagtggatgcacacacagcctggatagacacgaaatggcacaaagggagagaaaggctacatcccggaggggcagggtgtgggagtcacatcagggctggtgagtcagagacgagggaggatgtgaacacgttctgtgctgtcttgggccccgccaggctcatgtgtggctttgctccggcacacgtgtgtcacatgctctggaactgtggaatcctctggcatgtcaggcgggctcattccatgggggcaggaacagagagcccagtcattcgcacgttcatctgttctatactgcttgcctcccactggctggtctcctgctgggtgctgggaacacagttacaacatgaatgaacccataaggtctttgtttacgcggagcttagggccgagacaggagtcaggtcttaatcaaataaccacacgaatgaacacaccggccacaggcccagctgaaaccttagcaccgcgcggctgctggaggtccctgacggtggtctaggcttcacattaacaaaggaaatgacactgggaggcctgacttgtttttcatgactgcaactgtctcttgatgatcttctctcctttctaatcgtccccagctcagaattttgctagagccgaaccccagcttggaggagcgtaagccctgggataacttctttaatcagaatctggcctgagtccctgctcgaagctcaagcacccggggcctcgcggccgcctgcagtactcccctcccaccgcgggccagggccgactggaaaacggagcaggccatccccagagcacgggtcccgtggccacgttgagtgtcgcagagtacgggacgcagggcggggcttctggaccagcgcgcatcccaattggctctcggggctgccttttagccggacgcgcggaggtgggcaatccgctccttcccttgagcagtccacgccttgtggcggctttgcggagctgctgctttggcgggagttggaagctggtgtgaggtgagaggcgcggtggtcgctccccggcgaggccaggtcagaaggggaccgggatcatccaggggctttcctgcttcaagagcctggtctgagcggcctgttggggactgggcggaagtcgaaagggaggga

SEQ ID NO: 24010 - DNA, 2300 bp, Homo sapien
ccctcaggttgtcagcccttgaatctctcacgctgtccctggtcttcacagaatcccagatccccagtattagaaaggatctcgggttccccactcactctatcccagcctcttggctcaagttttcatctatagaagtggtgccagccttggccagaggaaagtggcatgtgtggtcagtgtctgttggcagcttcccagcatcaatgttcccattctcctgccactagcacccatatttgacttctccattctaggctgccatttgctgcagtgcttagcaagacattatggaaggttctggtataacggaagggatctacaacatagagtaccaccaatggttacctctggaggtggctgtgctcagagcacctgggcctgggagggaaagggtgtctcagaaagaggcatgtctcctcctttaatcagggttcctcagagattggcatttgaaatctccagactgagtaaggaatattcaccttcaccccacgggggcagacaccatccaatcagtcgagggcctggatagaacaaaaggcaatggaaaagtgaatttcctcataaccctaactaacggaggagacatgcctccctctgagacatccctttccctcccaggcccaggtgttctgagcacagccaccttcagaggtaaccattggtggtgtctatgttgtagatccctattactccggaatcttccataaagtcttgttcaacattgcagcaaaccacagcatagaatggagaaacagaaccaagaatataggtagggggatggacagatgagctttattatgggaattggctcccgtgattatggaagttgaaaagccccaccatatgccttctgcaagctagagaaccagggaagctggtggtgtagctcagtccaagtttgaaggcctgagaacctgtgggtgggggtgctgctggtccaagttatagaacccaaagcctggatctaatgtccaagggtaggagaagatggctgtcccagctgcaggagagagagagagagagagagagagagagagagagaagggaagagagagagagagagagaagggaagaaagagagagcctgcatgcaaattctcttttcctctgccttttttctatcaaggccctcaaccgattggatggtgtctgcccccattgggtgaaggtgaatattccttactctgtccagtgattcaaatgccagtctcttccagaaacaccctcacagatatacccagaaataatgccttgccagctctctgggtatctgggtatcccagtcaagctgacacctaaaattaaacatcacatctccttttctctgccccgctggtggtccccagacagactggcaagagcccctctgcccattctaatgccagctcaagtccttttctccaggtgatatacaggagaaaggcctgtcagtgccttcagggaacacctgcccccagccacagggagggcctttgtccctctgggcgcaggcagtcagttaggtgcatcaggatattctgggtaatgcattctggcatgagtccaggatggggctcaccaagtccagtccaggttgggcagggcccagctcaaatcagtttatgtttctctcagggtcgggtcagtcacaatcagtgtgtatggcagctggcctacaggtcttgctgcactgcagctctgcctctcctgcaaactgcttgagggagaaagagcacactgagtcctcggtcccagacccaatctgggtctgagagggatgcttcttttcaaatgtccaaattgcagcaaacaaccaccaccaccataacaaaatacgtttcttccaaagaagcagcacatctgacagctgaactctgagatgctgcgcctcgtctctacagtcaatccatgcaaccttctagtctaaagtctctgctttggggctacttctcagcatgagaactccttaagaggtggggacgtgttcacaacggcaaaactcggctgcctgtacagatggtgttcccagaactaagaggcgtcagccttcggtaaattcaagtctgcactcttaggaggcaacttacaacttcgaagtgaaagtctatatttttcgtttttcagcgtcagagtctcaggatctcgatgtggacaggcaccctgatacaaaagaacggtaagatggggtacaaaatggattctgcaggtaccgggaggacgttgcaaatcccaatgaaggtgagtggatgcacacacagcctggatagacacgaaatggcacaaagggagagaaaggctacatcccggaggggcag

SEQ ID NO: 24011 - DNA, 2300 bp, Homo sapien
tgcactgggctactctagacacctcttggaggtagaagcatgcaggatttgtctttttgtgactggcttgtttcgctcagcaaaatatcctcagaccaactgcatgtcctaataaagactctgtttctctccccaagcagggtgattatttcttatcattattttaattcttttgttttttgagacagagtctcactctgttgcccaggctggagtgcagtggcacaatcttggctcactgcaacctctgcctcctgagttcaagggatttctggctaatttttgtatttttagtagagatggggtttcaccgtgttggctaggctggtctcgaactcctgacctcaagtaatctgcctgccttggcctcccaaaatgctgggattacaggcatgagccactgcgcccggtctactttatttttttttactgaacattcatctttttttttgagatggagtctcactctgtcccccgggctagagtgcagtggcgcgattttggctcattgcaaactccacctctgggttcaagtgattcacctgcctcagcctcccgagtaggtgggattacaggtgcccgccaccgtgcccagctaatttttgtattcttttagtagagatggggtttcaccatggtggccagtctggtcttgaattcctgacctcgtgatccacctgccttggcctcccaaagtgctgggattataggcgtgagccaccgcgccctcctgaacactcatcttaagtggtcagccttgtgcatttgttttttgatgggtcctattctttattttacttattttttctaggtttactgaggcataatcgacaaataaaagtagtatatgtttaagtatacaacgtgatgttttgacatatgcataccttgtgaaatgatgaccacaacaagctaactagcatatccatggtgtgtatcctgacatctgtcaataccctgccctggcagcagggcgtctgcctccatcatggtctccctgtgattctgattcctatctttggagaagctctggattccaggcacagtgggaatgctgaaaggtccttgtggacaatagctattcttcttggctctgtcgcttcccttcactgggtgcaggtgactgtgggggtgtccccaaatgctgcccagcgctgacatgctccgcctctgggatttcaatccaggtggggccctgagtgacctggctctggggctcaggggtatggaggaggggggatataggtaaggagtttaaatttccaaatctgtgaaatgggaataaatactgactgatcatgccagctgctgtgggattagggggtggactccctgcgaggctctgggcatctgggggttccacctttcccacatggcaggctttctagggtgctgcacactgttcagtttgtgaaatttcctggagccctgtgcttgtgatagtgaacttttctatatgtgtactaaaataaaagcttgtgaaagtgcagtgaccttttcctccttccggagatacacggggggcgccccagggtctcaggcagctttccccatgtctaagcacaggccggggtaggaaagggggtctccctcgctggaggaataggtctatacctgggctggggcctcagctaggcctggagcaactttctgcgatgtttctctgccccctggaggcaggaaggaacctcagaagagccacactcccaagcgggcccctcctgtctttcacctgctacagccaggaaggggactgggctggggtgggaaccacaggtaggcatcggaggggctgccagtagacctggtttgggtggcgctgccggtagagctggttggggcggggctgcaggtggagctggttggggcggggctgcaggtggaggtggttggggcggggctgcaggtggagatggttggggcggggctgcaggtggaggtggttggggcggggctgcaggtggaggcggttgaggggagcaaggtgggaggtggagcagctgctatttaagagggggtggtggtgccggttctgcaattaggttactgtgtcttgctggggcttggtcttgtttgctgaaggggcagcagggctctaccatggagggtgtagggggtctctggccttgggtgctgggtctgctctccttgccaggtaagctggctgcctgtccctcctgctgctggctccagcctggagaaagctggggagaggctagaaggttgtggctggagcctgcagggattgtagctgagctcagtagctcagagcacagagctctccagggttattctagaag

SEQ ID NO: 24012 - DNA, 2300 bp, Homo sapien
gaccactggtcatggccaagagtgccaggccccagggactgtgctatgagagcaaaccttcagcaatgctctccccacatgcagaactccccggcaaggtataccagattctccagaaggaggggaagaggcccagcccagcatgggagttgggtctggagccccttacacggctgagctgaattcactcctgaatcagggatcccacctggctggggtcctcccacagagctggaaggctttggctcctggcccagcagcaagactggacctgattgtccttctgcacgctctgtaatttgcccctggaataagcattaagtcatttggaggccgatgccaaagataagggctcatatcagcctttgggatctgtggcccagactccctggctctgttgtgggctttgctgcctcagcctccagactggcctgccagggacagcggggcctcagccaagttgcccagacagtggagtagccttagagcgttggagccagtgtggaagagccgctgcaccatgatgtgctccccttacagatggagacactgagagggtgacgtggccccagggacctttggagtccttggggcttttctcctctgcatcggctctgaccccagcacacacaagctccagctccttctcacacatagtggaactgcacaggtacgatgctgccctgcacacaaccaggcatacagcacactgctgtgaggaactcagggcagacaagtccagaagggctgcgggctctccacaggtcccagctgtcactcttcaagacggtctggacacaggggtctgtgggggagccggaagggtctttcagagggcacggaggagggcctcaggagactgggggcttggagggtgggttctgaaatcccacgcagctgggggcagggcgagggcagctccagcgcagtgacgctgtctccacccacctcaacttctctgcttgagtttgggagttcactgccaacaattcttgtggctcagacaccccacgcacacctgggcctcaccacatccggcagcagggctgggggagggcggaatggaggggatacccaggcccccagtcctccgggtgcagtgctagccctggactttgctgcccggcggggctggacagggaggcctaggatgggggaggccagttctgttctgcttctccctcttccccttgccaaggtcttgaaatccccgcaggcctggggagggccgggagcgtcagcggacttccctccagggcgggcttgtggcagggggaagtacttctctctggggcctgggggctttccctgcacccaggaggaagaagctttgccctacacataactggaaaccagtcacagacccctgctttccccatgaaaggccctgggaccccccctcatttcccttcggcccaagcccaggggcctgggccccggggactgtgttctggcctagcttggccaccaacctactgcaagaccctgagtactggtcttatccaggcaatggggggtggggagggggaggagagagaaagtccctctggctcaaggtctccaaatagatgagaaataggacatctcagcagggaccccccccatcatccagtgtagaaatcacccgtggcagcaggcatttgtcaatgtttgtggtgacaaatttctaagaggaaaattctgggagggaaagggaaaaggcagaggaagcgtggggttagggggtggggtactccaagggtcatcgttggccctaaagggggacctgcatctgagaagctgggttccccaggactgagtggcttgggacaggtcaaagggtgggcgcaaaaacggaggggtgctagtccctccgactccgggtaacaccttcccttcccttagtcgctggtccccgcctcctcccggtgtgttggtccccgcgccctgccttccccctcaacctcccccccgccccgaagtctccaggtcagcccagactgcgccccacgtgaggggcgggggcgggcgcgggcgccagcgccttcctgctctgcccttgtatggtgccccggaggccggcccacgggtacttaacccgggccgccgcggagggcgcccggagtcgaccgctcgggcagcgccaccgccacgagagcccgggacgcgggaaagaccgaaaggaagaggaagaggcaccggtggccatggggctggaggcggcgcgcgagctggagtgcgcggcgctgggcacgctgctgcgggatccgcgggaggcggaacgcacgctgctgctggactgccgccccttcctggccttc

SEQ ID NO: 24013 - DNA, 2300 bp, Homo sapien
agaagctgtcttgctttctggtgttacaagatgttgtaggttcatcttgtatatttttagttttacacctggaaattaacatttctttagggagtcctggttccttttagtggaaaatggcatttaaataccacaatttggctgctaagaatattcatagctattgggtcgtttattgtttgtaggccttttcagaagacagaaccaagtaatacattttactggtatgtttatttttaagataaaataaatcctaagtatatactaatacttttaattcaaattcaggactatggagtttttatttctatcttctatcttttgtctttccctgtactgtagaactcaattcccaggaaccctaacacaactactaatttgttgaaatacacagcctcagaataacaatacagtaagatcaccaataatacgaagaataaaattttgtggtctttttgtcttcaggatgtgcatactgtgtacaaaatattgattttttttttttttttttggagacggagtctcgttctgttgtgcaggctggagtgcagtggtgcgatcttggctcacttgcaacctccacctgccaggttcaagcaattctcctgcttcagcctcccaagtagctgggattacagatgtgcaccaccacgcctagctaatttttgtatttttattagagacagggcttcaccatgttggccaggctggtctcgaactcctgacttcaagtgatccgcccgcctcggcctttctgagtgctgggattacaggcatgagccaccgtgcccagcccccagctaagatttatgacagtgtcagagtaaagatatgcagctggatcataagagaaaaaggcacaggaggagtctggaggagtccatgtgaagcttccttccccagcaatgaaatgtagcaatatgtgtgcaatgtttctgtttaggaaggccattagaaatttaacactctggctgagcacggtagctcatgcctgtaatcgcagcactttgggaggctgaggcaggaggatctctttagccaaggagtttgagatcagcctgggcaacacagggaagacccagtctctgcaaaaaataaaaaattagttgtggtggtagtgcatgcctgtagtccctgctacacaggaggttgaggtgggatgactgcttgagcccaggaggtggaggctgtactgagtcgagattgcatcactgcactccagactgtgcaacagagtgagaccttgtctcaaaaaaaagaaaaaaaaaacacccaaagtgttttttttgtttttttgtttttgtttgttttgttttgtttttctgagatgagtttcgctcttgttgcccaggctggagtgcgatggcgtgatcttggctcactgcaacctccgcctcccgggttcaagcagttctcttgcctcagcctcccgagtagctgggattactggtgtgtgccaccacacctggctagtttttttttttctttgtattttcagtagagacagggttttgccatgttggccagggtggtctcaaactcctgacctcaggtgatccatctgcctcagcctcccaaagtgctgagattacagacgtgagccaccacacccagcccaaagtgttttttaaagacggagtcttggctgggtgcagtggcacacgcttgtaatcccagcactttgggaggccaaggtgggtggatcacttgaggtcgggagttcgagaccagcctgaccaagatggagaagccccgtttctactgaaaatacaaaattagctgggcatggtggtgcatgcctgtaatctcagctactggggaggctgaggcaggagaatcacttgaactcaggaggtggaggttgtggtgagccgagattgtgccattgccctccatcctgggcaacaagaacgaaactctgtctcaaaaaaaaaaaaaaaaaaaaaaaaaagtcttggtctgtcacccaggctggagtacagtggctcaatctgtgctcactgcaacctctgcctcccggttcaaacgattctcctgcctcagactcccaagtaactgggattacaggcgtgtaccaccacgcccagctaattttttaactttcagtagagatgggatttcaccatgttggccaggctggtctcgaactctggtcctcaagtaatctgcctgccttgggctcccaaagtgctgggattataaggcatgagccaccacgcccagccaacacccaatttatttatttatttatttattttttgagacggagtctcgctctgtttcccaggctggaatgcagt

SEQ ID NO: 24014 - DNA, 2300 bp, Homo sapien
gtagttttttgtttattgtttttcttctcccagatgacaaatgtctcagtgttgtctttgcttacatcctctttgtctttctttgttgctctactaagacttctagtttctgaacctgcctttaagatctcttagtactttagatctgaaacgccgctaggtgaaagaaacaaggcgagtgactggagtatggccagcatcccttattctttcttttcattctagtttttggaacctacacagatgtgacacctcggcagttcttcaatgttcaggtgagttaatttttctctccagatttggagcctcctagcatatcaattgctactgtctacatgaatcatttatctgactcaggtgacattggcttaagtacatccatctatctacctgtcatccacattgcatagcatttaggtaaacatttgacttagaatttctttatctgtcccatggggatgagatcagttttaccctcccacaggactgttgggaatatcagatagaggaatggatatgaatactttaatgtattttatgaggctttattgtttttttccccaaacaacttaagagtaagttacatacatcatagtcctttactcctaaattcttccagtgtgtatttcctaaaactagccatatgccgtatttcttaactaatcatgataccattattgaaattagtaaatttaacactgatggaacactttcatgtagtcctctgtttgtatttatcagttttatcagttgactcaatgtcctttatagcattttccacttcagtacagataggattatatttagttgtcacatctgtttaacctcaaatcaagaacatttccatagtggagggtttttttttttctttcctctccctgagacagggtcctgctgtgttacccaggctggagtacagtggtgtgatcatgtcttgctgcagcctttgtttcctggactcaagtgatcctcccacctcagcttccaggcctacaggcatgcgccaccacacttggctaattaaaatttttttttcttagagacagggtctccctatgtctcctaggctggtcttgaactccctgggctctagtgatcctcctgcctttgcctcccaaagtgccgggattacaggtgtgagtcactgtgttggcccaatgtttatttcataaagatgaagagtatctgttcaaagactgctttcctccttgtaggggaagatggtttaaaaaatgaaacagggaggtgggatcgcccagagttctagaacaaaatttttttctttctggatttttcatttgttttgctgacttccgataactacttcgttggttataacactcactctaacgtgcaagtgcactttccctgaggtactggatcttgttaatttgtagtgaatttttgttggttttatgtatatggtatatctgtcttaagttgaaaatcttcagttactagtgatgccagaaatttaaaaaaatatgctgcttgcatttttgtgtgtgaagtgtctacttaatacttttggactttttgttgtttaaaactttttagaattgtcttacccttacacattcatatcactatatattattttccccagatgtgtctattaaaatattttgttacacttttccttggtttgtctaatgaagattcacattcagtgtaatgacattagcctgtataaggtgattttgaaagaaacatctgtagtaaacacagccatgtctctcacactctggcactgtctgttaggtcagattactctctccttgtaataagattcttggatcagagaccaaagcatctggaaagctttctgcatttttgttttgggtcttcttgggtattcatggtcttttctctttctgcagctggacacagagtatagaaaaaaatgggatgccctggtaatcaagctggaggtgattgagagggatgtggttagtggttccgaggttcttcactgggtaacccattttcctgtgagtatttttacttctgattttatttctgtccaggtttgtgtgatgcagaacactaatcctgctcctccatttctttagtatccaatgtactcacgggattatgtttatgttcggcggtatagtgtggatcaggaaaacaacatgatggtgttggtgtcgcggtatgtatggctgcctgtggctgttgccgagttcctttagctgtggccttcattcctacgtacctgagtttgtatattcttagtgtcctatgagtctcccacaggcttccctgcagccagtgccccttccatccagctagaagat

SEQ ID NO: 24015 - DNA, 2300 bp, Homo sapien
aaaagaatgaatcttatggtatgtgaatttatcaatttaaaaacaaaggggaaaaatacatacatacttataataagacaacccaataaaaaacggacaaaagatatcaattgacattttaaaaccataaaccttcatagttaacatttgagggctacttacgtgccagataacaaacactttattttattttattttttatttattttagagatggagtctcactctgttgcccaggctggagtgcaatggtgcgatcttggctcactgcaccctcagcctcctgggttcaagtgattcttctgcctcagcctcccgagtagctgggattacaggcgtccaccaccatgcccagctaatttttgtatttttagtagagatggagtttcaccatgtttcccaggccggtctcgaactcctgacctcaggtgatccgcccacctcggcctcccaaagtctgggattacaggcgtgagccgttgtgcttggctttattttattttattttattttattttattttattttattttattttattttattttgagacggagtttcgctcttgttgcccaggctagagtgcaatggcacgatcttggctccctgcaacctccgcctcccgtgttcaagcgattctcttgcctcagtctcccgagtagctgggattacaggtatgtgccaccgtgcccagctaattttgtatttttagtagagacagggtttctccacgttggttaggctggtctcaaactcctgacctcaggtgatcgcctgcctcagcctcccaaagtattgggattacaggcgtgagccactgcgcctagcctattttattttttaagagacagtgtagctgggcacggtggtttacgcctgtaatcccagaactttgggaggccgaggcgggcagatcatgaggtcaggagattgagaccgtcctgggtaacacggtgaaaccctgtctctgctaaaaatacaaaaaatcagccgggcatgatagcgcgtgcctgtagtcccagctactggggaggctgaggcaggagaaatacttgaacccaggaggcggaagttgcagtgagcccagatcatggcactctattctagcctgggtgacagagtgagactctgtttcaaaaaaacaaacaaaaaaaagagacagagtcttactgtattgcccagactggagtacagtggcagaattgtagctcactacagcctccaactcctgggctcaagtgatgttcccatctcagcctatagcttggagtacaggcatgtgccactatgcctggctaattttttaaattttttcttagaggtagggtctcactgtgtttcccaggttagtcttgaacctggcctcaaggagtcctcctgccttggcctcccaaagtgctgggactacaggagtgagcctctgtgcctggccatagatattaagcacttgacacttacttttttttcgttgttttttgttttttgttttttttttttttttgagacaagagtctcactctgtcgcccaggctagagtgcagtggcgtgatctcggcttactgcaacctctgcctcccaggttcaagtcattctcctgcctcagcctcctgagtagctgggattacagttgcgcgccaccatgcccggttaatttttgtgtttgtagtagagacagggtttcaccatgttgatcaggctggttttgagctcctgacctcgtgatccaccctcttctgcctcccagtgttgagattacagtcgtgagccaccacgccctgcagcacttgacactttgtaatctttatagccaacctcgagataggtactattattatttccattttatagatttagaaataggaactggttaaataataatctagttagtgagtgttggactaagattcaaactcaggaactcagtttttattgactatactgtgtcctgtttatatactacatactgtggtttactgtataaccttcttgcacagacctttgtgtggacacttcatttcacagggctgactaaccacctcaccatggctctttttcccctttacagatctattaatgagatgaagcggttggaagaaatgtcaaatatgtttcagagctctggagtccagcaccaccctccagaaccaaaagcccaaacagaagggaatgaagattcagagggcaaagagcaacgttgggaaatggtgatggataagaaacactttaagctgtggcggcgcccaattacaggcacccacctttaccagtaccgaggtgagcccagtgtggctatcttttgg

SEQ ID NO: 24016 - DNA, 2300 bp, Homo sapien
cccaacactattcaactcccacccccaaactctcctttcctctcttttgtacccagtagcccttttcctggtctttctcctcttaccccaacaattccaactggagattttcctctcaaacttaactgtggaacaaggatatttcatcatcaaaactgaaaattcaaagttaatgataatttttcaacttaaaagtggaacacggccgggcgcggtggctcacgcctgtaatcccagcactttgggaggccgaggcgggcggatcacgaggtcaggagatcgagaccatcctggctaacacggtgaaaccccgtctctactaaaaatacaaaaaaattagccgggcgtggtggcgggcgcctgtagtcccagctactcgggaggctgaggcaggagaatggcgtgaacccgggaggcggagcttgcagtgagcctagatcgcgccactgcactccagcctgggcgacagagcgagactccgtctcaaaaaaaaaaaaaaaaaaaaaaaagtggaacacggacatttcatcatcaaaaatgaaaattaaaagttaatgataatttgtcaacttagaagttttcttcctattcttttatttcccacacccaagagactgtgattataaccaatggccaagtagcaaaagaatactaataggaactaggcaaaatacctatcacgctttgatagcttaacttttttgtgaataaggttgtttgtggttattattttaagttgcatttataaaagttatctttcctgctaggaaaagtattcccagttcttaagatagacttgcatttacccacaattcatagtgtggcacaaatagctgcctggcatctgggtgttacacctcccacacaggccatggtataaactttattggggtatttccatttttaacctaacaaaaaatgtggaataacaggttgtttccctgtggaggaaatatcaagaataaacaggcgagtgtggaatctgcggagggaggggattgtctctggttcccgaaatcacggcaaagtactttctgtgcagggagggcacagtttaagaatatctgttgcaaagaaaatacagacacaaggtaaaccaaaaaccaaagcaaagtttccccatgacattacctggaaactacagtctcagaactacagattaacaaacgtaatcaatggtactgggcttttcacagttttgatgacgacagcatgacttcagagtctaatgggacactattcccaaagttctagttaacgtcgcaaaaatctgacctaattcttacaggttcaaatgtctgggctgctggtttgtgtaacctggacaaaatcgcttccaggctctcaattttgccacgagtcacgatgacagagggctctcctggcttttctcacaggcctgagtcccatctggattgaagtcattttgcaaatagcagcccaccacccttaggccaaatttaaaatttgttttgaatttgcacctttctggttgtgttaaagattacagattacatgaacaagggcctccatgccttcgctatctaattgatttctacagtgttgtttctttactgtcttgctcgccccactcaaagtctccctcctacacaccagcctacacactttcagttctattttataacccgacaaatgcaaattgacacacagagacaaataacaacgcggtttgctgaagcaggttcaatcgactgtattgccaattaaaagaccaccgggtaaacaagggccaacgaccacagggcaggccccagggttcacaagcccccccaccccacggcccagaaagagctcgccgcagcgcccacctctgcaactcctcctcctggatcctctcctcgtcccaaacgaagacgccggctaacgccgccatcaaggcagaggcatggccaggacggccgtgcagccggcgccagaggcggccgaggagaacgcggcgtgagctctcggagtagaggcggccgtagagctgcgcgatctgctgcgcgcgccgcacgcgcaggcccgtgacgaagcggcactgattggccagaagcgccagcaggcccccgccccgcgtccccgccagccaggcggccagcagcctccgcgggagcatgccgcctcccgcagggcccgccgcgagcttccggggcccaaggaaccagtccggaggggcgcaggcggtggtcgcagcgtccccctaaatggccggccacgaacccgtctcacggtcccgcggccaggagccgccgctcatctgtctctgcagccaccgctgaggaagagtctcctctgag

SEQ ID NO: 24017 - DNA, 2300 bp, Homo sapien
tcatcaaaaatgaaaattaaaagttaatgataatttgtcaacttagaagttttcttcctattcttttatttcccacacccaagagactgtgattataaccaatggccaagtagcaaaagaatactaataggaactaggcaaaatacctatcacgctttgatagcttaacttttttgtgaataaggttgtttgtggttattattttaagttgcatttataaaagttatctttcctgctaggaaaagtattcccagttcttaagatagacttgcatttacccacaattcatagtgtggcacaaatagctgcctggcatctgggtgttacacctcccacacaggccatggtataaactttattggggtatttccatttttaacctaacaaaaaatgtggaataacaggttgtttccctgtggaggaaatatcaagaataaacaggcgagtgtggaatctgcggagggaggggattgtctctggttcccgaaatcacggcaaagtactttctgtgcagggagggcacagtttaagaatatctgttgcaaagaaaatacagacacaaggtaaaccaaaaaccaaagcaaagtttccccatgacattacctggaaactacagtctcagaactacagattaacaaacgtaatcaatggtactgggcttttcacagttttgatgacgacagcatgacttcagagtctaatgggacactattcccaaagttctagttaacgtcgcaaaaatctgacctaattcttacaggttcaaatgtctgggctgctggtttgtgtaacctggacaaaatcgcttccaggctctcaattttgccacgagtcacgatgacagagggctctcctggcttttctcacaggcctgagtcccatctggattgaagtcattttgcaaatagcagcccaccacccttaggccaaatttaaaatttgttttgaatttgcacctttctggttgtgttaaagattacagattacatgaacaagggcctccatgccttcgctatctaattgatttctacagtgttgtttctttactgtcttgctcgccccactcaaagtctccctcctacacaccagcctacacactttcagttctattttataacccgacaaatgcaaattgacacacagagacaaataacaacgcggtttgctgaagcaggttcaatcgactgtattgccaattaaaagaccaccgggtaaacaagggccaacgaccacagggcaggccccagggttcacaagcccccccaccccacggcccagaaagagctcgccgcagcgcccacctctgcaactcctcctcctggatcctctcctcgtcccaaacgaagacgccggctaacgccgccatcaaggcagaggcatggccaggacggccgtgcagccggcgccagaggcggccgaggagaacgcggcgtgagctctcggagtagaggcggccgtagagctgcgcgatctgctgcgcgcgccgcacgcgcaggcccgtgacgaagcggcactgattggccagaagcgccagcaggcccccgccccgcgtccccgccagccaggcggccagcagcctccgcgggagcatgccgcctcccgcagggcccgccgcgagcttccggggcccaaggaaccagtccggaggggcgcaggcggtggtcgcagcgtccccctaaatggccggccacgaacccgtctcacggtcccgcggccaggagccgccgctcatctgtctctgcagccaccgctgaggaagagtctcctctgaggggagagtcggtcatggcagcagacgccgggatggctccgcgactgctacaccaggcactcctgggcccgggcagcagaccagtcagccctgtggctcctcggcgacctccagcgggcgcccggggccgggatgcagggcgcgcggacagaaacgagacagacagctcaggcccagcagcacgcaagctcccgcgccttccgcgactgccacacgcgcggcgcgcgcgcaccctactttttctccgccacctgggccgtgattgggcgcgacctgggctcctgggtgctcattggcgccgtgaagtgctcgtcaccgccccctcctgccccttcatgcatgcgcggaggccgcctgctagcaaggtaggtggctcggcggcgagagccgtcaagggcgcattggagagtgaccctcggacccggctgccgccgtcgccgccatcttccggccgtcccagccccgccccgcggagaaacctggccaggttcctgttagaatcctgccaggtgttaacttgttttaagag

SEQ ID NO: 24018 - DNA, 2300 bp, Homo sapien
ccccatggtggagctacagacacccaccatgtggctacagaatcagtccggagaaggaaggaggcactggcagcacctaggatactcagcaacctgccaccccatgatggggctatagctacagacactccatgacctggctacagcgccccgctatggagctacagataccctgtgacagggctacagttatgggatgtctccccaggactatttctccattgcgattaagtccatgcatattgggctagcagtgccccactggcagagacggtgccagagttagcccctagtccaagagaactatgtggccgcttaggctggcctctggatctgtcaccagaggtggggctaccgaaccatggacaggtagccacaaggggtatcccagacgaacccccaaatttgtaaccgtacaatgggttcaccttgcccactgcctagacagagccgatttatcaagacaggggaactgcaataaagagtaattcacgcagagcccactatgagactggagtttgtttcaacattactcaatcagtctcccttagcattccgggatcagagtgtttaaggataatttggtgggtgggggaaggccagtgagtccagagtgttgactggttgggtcgagatgaaataatagggaattgaagctgtcctcttgcactgagttggttcctgggtgggggccacaaggtcagatgagccagtttatccatctgggtggtgccaggatccaaccagtgcggggtcagcaaaatatctcaagcactgatcttaagagcagtttagggggatcacaatatcgtagcctccagctgcatgactcctaaaccataatttccaatcttatggctaacttattagtcctacaaaggcagtctagttcccagataagaagatttgttttgggaaagggctgttatcctctttattttaaactataaactaagttcctcccaaaattagttcacctaagctcaggaatgaacaaggacagaagcaagatggaattggttaggtcagatctctttcactgtctcagttttaattctgcaatggcggttatcactgggagcccccagcccccgcagagacatgcggagccccgcccccaccctgcactctaataaagaagggggccagcgtgccggcctcttaaaacaagttaacacctggcaggattctaacaggaacctggccaggtttctccgcggggcggggctgggacggccggaagatggcggcgacggcggcagccgggtccgagggtcactctccaatgcgcccttgacggctctcgccgccgagccacctaccttgctagcaggcggcctccgcgcatgcatgaaggggcaggagggggcggtgacgagcacttcacggcgccaatgagcacccaggagcccaggtcgcgcccaatcacggcccaggtggcggagaaaaagtagggtgcgcgcgcgccgcgcgtgtggcagtcgcggaaggcgcgggagcttgcgtgctgctgggcctgagctgtctgtctcgtttctgtccgcgcgccctgcatcccggccccgggcgcccgctggaggtcgccgaggagccacagggctgactggtctgctgcccgggcccaggagtgcctggtgtagcagtcgcggagccatcccggcgtctgctgccatgaccgactctcccctcagaggagactcttcctcagcggtggctgcagagacagatgagcggcggctcctggccgcgggaccgtgagacgggttcgtggccggccatttagggggacgctgcgaccaccgcctgcgcccctccggactggttccttgggccccggaagctcgcggcgggccctgcgggaggcggcatgctcccgcggaggctgctggccgcctggctggcggggacgcggggcgggggcctgctggcgcttctggccaatcagtgccgcttcgtcacgggcctgcgcgtgcggcgcgcgcagcagatcgcgcagctctacggccgcctctactccgagagctcacgccgcgttctcctcggccgcctctggcgccggctgcacggccgtcctggccatgcctctgccttgatggcggcgttagccggcgtcttcgtttgggacgaggagaggatccaggaggaggagttgcagaggtgggcgctgcggcgagctctttctgggccgtggggtgggggggcttgtgaaccctggggcctgccctgtggtcgttggcccttgtttacccggtggtcttttaattggcaatacagtcgattgaacctgcttcagcaaaccg

SEQ ID NO: 24019 - DNA, 2300 bp, Homo sapien
ctcctgcctcagcctcccgagtagctaggattacaggtgcccactaccacgcccggctaattttttgtatttttagtagagacgaggtttcaccgtgttagccaggatggtctggatcttctgacctcgtgatccgcccgccttggcctcccaaagtgctgggattaaaagtgtgagccaccatgcccggcctagagctcttttttctaagaaaaaatccttttaaggccaggcacggtgggtcattgaatcgtgaattcaatgggtggtctctgagcagtcaccctgaatcaggcctgttaaacttctttcagggctcactgaatgtgactagataaataaggagtgttctccaagttaggcctgctggattttcatcagcaattccttcagagatcccctccatatatacaaacacacacacgaagacaagacagacagaaggccttccaaattaaggtccctaaccaagaactccaagagtaccccttccaaactatcctcctattctccatctgacaaatctccctgaaatattcctgattgagaagtctcccgaaccaagactcttcctagttagggacagccaactgggatgccccaggagccaaactgagacagacaccccatggtggagctacagacacccaccatgtggctacagaatcagtccggagaaggaaggaggcactggcagcacctaggatactcagcaacctgccaccccatgatggggctatagctacagacactccatgacctggctacagcgccccgctatggagctacagataccctgtgacagggctacagttatgggatgtctccccaggactatttctccattgcgattaagtccatgcatattgggctagcagtgccccactggcagagacggtgccagagttagcccctagtccaagagaactatgtggccgcttaggctggcctctggatctgtcaccagaggtggggctaccgaaccatggacaggtagccacaaggggtatcccagacgaacccccaaatttgtaaccgtacaatgggttcaccttgcccactgcctagacagagccgatttatcaagacaggggaactgcaataaagagtaattcacgcagagcccactatgagactggagtttgtttcaacattactcaatcagtctcccttagcattccgggatcagagtgtttaaggataatttggtgggtgggggaaggccagtgagtccagagtgttgactggttgggtcgagatgaaataatagggaattgaagctgtcctcttgcactgagttggttcctgggtgggggccacaaggtcagatgagccagtttatccatctgggtggtgccaggatccaaccagtgcggggtcagcaaaatatctcaagcactgatcttaagagcagtttagggggatcacaatatcgtagcctccagctgcatgactcctaaaccataatttccaatcttatggctaacttattagtcctacaaaggcagtctagttcccagataagaagatttgttttgggaaagggctgttatcctctttattttaaactataaactaagttcctcccaaaattagttcacctaagctcaggaatgaacaaggacagaagcaagatggaattggttaggtcagatctctttcactgtctcagttttaattctgcaatggcggttatcactgggagcccccagcccccgcagagacatgcggagccccgcccccaccctgcactctaataaagaagggggccagcgtgccggcctcttaaaacaagttaacacctggcaggattctaacaggaacctggccaggtttctccgcggggcggggctgggacggccggaagatggcggcgacggcggcagccgggtccgagggtcactctccaatgcgcccttgacggctctcgccgccgagccacctaccttgctagcaggcggcctccgcgcatgcatgaaggggcaggagggggcggtgacgagcacttcacggcgccaatgagcacccaggagcccaggtcgcgcccaatcacggcccaggtggcggagaaaaagtagggtgcgcgcgcgccgcgcgtgtggcagtcgcggaaggcgcgggagcttgcgtgctgctgggcctgagctgtctgtctcgtttctgtccgcgcgccctgcatcccggccccgggcgcccgctggaggtcgccgaggagccacagggctgactggtctgctgcccgggcccaggagtgcctggtgtagcagtcgcggagccatcccggcgtctgctgccatgac

SEQ ID NO: 24020 - DNA, 2300 bp, Homo sapien
tacaaaatcaccctacagcttctaaaactcaagagagatgcaaaacagtaagagaacactcagagaaaggcaacatttggccacaaggatgaggcttttcagcctagacctgcagaagcagagtatggtccgatgcacagcggggaacttggaccttttcaccaaatcccagtgcctgaattcttcaggaggtaacacgcagatatctaacaggaagtgcttctgataggcggtgcagtaaacatctggaatgcatcacagccagggaatagcacagacaggatagcacagagaggatataagaccttcaagatggctcaaaagaccttggggttgatgaactatgctgttactaaggactgtttggggtacattgatcattgttagggtaaaaagcaggtgatacagtccagtcctgtcctcacacttcacaatttttactggagacaagaatgggcaggataaactatggggcccataggaccctcccatcgtctgctgtctatctggccggaaagcatgatgatgaacaaagcaaccttgcctctgtcaggcacacctataatggttccaagagccacattccgactgttgtactgcgggtggcaatggaacggtcttccgattacctaaaatgccacagattcccttcttctctaatacgcatccgattaccatagaactctaagatatcttttaaaacctagtcatattaaaagttcctttttctccattaatcagtctgccccaaagaagcttttccgtatttcacaggatccttagaagaggccagctaactgtgatacctagcacccttatcttttctcgatacacagcgtccttcctccagcagaatcctaaaatagcagcagtccggattaacatggctgtgaggagtaggtgcttagctgaataacatcagaattaatgaggggccggaccccaaacagagccacctggtgggcatgaacaccaggcagttatggggccgtttccttcaaccaagtgtctggtccctggctatctctgcttcagccagaacacattctgtcccccaccgaggctttaagggccagcgcgcagcaccctcacctttcagcaggtccgggtgcacatagcccaacacgtcggagacccccagctcctggcgcgaacaggtgcctccgtggatgtgcaaccaggcgggctcggcgagggcagtgcacagcgccgtgatagacagggcgccaggcagggccgaggccaggctacgctccggctgcttgggcagagcgctgcctcccgggctcctccgccggcgcccgccgggcagccctgcgcctccgggggcgtacatgcccggggccgcccgccgtcgctccgcagtcgctgctggtcgccgccgacctccgcggggcgcgcagagcctgacagtccggtggaggatagcaacgctccgggttcgctgcaggtgaagccgggactgggctgtcagggttgacaccagaggataggggggtgggacccggggctgacggagacggggagggctgcgggaattcggggggcggagacaggagactccggaatgggactgcgggacgacaaccgaagagggccaggggccagatggggtctgggcagactcgagtggggggcggagggatcggggatcggctactgctagagcaaagacccggagtcagggtctcagccagaggatgccgaggggcggaggaccgggctgggccgcggggatcggggacccgtgatctgggaccggcggtttggggtgcgacctgtgcgcagaaaagaccctccccacgccgcccactgttcctcaccagtcagcaggccccagggctgggatggtgctgctcagcccagtcacgggcttctcggctgccgggggccgagcgttcccaggccccaatcccgcaacgcccggacagacccggggccgatgcacttccggcttcctcctcctctgcctccgcctcctccggctccccgccccgtcccccgcgcgcgtcacagcctgggcgcgccgccggctctgcgcagggcctcacgggactggtagttcgaggcggtcccgcgatgctttccctgccgaggtgaggggagcgactacaactcccagagggtatggcggccgcagcagtgggcagttgagtttccggggcgacccaggtcctccggcggaagcgggagcctctgtcggccgcggaagcctggagtgggcggtacgcagacgcgcgcggtgagacccgctgtctgctcagcggactctgcccgcccccacctccccctgcgtcggg

SEQ ID NO: 24021 - DNA, 2300 bp, Homo sapien
tgagattataggtgtgagccaccacacccagccggatctgtttttataaagggactaatgttttttgttcacagatggaactctccgtaaaagctagattaaggctgaaaagcagaggaaggctgggcacaagcctgcacaccagagcccttcccacaagagtccctgcttgactcttacctcctgacttgggtgccaaaccacatgcttgacatcctgtgtgtgggagttgagaacactgacacattcatactcatcctcttcatcaactgtgggagagaaaaaggggacccaagagccgaccctgtcagggacacagagggggctgtcaggtggttcccaatccacctggagggacctggcctcaccttcccagacccaaacgctcttatctcggctgcaagtggccaggaggttgccagatggggcccaagccactgacttgacctcattttcatggccctcgagagtggttacacactgtgaaaggggaaagaaaatgagaattaacagcagctaacacccctaagccccttcccatgggtacagcccaactggcgcaggttggctcaggttcctgaaccagccctggggaggaaacaggcaataattctggtcccaaccagcctgggtacctcaaagtcatcctggttcttcttccaaatgcaagtggtagcatcaaagctggcagaggccaggtaattaccgcagggggaccaggctaccttccgcacggtgcgctggtggccttcagaaaggacagacttgcagatccagctgtcacctaaaggcggagcgcaggccaggctctggagctgggtgcagcaccatgaagccattcaatatcaggggctagcactggaatcaagctagtgggggaaagctcagggagtgtatttcacagcttttacaaagatgcaaatgaatctacttcgtctggaagcttttttttttttttttttttttttttgagacggagtttttgctctgatgcccaggctggggtgcaatggcacaatctcggctcactgcaatcttcgcctcctgggttcaagggattctcctgcctcagcctcccgagtagctgggattacaggtgcccgccacaacgcccagctaattttgtagttttagtagagacggggtttcaccatgttggccaggctggtcttgacctcttgacctcaggtgatctacccgcctctgcttcccaaactgctaggattacaggcgtgagccaccgcgcccaacctctggaggcatctttctaaaacaaatctgatctaaaattgctattggttccccaatgccctcgggataaaatgtgaccatccagtcgcaagttactctgaaggccactttcctaacacctctcttttcccattttcctgcctctgcagctaacacaattcccttgacatttcagcttgtctgctgacgtttttcctcccaacagtcgcagacttctttgcctgtaaagcccttctcggcgtggctaacatcccactctccctccgccaggaacaggttcagcctcccctgcaggctgagcgcctgcactacgcgcaggctgagccctcagcgctgagggccgcgcaaccaggctgggccttaccctccgtgccccagatgcggattctccggtcgccgccgcacgaggccagcagggtccccgcggggttccaggccaggaaccagcagcgggagtccgggtgcgccgggacacggcccagcagcaccagcgagtccttcatgtcggcccgacgcagggggaggtgggggcgggcagagtccgctgagcagacagcgggtctcaccgcgcgcgtctgcgtaccgcccactccaggcttccgcggccgacagaggctcccgcttccgccggaggacctgggtcgccccggaaactcaactgcccactgctgcggccgccataccctctgggagttgtagtcgctcccctcacctcggcagggaaagcatcgcgggaccgcctcgaactaccagtcccgtgaggccctgcgcagagccggcggcgcgcccaggctgtgacgcgcgcgggggacggggcggggagccggaggaggcggaggcagaggaggaggaagccggaagtgcatcggccccgggtctgtccgggcgttgcgggattggggcctgggaacgctcggcccccggcagccgagaagcccgtgactgggctgagcagcaccatcccagccctggggcctgctgactggtgaggaacagtgggcggcgtggggagggtcttttctgcgcacaggtcgcaccccaaaccgccg

SEQ ID NO: 24022 - DNA, 2300 bp, Homo sapien
tctttccagcctgtcttagaagtgatctgctcccgaatgcgctacatctcctcccagattgagcggcccattcgcattgtggcactcagctcttcgctctccaatgccaaggatgtggcccactggctgggctgcagtgccacctccaccttcaacttccatcccaatgtgcgtcccgtccccttggagctgcacatccaggtaggacccactctcctcatccgtctgtggggtgtcacatagatcctgagtgacccaggtctgataaccttggtgtcttttcttctccccggtcgccagggcttcaacatcagccatacacaaacccgcctgctctccatggccaagcctgtgtaccatgctatcaccaagcactcgcccaagaagcctgtcattgtctttgtgccgtctcgcaagcagacccgcctcactgccattgacatcctcaccacctgtgcagcagacatccaacggcagaggtaggtggggcctggcgtctgggggttggggttaggttaagtgaggctggcctactccaagggtgtcctctttatgagggtggggttagcccatgttgcttggggccaggttctgcacagctggcaaagtgtctgccaggaattgaactactctgagctgagccagtgcctgtaccgcacaggttcttgcactgcaccgagaaggatctgattccgtacctggagaagctaagtgacagcacgctcaaggaaacgctgctaaatggggtgggctacctgcatgaggggctcagccccatggagcgacgcctggtggagcagctcttcagctcaggtaagtcaggccacggaaggggagcatagcaagggtatcaccaagtggtggtgttaaacttgaggggtgcgggtggcagtgttttctctacagcataccagagattttcaaaatactgtttaggactcttggctgttaactcatttgatcctcccaagaacctcgtgaggcaggtgagacaaacactatccctacttgccaggtgagaaaacaggcagacacatcaggttgtgctatttcagaacctggttttctagagtccaggacctttggccaccagaccgctgattctccgtggataccagactccccaagtgtattagtccgttcttgtattgctataaagaaatacctgatactgggtcatttataaagaaaggaggtttaattgactcagttctgcaggctgtacatgaaacatggtgttatctgcttctgggaaggcctcagggaaggcaaaggggaagcaggcatcttatatggcaggagtcaggaccgagagagtgagtggggaggtgctacacacttttgaacaaccagatctcgtgagaactcattcactagacagtaccaagggtgggtggtgctaaaccattcatgagaactctgcctccattagccagtcatctcccaccaggcccttcctccaacactggagactacaggtcgacgagatttggtggagacacagatccaaaccgtctcaccaagatagttagactttagagattagcacagaggagagctctgattctcccttgagctcactcttgctggccactgtctcttgttgccctgtggcattttgtgcaaagatttacgttttaatactgtttattggagcctcattggagattcttctgccagaatcacttcctgtcactctttggcccttgaatctgcctgtttggggcatgcttagagtgatctctgttttgctggcatggctgagccagcccgtggctgcatgagtgttagcactttctggtcagaggagcagtccatcagctgtagttttgccttggtgttcctgggctttgggttctgttctatgatgacttgttttctcctggatagtcccagagcaaggcaccagcagcgtggagctacctcatagcaatgtgttagctctcattcatgttagaccttgttcctagccagccttgctgtgagttctgaaacatagcacagggtaagccacggcctgcccatgaggcagtgagcctacttcacccggagacccctgccctcagccttcctctcccctctactgctcaggggctatccaggtggtggtggcttctcggagtctctgctggggcatgaacgtggctgcccacctggtaatcatcatggatacccagtactacaatggcaagatccacgcgtgagtacaactggtgctctgtgttagcacagacctccttcctaaaatgaatgtgaatctgcagatacacagaaagtaagctaggatgaagaaaaggtgt

SEQ ID NO: 24023 - DNA, 2300 bp, Homo sapien
agaactgcctgacttcatttcgtatgttgtcctttgttttgacaattgatccatgtcccagtccgtctcttcttccttcttgatacttacactgcttctttctgttggtttccagtgtttaacactgtatacaacagtgacgacaacgtgtttgtgggggcccccacgggcagcgggaagactatttgtgcagagtttgccatcctgcgaatgctgctgcagagctcggaggggcgctgtgtgtacatcacccccatggaggccctggcagagcaggtatgacgtggcgctgtgtcatgtgaatttcccaagaagcatttcatctgtgattccgtatgaaggctttctaagccctgaaatttgcagggtcatttcctcagtttgtgtattaaagaaaagctgccccagccaagcgtggtggctcacgcctgtaatcccagcactttgggaggccgaggcgggcagatctccggagatcaggagttcgagaccagcctggccaacatggtgaaaccctgtctctactaaaaatacagaaattagctgggcgtggtggtgtgcgcctgtaatcccagctacttggaaggctgaggcaggagaatcgcttgaacccgggaggcggaggttgcagtgagccaagttcgcaccactgcactccagcctgggcaacaagagcgagacttcatctcaaaagaaaaaaaaaaaagaaaaagctgccccatcgcatcgcatagaggctgctatgggattagaacgtagcttgagatctgcaggtcaacaggtctgtttggcatctcaggttttcctcacataagtgaaagatgcctggtatggcctagtgttgttctgcctccctcctctgcccgccaggtatacatggactggtacgagaagttccaggacaggctcaacaagaaggtggtactcctgacaggcgagaccagcacagacctgaagctgctgggcaaagggaacattatcatcagcacccctgagaagtgggacatactttcccggcgatggaagcagcgcaagaacgtgcagaacatcaacctcttcgtggtggatgaggtccaccttatcgggggcgagaatggggtatggcgtgaccttgcagcacagatgagggactgggactgaccaagtggccttggcattggacctaatgtttgggtctgaggacggaggctcggggcttctccccagaggattctacctgctgccctattccaaagggacaatgttaacttttttggtagtactttaggaaaacagtattgtttagtggaggttggctgccgtggaggaggtagaaccaaacacatgagagctcctagttagaaggaagaatgaggtcattttgaggctgttgggctgttcacaaaggggacctccaggcagaggatgggagccttggcctgcagtgaccctccctccctccctctttccagcctgtcttagaagtgatctgctcccgaatgcgctacatctcctcccagattgagcggcccattcgcattgtggcactcagctcttcgctctccaatgccaaggatgtggcccactggctgggctgcagtgccacctccaccttcaacttccatcccaatgtgcgtcccgtccccttggagctgcacatccaggtaggacccactctcctcatccgtctgtggggtgtcacatagatcctgagtgacccaggtctgataaccttggtgtcttttcttctccccggtcgccagggcttcaacatcagccatacacaaacccgcctgctctccatggccaagcctgtgtaccatgctatcaccaagcactcgcccaagaagcctgtcattgtctttgtgccgtctcgcaagcagacccgcctcactgccattgacatcctcaccacctgtgcagcagacatccaacggcagaggtaggtggggcctggcgtctgggggttggggttaggttaagtgaggctggcctactccaagggtgtcctctttatgagggtggggttagcccatgttgcttggggccaggttctgcacagctggcaaagtgtctgccaggaattgaactactctgagctgagccagtgcctgtaccgcacaggttcttgcactgcaccgagaaggatctgattccgtacctggagaagctaagtgacagcacgctcaaggaaacgctgctaaatggggtgggctacctgcatgaggggctcagccccatggagcgacgcctggtggagcagctcttcagctcaggtaagtcaggccacggaaggggagcatagcaagggtatcaccaag

SEQ ID NO: 24024 - DNA, 2300 bp, Homo sapien
ggaggtgctcagtctacgttgctgggccgaggagatggattggaggcactcagtctacgttgactcacattccttttacccttgctcctgttggcaggtgcatggttcatccgaggctttttggattctggtggaggatgtggacagcgaggtgattctgcaccatgagtattttctcctcaaggccaagtacgcccaggacgagcacctcattacattcttcgtgcctgtctttgaaccgctgccccctcagtacttcatccgagtggtgtctgaccgctggctctgtgagtgtctcctctccagagtccccaggaacagtccctccaaggacagtagaagaatgtcttgcactttgtcccgggcttgcccttgctggggacagagtgatacatatgctgcctaggtttccagtgttcatggaggggatctagaggccagtgagggaaagagagcagtgcttatatccttcctgtttcttttctggcagcttgtgagacccagctgcctgtctccttccggcacctgatcttgccggagaagtacccccctccaaccgaacttttggacctgcagcccttgcccgtgtctgctctgagaaacagtgcctttgagagtctttaccaagataaatttcctttcttcaatcccatccagacccagggtaagtgtttccatccctcctctggaggcttttgaagtcaccgggagacagatgtgctctgtggcaggcaggggagtgggggtgctcaggcacttgggaggtctgggagctcctcagtgtgaccgctgggacccaccaggactttttcctttgtcagaagcctttggttgctttgctgctctgcatgtgtcactgtggaggggcaatagagcaaggccttacatggcatggtcatttctcgggcccaggaggcttagaggcctgcccctggcgctcaagtattgaaccagaaccatggggtggcactgaagcctcctcaccacatcatgataaataacggggacattcacagagcaggcactgtttcctcagtccatggctgagtacatcaccggtgttttctctcttattcctcccatcaagcctaaaaggaatctctattggagatactgccattagtgttccttttataggtgaggaactgaggcatagagggttccccagttgaaccaactgataaatagtagaacttggattttaattcagtcttgatgccagggataaggctcttactttctaccttaggctatttctaggaaacgcaggagagtgttgaaggggcagagaaagggatccagttcctttctgtcccgcatcctagtccctgagaagcaaagaagaatgtgtggcttcttttgctttgcttttgttgtcatcccacacatctccaggggacctgggctcttgatcttggcctcttcccctttaactgttaagtgggagcaggtaagggggtacagtagggctggcctggagttagaggcttggatgccttagctcctctgtctgcactccagaactgcctgacttcatttcgtatgttgtcctttgttttgacaattgatccatgtcccagtccgtctcttcttccttcttgatacttacactgcttctttctgttggtttccagtgtttaacactgtatacaacagtgacgacaacgtgtttgtgggggcccccacgggcagcgggaagactatttgtgcagagtttgccatcctgcgaatgctgctgcagagctcggaggggcgctgtgtgtacatcacccccatggaggccctggcagagcaggtatgacgtggcgctgtgtcatgtgaatttcccaagaagcatttcatctgtgattccgtatgaaggctttctaagccctgaaatttgcagggtcatttcctcagtttgtgtattaaagaaaagctgccccagccaagcgtggtggctcacgcctgtaatcccagcactttgggaggccgaggcgggcagatctccggagatcaggagttcgagaccagcctggccaacatggtgaaaccctgtctctactaaaaatacagaaattagctgggcgtggtggtgtgcgcctgtaatcccagctacttggaaggctgaggcaggagaatcgcttgaacccgggaggcggaggttgcagtgagccaagttcgcaccactgcactccagcctgggcaacaagagcgagacttcatctcaaaagaaaaaaaaaaaagaaaaagctgccccatcgcatcgcatagaggctgctatgggattagaacgtagcttgagatctgcaggtcaacag

SEQ ID NO: 24025 - DNA, 2300 bp, Homo sapien
cagctatgaaatgggatattactacagaacctatagccactggaaggataataagggaatactatgagtaattttatgctcataactttaaaaattcagaagaaatggaccagttctccaacaactaccagttaactagcaaaactcagcccagatgaaatagataacatgaagagccctacaactattagagagttggagaattaaaaatccccccagcaagcaatccccagtcccagataattgttttgtgcattcgcattatccagggtccctccataaaagatttggggtcacttacactaaaaatgcaagacaataaaaagaggaaaatgaaaaactagagggcattttactagacagtgtgatagaatttttaaattgaaagtcgagttgagcaatgttaactaacaaaaaataaggaaaagtgactggttttgtatttctttttgtctgatgaaaagaagcatatgaatttatatgaagagacagatcttttcttggcactaaatactaggaagacttcattccctacaacagtgtactagtctcagacttatttcctaaatccttttataagtagtgtaatgttttagttgttattttgcagacacattttcatgcagctttgactcttgttaggtgcttgaacataaattctgagttgagaggcccgaatttgtagttgtagtctatttaaagttgctgttcaagataggatgttgaagttggtttaatttctcagctccaggactgtgaacttggtgggtgcattcccttaaaagtctttccagccgtgtttaggcttcctctgagcctgcacacattcctgcccttgcccctctccaggaccttggcttctggtggtgatggtgcaacttctgcttcctgctgcaggtgccctggggctgtgagtatctcgtgactgtagcaaactgtggcttctccttaggtgctggtgtttgtccactcccggaaggagactggaaagacagccagggccatccgggacatgtgcctagaaaaggacactctgggtctgtttctgagggagggctcagcctccacagaagtcctgcgaacagaagctgagcagtgcaaggtgaggaggggccagctgggttctctcattcctacctggcagctgtgtccatctcaggccccagacagctcctctaggactgtactgtggtattgttgtttcccatgggttaaggttgattgtctggatgtgattattactattccacataatagttaaggggcagggtctcatgggaggagatttccttagtccttggatgagtcctacaggaaggctcgcctcatccccggttctttgttccacagaacctagagctgaaggatcttctgccttatggctttgctattcatcacgcaggcatgaccagggttgaccgaacactcgtggaggatctttttgctgataaacatattcaggtgagggggtgcaaagcgtttggaggagcaggtgggacatacttcagaagatgggcaatgtcaagtttgtgccatgtttgctcctggtactttattgcttctggcccagctagcccaggtcagagggttgtggtggacacaataaatagaaccttatgctactctcccaactcttcccaccttgcttgagtttaggatagtctgagaagcatagtgaagcaagcactttggtgacttcagatagctccaaacagtgtctcatgggggcacgcgtgcccttgtcgttccctctttccggataggctctgttttaccttttctagtaactttaaggttgtttaatacaagtctgcacttgtgcctctggaaccttgaaatgttcattactgaatagatgaggaacccaaggaaacctttcctctttattctggtgtcacattgacaagtactgggaccccacgcgccctaccggctagtcctgagagaagctctgaggccaactgcctagagaagccagggatattaacccctggtgatggcatctgttctcctcattaccttgttttgcctctgtaggttttagtttccacagcaactctagcttggggtgtgaatctccctgcacatacagtcatcatcaaaggcacccaggtgtacagtccagagaaggggcgttggacagaactgggagcactggacattctgcaggtacagagccttttgagtttattctcagcagggatcagtatccttgcctgaaatgcagggatgctggaaagctagcagatcagaggtctagttctgtaatgtagatacctgcatcaaaattcagacattct

SEQ ID NO: 24026 - DNA, 2300 bp, Homo sapien
tctgatgaggaggtgagtgataaacatacccagtccattcttgtttttgacgttgattaaggtaaagggaccccttctagtgtaaacaagctctctagtttaaaccagataaattttatggtgttgtatgggtttcagacttgggcattatatgttcttttgcttaaaaaaaagtgcagttatcttttaactttgctaccgcaaatttaaactaacaaatgtaaagcaatataatttttttttttttgagacggagtcttctctgtcgcccaggctggagtgcagtggtgcgatctcggctcactgcaagctctgcctcccaggtttcgcgccattctcctgcctcagcctcccgagcagctgggactataggcgcccgccaccatgcccggctaattttttatatttttagtggagacggggtttcaccgtgttagccaaggtggtcttgatctcctgacctcaggtgatccgccccccgtcggcctcccaaagtgctgggattacgggtgtgagccactgcgcccggccacaatataattatttaaaatataccaagtggatcagcaaaaagaaagaaaaaagttaaagtacagtgtatactttcattgagaatgtatctgctatgttttactgcattttaaccttattacagtattttcccatttttcattactgtatctgactaaaagattgcacatttgccctagagcacagacatagtttgtacatggttaagtcactggggttaatgtttactgtctaatagaattccttgaatataactaaataggaataagtggggtactttgagaaaattacagtgccttagagttctcagtgagtagaagtggctcctgaaagggaaaatggagccccggtatatataccaaggctggaagaaggggtcgcacggggagagtcagaggactaggagccaagacttctgagtttgagtcctgtatcttggcaggtcatcttgcttcagtttctccttctataaaatgaggccatttcaataggtgattgctaagcctcttcctacagtatagttaataggatttgatgattttaagtagcaacaaactgctttgcttttagcagttcattcatttaacagtgctcattattgaagtacctgttttgactgtgacactatgccaggtacgcctaatgtgcagtgtatgagtaaatagagtggtgagcaggctaagtgcgatctcttcattccggagtcaccacctgctttcccaggcatgcctctgtatagctcttttctccttagctgatcactgtttttgagtgttgattgtgtgtgtattagagagaggctatgatccagttgattgccattgtagcagcctaaggtgagaaatagaaagtagatatatctaataagtcgtgctaagcagtcattctatgtccactggaataaggctgaccttggttccaataggctctcggtttcaccccaaagccatttctctacccattgagctaatttagggtgacttgagggagaggttctgtggtgatgcaggatcagctccagatcatggttgagttggggtcatttccacaggaaggtgatgaagacgtatacggggaggttcgagaagaggcatctgatgatgacatggaaggggacgaggctgtcgtgcgctgcaccctctcggctaatgtaagttcagtttgctcttcctcattgctacaaggttacttctgggtgttagtgcttcttccccatgcctaggtcctgttacatttattgagccactttttgctggagtgaactataataaacacttagtgtctagagtttcttaaaatttctgtcggttttcttccttcccaaagatgtatgttgatgaaatcttagtctggtgtgcttctgaactcaatattccagagttttttcctctggaaagtcctcacaagaaggtgggctatggattgtcaagtagaacttggttgcagggtggtggcaaagtgatcgaggctggcagagacctggtgagctaaatgcctggttacttttatagctcgtagcctcaggtgaactgatgagttccaagaagaaggatttgcaccctcgggatattgatgcattttggctgcagcggcagctcagtcgtttctatgatgatgccatcgtgtcgcagaagaaggcagatgaagtattggagattttgaaggtatggccaagatgacaatagttgtatatttagtgtatcttagcacatggggacagcgtatgaagtggcagatggctttggccttaatggtggtgttacctgctc

SEQ ID NO: 24027 - DNA, 2300 bp, Homo sapien
cataattattttcttccttatttacattttagtgtgacgattgttccagggctgcagtctcctcttgtggaaaataagggaaccagactactccatctctaaggctcctaccaggtctaacatactatggaaacttataagtccatctgaatgactaaatgcaggatttacatttggtagagcctgattagagaggaaaagaaaagatggggaaagtttcctttttttcttgcttcacaggtttgcccacagcccagctgcatctgtgaacatgaatgctacttctacagaaacagagtggaatctccgaaatacctttgagaccctttcgtgtcaggtgggtgggccacagcctgatcatggaataaaagtcagccttaaggattcagatttcaataactttcagtgaaccccaccttgagtcaggcactttgctaggtgcttttaaacacactatcccatttaatcacaatgggaggaaggttttattgcctcaatttttttttttttaagacaaagagtctcactctgtcatccaggctggagtgcagagtttgatctcggctcactgcaacctccacctcccaggttcaagtgattctcctgcctcagcctcctgagtagctgggattacaggcacccactaccacgcctggctaatttttgtatttttagtagtgacagggtttcaccatgtgggccaggctggtctcaaactcctgacctcaagtgatccgcctgccttggcctcccagagtgctgggattacaggcgtgagccagcgtgtccagccaattgcctcaattttaaggatgaggaaaatggtgctcaccgagaggccaggtagctagctacttcaaagtcacacagccactgaggagcagagccatgaggactcgactgtcccttgggaagacgagttattaaaaaaaaaacaaacacccaccaaagcagcaaactccatgcctacaggggctgggcaagtaaaaataaggagatgggcaggcatgagaaaacaggagcagtgggaaggacttgcctattctctgaccttggcagctgctgaccagcagcaggtcatgccatgcagcagtgtgggtgtcatgtggctgattttctagtatctcaactgatgggggagagccagagtttgcatgaaattatcccaatttttaaagaaggagccaacagtgagccaaacacgataccactacagaacaaatctggtctaggggactgctattgaggatgaattcctttggcttaacacccatcctcctgttcattcatcttctcaaaagcaaacatgctctaagtgaggagggaggtcaccttcagccataaggcgccattctactggcgagaagtggtggggaatgtgggacagagaagactttgtagctggggaagaaattaagtcatagtcaccaaggatttggccctgccttcaccggtttccctgggcggcagggagggccctaccatagaatgttaccgacaagtgggagcaaatgggggccccggccctgttcgttcagctgggtgaaaacgagggtcttgggggcacaggtttaggtgggattggtgggggatagtagctttctttttcaattgttgaacacagaagagaaacccaaagcaaggcgccaatcattaaaacacacaaacacagacacacgcgcaagtcaccttgctcgctgggtactttagttacctcaaacggaaatggggttttcggcccctcttttcctgcctacctcatgggactgttgccaaagaggaaggaaccggaaggaaaggtcttgggacaggacaggggctaagcagccgtgcattcgttatgatgtgaggggtgccgggggctggagactgaggtcggggagagcacgggccctgggtccttagtgccagcgggcggccagaaccagagtgcgggggtctagggattcggggacccagacgcaccaggcccacatatcccgctcagaagggtgcggaaagccgcgcgcacacggcagggacacgccccagacacgccccgccccgcacttctggggcgcgacccggaagcggaagggaacccgtttcttttccttccccagtgcgtctttcctgcgtcgttccggcgcggcgggagcagagatctgcggccgtttgcagcttgcggtagggaggcgtggtggtctgaagcctccgagcagccgcggccatggcggatgtaaccgcccgtagtctgcaatacgagtacaaggcggtgcgtttggtcttggggaaggattccaggctcaggagtccaatgg

SEQ ID NO: 24028 - DNA, 2300 bp, Homo sapien
tgacatgatgtcaggatgcaaaatatatgcttcagagtgtgcaaaaacgataatgtttaagaccatgtgttttaaagttgtattattttaattaacaaataataattgtacatattcatagggtgcacagtcatgtttcatacatacaatgtataatttcagattagggtaattagcatatccatcatctcaaacatttatcatttctttgtgttgggaaggttcaatcctccctctagctatttgaaactatatattattactattattattttgtgtgtgtgtgtgacggagtcttgctctgtcacccaggctggagtgcagtggcaccatctcagctcactgcaacctccacctcctgggtcaagcagttttcctgcctcagcctcccaaatagctgggattacaggcacacaccaccaagcccggcaatttttttgtattttagtagagtgggggtttcaccatgttctcgagctcctgagctcaagcaatctgcccaccttggcctcccaaagtgctgggattacaggcatgagccaccatgcctggtctattattgttaactgtagtcaacctacagtggtgtgaaaccctagtacttagtcctcccatctggctataatcttgaatcctttaacaaatccctccctatcaccaccttcccctccccttcccagcctctagcatcctctgttctaccttttacttctattacatcaactttttctaggttccacatgtgactgagaacatgtggtgtttatctttctgtgcctggcttatttcacttaatatcctccaattccatccaagttgctgcaaatgacaggatttcatttttttttatggccaaatagcattccattgtgtacatataccacgttttccttattcattcatctattgttggacacataggtcaattccatattggctattctgaatagtgcagctataaacatgagggtgcagatttctctttgatataatgatttcctttcctttggatagattttaagtaatgggattgctagatcatgtgagtagttctacttgtagttttctgaggaacctccatgttattctccatagcagctgtgctagtttacccaacagcatatcagagttcccttttctccccattttcaccagcatctgtaaaaccatatgcttaaaaatgtgtgttcatggttaaggatttgttttaaaagtggttgctggacaggcgcgatggctcacgcctgtaatcccagcactctgggaggccgaggcaggcagatcacctgaggtcaggagttcgagaccagcctggccagcatggtgaaaccccgtctctactaaaaatacaaaaaaaaaaaaaaaaaaattagctgggtgtggcggtgcatgcctgtgatcccagctaccagcctggccagcacggtgaaaccccgtctctactaaaaatacaaaaaaaaaaaaaaaaaattagctgggcgtggtggtgcatgccggtgatcccagctactcaggaggctgaggcaggagaatcgcttgaatccgggaggtggaggttgcagtgagctgagatcgcaccactgcactccagcctgggcaacagaataaaactccttctcaaaaaaagaaaaaaaaaaaaaaaagaacatgctatggcttactcccattatgtgtgtgtgtctgtgcatcacatgcctcggaaaagtttcaaagggtggatccctaaatgtttacagtgatcttctgagggtggagggattgattgcaggtgtctagcaataaggaggtattcttttcacaaaaataaacatgcagtgtccagcgtatgaatgggctgtgtgcccaaagccctccctcgtgtgcctcgtgagcacaaaacacgttttctacagaaacaggtgcgcctaggaccgctagagacgctttgcgccggggcagtgtcttcacggttcggagagctgggagtggaggtggggggaggttcctcatcctcgccagctttctgggccccaggagccgcctcccttcgcccccgaccccgcctccgtcccccaagccgcggacgcgccttttccgccgcctccaagagcagccgcggggccgcccccaggacgcgttgttcgctgccggagtttggggtggcaaggaccgggcgcacggctgagatgcgctgccctccagaatgcgagcctgtgcacgcgcctgcggaggggccacactccctgcagcgtccgcgatgcgctgttcccgctggcgctcggcgggcgctcccctgggcacatcgaggctctagtgaccgc

SEQ ID NO: 24029 - DNA, 2300 bp, Homo sapien
gaacagaggatgctagaggctgggaaggggaggggaaggtggtgatagggagggatttgttaaaggattcaagattatagccagatgggaggactaagtactagggtttcacaccactgtaggttgactacagttaacaataatagaccaggcatggtggctcatgcctgtaatcccagcactttgggaggccaaggtgggcagattgcttgagctcaggagctcgagaacatggtgaaacccccactctactaaaatacaaaaaaattgccgggcttggtggtgtgtgcctgtaatcccagctatttgggaggctgaggcaggaaaactgcttgacccaggaggtggaggttgcagtgagctgagatggtgccactgcactccagcctgggtgacagagcaagactccgtcacacacacacacaaaataataatagtaataatatatagtttcaaatagctagagggaggattgaaccttcccaacacaaagaaatgataaatgtttgagatgatggatatgctaattaccctaatctgaaattatacattgtatgtatgaaacatgactgtgcaccctatgaatatgtacaattattatttgttaattaaaataatacaactttaaaacacatggtcttaaacattatcgtttttgcacactctgaagcatatattttgcatcctgacatcatgtcataagtgaaaagataagagactttcattattactgctccaaatgcatgaatgctcaataacctgtgatctatttttcataattcacatttataaaaagtaactttggaacttcagtcattgtcagctagcagacagtttttcctgctccacaattaaataagtcagtattcttggaagtattgtacaagttgtttgggagctccctacacattgccactggataagaagacctgaaacccagccatgtgtgatggcttacacatataatcccagcattttgggaggccgaggcgggcagatcacctgaggtcaggagttcgagaccagcatggccaacatggtgaaaccccgtctttactaaaaatacaaaaattagctggacatggtggcatacacctgtggtcccagctactcagtaggctgaggcaggagaatcactggaacctggggcgggtaggctgcagtgagccaagatggtgccactacactccagcctgggtgacagagcgaaactctttctcaaaaacaaacaaacaaataaaaaccctgaaacttgtctttcagcagagggattttagtgagttagtatcaaggggtcatcacttccttttcttcttggatagctgacacaagacaggaagactaagggctctttctgatatctgaagatccctttcaggaaacccattctgttgtgtttcttaaggtgtgataaagcttgtccagcctccacaccgtataaagttctcctttatacacccatgtatcagcagagctgccctgtaggtaggattcttactcccacgtggccagtgagtagcaagcaaggccccaagtaaggtctttgggtgctgtctgttctttcatgagagtcactttgatatgagaaaggggttggggaaagatgcctgagtctgggcgtgggctgggagggaagcacatttagggtgctgaaaccacatcttatttcgtgtgccattttgctcagggccagcccgaagtgagaatggcttttctcggtcaattcctagttttgccaccatcatccttacacccgaatcctagtaagtctgttctccactgaactgagctgagtgcagctgacagcaggcacggcggtgccccatttgccaccccagggaggccgagcagcggagagtgtgtggccacggcccctccactctcccagcaaacccacgggggcctcggtgcggacagagacccggtgtggggaggccgctgcccctgcacgctgggccacgggggtttgggcggggaggagcttgtactgggtgggcggggaggagcccggacggcgggagcggctgcggcgcgcgggcgccctcggagccgcgtgctgggggtcgtaggggcccaccgcgctcagccagacgttcagacgctcggacaagcatggtctataacccaggaaaggggagcagggccactcccgcgggcggccccagcgatgaaccggacgcccccaccctgccgggaaaaaagcagtggcggtcaggccgcgctgtctctttaagatcgtgttcctactaacactgacggtgagtaacctggccctgggtcccgggagacatcccgaggta

SEQ ID NO: 24030 - DNA, 2300 bp, Homo sapien
atggggatgaagaggatcctagctagaggagtgtgtgtgtgcagaggcctgggggtaggagcaggtgtgatgagaggaatctgaaaaaaggccagggcagctggagggcagggagcaaggggagcaaggtccctgaggaggctggagaggctgcaggggtggggaggctggcaggaagacccttccaggaccttgtaggacgcttagaggttcccagggtggtggaacccctgaagtgttatacttccgggaggaagtggtgggggacaagtgggagtgacagctcagatttggactccgcatacactactcagggcctgagggggggccagagcaggccagtgagaaggtaatgtggatggaaggagaaaggcaggattggcaatttttaggaggtgaaaatagcttgcttgatgatggattgtgtggggagagaaagggagggaatcccccaggatgactcctgggtgctgatttgggttcttgggtggctgatggtatcatttgctgagataaacagtgtcaacctgttttctctaacccacacagccttacgctgaagatttgaaggtggtcactagaagaacaagtttatacgaacaacagataggcttaaaaagtggttttcagccaggcgcagtggctcatgcctataatcctaacactttgagaggccaaggcgggtggatcacctgaggtcaggagttcgagaccagcctgaccaacatggtgaaaccccatctctactaaaaatacaaaaattagctgggtgtggtggtgggcgcctgtaatcccagctattcaggaggctgaggcaggagaatcgcttgaacttgggaggtggaggttgcagtgagctgagatcgtgccattgcactccagcctgggcaacaaagcaagactctgtctcaaaaaaaaaaaaaaaaaaagtggttttcaacaaagggtggcactttttgattgccaaaatgagcgacagcactgatggcatttagtgggcaaatgatgttacgggggcttaagagcccacaaagagggcaaacatcctatcatgccaaggattgtttcaccctgaatgccaacagtgcccttgaagagaaacactgtaaaagatgccagatatgagagttacaagaaattctaggatgtgctggggatattccagggaatcaccctggcctttactcccataattcaatccttagggttagatgaaactgaggggacagatggcattttatgcttatttcgctttttcgacctttatttattttttgaagggtggggggtgttcacaggaagctattcacaagaatctgaataaaacgatggccttcatcttacactatattaaatgtacattttgtactatatttaatgtatacatagcatttctgcatcagttcttccccacctggaccgctcctcattcccacgtaggctcccgctcccctccgtccctcttcccggaggttttcagcgttttgctgcccacacagcacagatctctaagggaaataaacctcgttttctcgatcatctgcctccccattataaagtaaattccacgggctgagcgcggtggctcacgcctgtaatcccagcacttcgggaggccgaggtgggcggatcacctgaggtcaggagttcgagaccagcctggccaacatggtgaaaccccgtctctactaaaaacacaaaaattggccaggcgtggtggcaggcgcctgtaatcccagctactcgggaggctgaggcaggagaatcgctttaacccaggaggcggaggttgcagtgagccaagatcgcgccactgcactccagtctgggggacaagagctagacttcgtcccaaaaaaaaaaaaaaaagaaagtaaattccacgaaagacgggccttgctcaccctgctcgacgctgggttcccaagcccagtcctgcacctagtcctcgaaggagggggttttcatactatttcagggggtccaccgaccccaagaagcccaatcagacggggtcctcaacccaaaactcactctgacgccgcccgcggaggcccgaggtggtctgcgcaggcgcgctgctggcccggcccgccggcgacgtcacgcggccgttacggcgctcaggcgtctcgacgcgcgcgatttaaaaccagctcaggagacgccaaggaaagatgggacctcccggcccaggtgagccgggcggtcgggaggcgcggcgggaagggcccctagcgaagcagtacttcgggcgggcagggctggcgggctggcctgggcggggagagaggatatgc

SEQ ID NO: 24031 - DNA, 2300 bp, Homo sapien
tgcaggggaggaaaagtacaaaagtaaaatctttccccacccattgctcggttcatggctaggacacctataacaaaagacaggtcaacaagagaaaagcacacaaatttatttcatgtaaattttacatgacacaggggcctttggaaatgaagacccaaagaaatggggacatgtatttttatgcgttggtttcatgaagagtgggcatcgtggagaagtgattggctaaagggggaaggggtaataaaccggggagagtcggccagcctgttcagattcttctctctgtccctgtgtcttcagaggtaaggatgggtcttatggcctcatggccctacttcaggggattcgggcaaagggaaggtgagcgaggccttcctgcttctgctgttttcttaaatgccaaagtgccatattttggggtggcatgtcctgaaccctggcagtttgttcaataaacaaacacagagtgtgtggcgggtatgcctgtaccctggacgggaggctttaggcaggttttttagctcctcagaatgacctcctctgccccccagctgcctcatggcccaaggtcccactgatgcaactataccaccccagcctgctggctttgggtggcctgagggccatagcttgccaggtaattttccagacagtctgaggctcagagttgacttccctaataagatgccatacatacctctcatgagagtgtgatttattaacaagatgcatggctgcagcgctctggggaaccacccaaggcagcctgcactaaggtggagacgtacctggcactagccatcccttagccgagcagtcactgattgtggccttgatctggggtcttgggaggggcttagcccacaggttgagggtcagggcactcacaaggctccaaacccaccaggcccttgcccccgaaagtggggtccacttggccaggtgcggtggctcatgcctgtaatctcagcacctggggatgccaagatggggggactgcttgaggccagaagtttgagaccagcctgggccacatagctagacctgtcttcacaatatcagaaatattagctgagcatggtggaatgcacctgtggtcccagctactcaggaggctgaggtgggaggatcaattgagcttgggagtttgaggttgtagtgagccatgatcacaccactgcactctagcctgaatgacagtgagaccctgtctcaaaaaaaaaagtcgggtccacttatctcaggtagggcctcaggctttctgagtcaatctgcattttaacaagatccccaggagatttgagagtatgttgcaatgtgagtgaggagcactaggttagagtaagccaccttccctccatgatcctcagttttcctaaccgaaataaatattgacgggctagaatacctttggcttcttttccagtgctaacacattgggagctagacctttgcagtgactgtctgtagggctatttgcattttgtggcagttctgggaaagtggaattcccagaaattccagtgagaaaggctggagggaccatcagctcctctcctcttctgtctgctttacccctcctttctgttggaggtgcacaatttcccaggtcctgggatacagcaaatgcaattcaatctgcttcagcaacacagattgagttccttctgtgtgccagggtctgctgcagtgaatctccatcctggctgtacattagaatcatctgcgttgctctgtaaactcctgatgcctgggttccaccctaggccagtggaaccggagtctttgggggcggggctggacataggtatttattaacatgcttggaccattacaatgcacagccagcttgagattggtcagaagtgagaaagaaggctaccgtaagacctacccaggccagacccccattcctgtttccttctcttaggccggccagctccagcaggtcagtctgcgagtcaggagaaatcactgggaaatcccctggatatagtaacacatgacagcaccattgaattaatcatcaactttgtaacgtgatctctggcccataaaaagcagacctgctgaatctttggtaacctgtccactggccttctccaggcagttccttctagacctggggacctgtgcccgaggaccttagactgatgggtgcccagctctgcttcgaggccagtaagtagacctcctgcaagcctggagcttggtctctggactgggggtacaggtagcagagggtgctctgtgtcattgctggagtagagatgtggtcagtgtaaagtttaggg

SEQ ID NO: 24032 - DNA, 2300 bp, Homo sapien
atgcacacgcatgcacacgcatacacacaccccacacagggcaggcaccaccagggcaggtaccaggtgtctttccaggacagacaccctgacagttgtgtatggggtgagggggcacgggaaaaaggaaaacaagaaaccaaaagaagagagggcacacctttcccttgacccttccctcacgcacaggcatgagcagccacgccaggcctggaagctgtgcctctctcccccagctcccctctctggcaggctccccattcatgcccagtgggcgctcccgtgctggctgctggcggggagaaccaggagggaggaaggctgtggaggcgctcggcagaatcaggacccaggaggaccgcagcagagcggaagtgacagcacagacctgttaataactctgggctggtactgtgctacaggctggcctccctctcctccctcccacccccaaggccccgtgggggctgcagctattggtccagagggcttgttggagttgttgggtgctcgagaggcaggccgacttggtggctgagggcggcgcctaggacacaggtgcagtcctggcggagcgtttgtggcccattccctccagggcaccaggcctgtggtcagttccgctgccggccaccgggtggcagtgctggtcaagccctccagcctccagagccggtcttcccaggcggcgtggatgctccctgactcaccagctccgccagaacgacattgttagggctggaagggcttagccaacataacacgaagacgcaatttatgtatgatttgagggtccgattggaagggtttttttgtacatctacacacctgtgtgaccacgatcaaggtgcaggacgtttccagctccccagaggcttcccgtgtccctgccgatcactacctcccaaaggcagccttgtcctgcttcgaacaccacggatgggttttgcctgaacttcctatgaatggcagcacgcggtgctctttgggtcttcccttacatcagcctcacggctgtgaggtttatcctcgtcgttgcaggtagcagtaatttgttgtcattggcacagtattccatggcgcgcatatgtggcagtttaggtcctgctgatggttgtgggaagctgggccgggagcagcctctgagacagagatcagggacagggctgcttaggcggcagacccggggaagcataggcctggactgggtgtgggtgggacactggccttggcctccggggaatgggccctgcattcccggggatctgagcagttcagctcccccagctgagtgtgaggtggacagcagtggacattcgcttgtttccaggctggggctgttgtgcagagcgctgctgtgggccagcacacttggttcacgggggtggcatggctgggccatgaggctggcagaggggtgccttgtgcaaaagctcccaacgctgccctgtttggcccctgcgcgccctggccgaccgcccacagcgcccgcggccctgatgttctggggctggtttctaggcagggcagcccctgccctctgagattttggcccggcggggaacggatgagggctggcaagtgtcataggtaggcgtccctgggccttaatggcagggcccacgagggaccgggctgcctgacagtgccccaggttgggctgggctcccggtcccgctgggccgcacgctggagtgggcgcggggcagcagtggcttcctcgtgtgccaggctcttcccggagcgcgggttgagtcttgagagataacctgcgtgaagacatgtgtagtgatggggctctgggcaagagaggccgactgcaacagaggggtcccagtgaggctaccacccaccctgggagacgggtgtgtgggagctgcggtatagtgagcctcggcgccgctcacctccctctggggcgcccctcccggctttgggggctcccgggccctcggcgcctcctgcagtactgaccgccgccagcaggggccgcctcagtctctgcacagcggagaccgccccgcgcttgagggcacgggcccgcccctctcagagcaaaggtttgcagcggggctggcgggtgacatctactgcggggcagcctcaacctgacactcagcagcaagttaggcctatctacaaatctcctgctctgtgcccgcgcagtccagtggaggagatattcctaattagggggcacttccaaggggcggagtctccgcggcgagtggccgtggaggggcgcaaggcagacggtctccagccacgatacctgggccaatcccagcctgtcacgtcat

SEQ ID NO: 24033 - DNA, 2300 bp, Homo sapien
atcaccgctagatcttacagactttccttgttggaacacagatctgcttctttgggaactgctgggctgtgtgcccagcacagtgtatttaatctcctcttgatagcgtttaatctttttgcaattacatgaatcctgctgagaacattatagacccccttagaacagttccagggctaaggagctcacaaagtgttcccagagactgagctaaaagctgctttctaactcccacctccatgtcctagcacctcttgttagcccatttctaggaagaaaatctggccctgggggtggttctcatcctggagctctcagagatatagggaccattcaagatcatctgtccacctggtctcattttagaaaggaggtcaccaggccagagaggttaagcaaactgtccaaagtcacacagcaaaatcagtgcttttgtttcttctgggacctgcaaacccatccagtgccctcaggaaacagaatgcacagccagtcttctatcctgggaagctcagttcccaggctcagcagttgccaaaggcccctgggggtttgttttcaaaggagaaatgaagtggggaagtatttttaacgcggccccgccctgcttgcctaactcctcgttccccgtgctagctgtccaggaaaggccagcttcacagcagcatttgcaactcatggaaaacaacaaatgcccgaaatagatgatacccaagctcaggaatggaaaaaattggctcatggttcaaatgcctcttttagaaaaagacaagaatagcttttggcctttggggaactgctgggggtgaaggagtggggaggtggttgtgagtcccagatcaccaagggccaacttcctgcctgaaagagctttggccactgtaccccagggcgcgtgtaaaccagcttcccaagctttgtccacactggaagctgcatctgcacctggctctaggttccctccaacctccagccaatctggaaagatttcctgtgttgggccagggctgggctggtttcccctctccaccccacatctccccagtgtgtcccagcagggtagaaacccatggttctgaacttcctgagcctgaagggtggaagctgaattcccctgggggaggggaacggagggcaaggagagaaaattgggggtttcattcccactcagacacagcccagctgtgtggccttggacacttaacctgtcagggcctcaggcccctcccgtggaaagcaggataatgctccacttattcagtcatccactcatccaacatgtgttgtgtggtcctactatgtgccagcactgagctagacctgggatgtagccacaaccagaaagaagtccgtatccttgtggagcagaagatgtggcccttgccaacctcacaggctactaagaatcagtccccgctccagctactcagccaaggccttgtgctgaaaggggtgaaaatgccttggaccagggcggaccctaacacacactgcaccatcttgcatggagtatttctttcaatgtcactctagccctctgaagtgggcgctgtatctatatctatccccttattacaattgagaaccagagagtaagtgctggacaagcccacagactcgtccacagacaggaaggagtaagtttgggctgggtgagggccaggccctggtaagtcccagggtcagggtaactaaagctctgtgtgagtcttgactggtgcttagcacaaaatgcactggacaagaaatctcttaaaaccattgggtctctgtgacacttttacttaaaataaggtctcaactgacacttccactctctgttgtatgtcaggtgacccttccatttgacagaagagtaaaccaaggcatgtagagattaaatgacctctgcccagccacaccctgcccatctcccaccaagatgaggcgggagaggggcgaggagttgggctggggatgggggcatgactggggccaggacagaactccatctcccaggataccatgcaaagggggcgtgtaggggctgggcctccgcgtaggcagggctgtaatttcttggtatttaaaaaaaaaaaaaaaggagcaaaaggaaagagagaaagaatcgaagcctcaagcgtcacgtctaggaatagcgctggagtcgggccaagtcattagagacgatgagtaatctggttaagtcatttctctaaacaccattccttgtaagagaattaaaatatcagcttacatcagagggggagaggcaggctccagaggcccaggcaggagcacggccaggaagggggcacggc

SEQ ID NO: 24034 - DNA, 2300 bp, Homo sapien
ttgcatgtttttacaggacgaatgtgtttatttataagtgatggtttgtttttcttattattaagacacacagagagacaccaggacactgaggggctagctgaccccctctgtaggcacagaggcgtcctggcctgggatcctgtggttggagggtgcagaggagggtggctttgggccggagtggaggtgtgtgagatggaggcttgagcaatggaagtgtttatgcttttagccagatgaatggagatgtctgttttctgcaggatttactggccattgtaaattactttctattgcaaacagttgcctcaggaagcaattaaatttagatcctatcgttcccaggctggcacaggcaggtgttgacttgctgaggctttgcacaacagcccttgtctgtcagaatgtgcccagctgcccggatggcagaataaccctaactcttggtgggatgagctgctgtcttataagatagtgagttccttgtcattaggggtatccaacccacaagtgaggggttggcctagattgtgaccccgggggctgcatccagagctccatccccaaccttgggcatagtgcctgccaatcaatgcttccagaatgtacaaaggtgcttcctgatggcatcccatcatagtgtcttccaccacagccttagctttcctggaggggaaagtggcttgtaaacttgccaaagtgggatgcattgttataattaccattatgattgttctgggtgtctattaccaattctacaggtgctggctcttacaagccaacccattatgaggtagacaggggatttatcctgcagagcccacagggtcgtctgctctagactgagcctgcagacatcttccatcccagggccaaagggtaagggccagggtttcaggttcaccaaactgcagccctggtcccttcgtttagtgtgaggaggggcaccagtatgatgagtggttagtaatgggtgcaaagcgggtggggggatgcctgggtatgagggctcctcttcctgggtctagctctggctccaacacctaccagctgtgctacttgagctaatctctcagacctcagttttacgctataaaatgaggacaatgatggtgtcaagtgcatagagctattatgagtattaaaattcatcaacaaagatttttgtgtagcttctatgtgctaggaacagggttcccatcctagctagccacctgctgagactgaaaccctgagcctccatttcttcctctttggcctgcacaggtccaggttgctgctatggctggctgggcacctcctcctgcctccattcgccctaggcctcattcccacctcccacagcctgaactcatgccccttctttggactactcagcttgtagctgccacactctgtctgcattatgtgtgtggacattgactattactggcaggcctggccacagagcctaggccaaggatttactagtttggtccttgtctagctcacactaaccacctctcctttttttttttttttttttttttttttttttttttgaggcagggtctccgtctattgcccaggatccaggatagagtgcagtggtgtgatcaaaacacactgcagcctcgaccttctgggctcaagtgatcctcccgcctccgcctcccaaagcagggattccaggcgtgagccgccgctcccggcctcacctggccttctttgttgggctaggtggggactgggaaatgcacagggccactttcaaatcaaagtcagaagcactttgctcgctccacagagtcctcagtgctctgctgaaagcaaggaggctttttccaaggctctagttttgcctccagggaaactgaggcacaaggcagcaatgattactgagggtcctgcctccgctcctctaggtgaggagcctattccaggggctccagtctgaaagcctagaggcgaggggcgcgcactacaattcccagaggtccccggactcaagggcggtccccgccccccgccttctccgcgcgacgaagccgggcttaccaatgggagcccggagtggggcgagcaggggcgggacggggcgggactgcggggaggtggccggcgggccgcgccgcgagccagtatctcagagagcgcggggtccggacagccgcgcgctgagggtctcggggcgggcgccgcgggacctctccgggccatgggtaagcggctctgcggcgcggcccggacaggggctcggcggccctgcagggaggttcaaggtgccggcgccgggtcccctccagccctcgtggcag

SEQ ID NO: 24035 - DNA, 2300 bp, Homo sapien
catcaacaaagatttttgtgtagcttctatgtgctaggaacagggttcccatcctagctagccacctgctgagactgaaaccctgagcctccatttcttcctctttggcctgcacaggtccaggttgctgctatggctggctgggcacctcctcctgcctccattcgccctaggcctcattcccacctcccacagcctgaactcatgccccttctttggactactcagcttgtagctgccacactctgtctgcattatgtgtgtggacattgactattactggcaggcctggccacagagcctaggccaaggatttactagtttggtccttgtctagctcacactaaccacctctcctttttttttttttttttttttttttttttttttttgaggcagggtctccgtctattgcccaggatccaggatagagtgcagtggtgtgatcaaaacacactgcagcctcgaccttctgggctcaagtgatcctcccgcctccgcctcccaaagcagggattccaggcgtgagccgccgctcccggcctcacctggccttctttgttgggctaggtggggactgggaaatgcacagggccactttcaaatcaaagtcagaagcactttgctcgctccacagagtcctcagtgctctgctgaaagcaaggaggctttttccaaggctctagttttgcctccagggaaactgaggcacaaggcagcaatgattactgagggtcctgcctccgctcctctaggtgaggagcctattccaggggctccagtctgaaagcctagaggcgaggggcgcgcactacaattcccagaggtccccggactcaagggcggtccccgccccccgccttctccgcgcgacgaagccgggcttaccaatgggagcccggagtggggcgagcaggggcgggacggggcgggactgcggggaggtggccggcgggccgcgccgcgagccagtatctcagagagcgcggggtccggacagccgcgcgctgagggtctcggggcgggcgccgcgggacctctccgggccatgggtaagcggctctgcggcgcggcccggacaggggctcggcggccctgcagggaggttcaaggtgccggcgccgggtcccctccagccctcgtggcagtcggtgcgctgtgtggggcggagaggggcccggggtgggtttcggggcgcgggccaaggggagcgagcccggcccgcggcttcagcgctccccggccggcgcggaaggggtgaggctgggcgtccgcgcgagcttcgagaaaaggaaagacaaaaagttttggcggccaggggcttcccgggcgtttatctcgaaactcttttcgccgtctcttgcctgaaatatgccgagcccggtacggctctgtcgtcccacttcctgctgcggtttccacctcgagctgggctcagctaatttgttgtgacagctgtcggcagccgcccctccgccccgtgacatcccgcaggtttcagaaccgcggcgccgccgggcacagactccgggtccagagcgcgcggccctttcctctgcggccgccgtttcctgaaaggggctgcgcgggtgtgaagaacttgctcaatgcgctttgtaggatccactgttcctctttcggccgcgggctgcgccgatggtccggggagcccggcttctcgccccctgccccttccttctcttcccttttctcttttcctctcctgtctctccgcccacccgccgcagccccacaggagaggggtcgcttccctggttgctctcctctcctgtcccttgtgtgtccccttgtcttccctcggtctgcagaagggacggggtggcggctggggagcgtcaggggaagagggcaagagcgtgggctacgagcttgcaggcgatgcccggcttcgcgctcggcgggagctgcgggccaacccgggcccgcgctccgtccctccgcggtgtctaggggtcgcccgggctggggtcgcgtcaccctccgcccagcgccggcgtggtggggcttgcgcggtgcaggacccccgagggcccagggggtcccaaggcgctgcgggtccagtgtccctttgtttgcagagtcttgggccagtaaggagtgctccgcgggccccaggggaggacaacaggtgcctcttgccccacccgggctcctctggtgggagcccacacgcacggtggcgtcactgcgcctacaggcaacgctagagcacaggaggggtgggaggtcggggctcgagggcttcaccccgcagcagagctcagagcccaatccaggcc

SEQ ID NO: 24036 - DNA, 2300 bp, Homo sapien
tacaggtgctgtatcctctactgtaaggagaaatagccgataggacatatatgtatagtcagcctttcttatccacaggagattggttctaggaccctcaccactaccaaaatccatggatgctcaagtcccttatatgaaattatgtcataccgttggaattctatatccacaggtttctatccgtggttgtttgaatctgcaaatctgctgtgaagctcacagataattgagagctgactgtggttttactttgctgttttaagcacatctgcctgaataaaactggaaatggtgctacactgggcattagcaaaatgagacatttttctgtctgtgcttgtctctctctttgtcctacccactaaccctactttgaaaggcctgttgcctgagcccagcagggccaaggcattgcagaaaccctctcctggccaggcatggtgactcacacctgtaatcccaacactttgggaggccgaggtgggtggatcacctgaggtcaggagtttgagaccagcctggccaatatggtgaaaccccgtttctactaaaaatacaaaaaattagccgggtgtggtggtgggcacctgtaatcccagctgcttggtaggctgaggcaggagaatcgcttgaacccaggaggtggaggttgcagtgagctgagattgtgccattgcgctccagcctgggcaacgagagcgaaactccgtctcaaaaaaaaataaaataaaataaacccttttcctttaagagaacctttcttattgctttgaggctacttccttactgctttgattgtgtgaggcgaagtgaaagttggatatttataattcttttggcttaaaaagttcttccctggaaagaaaggaacaaacttggatttctcaaaatggtctaaaatgtatgactgatggtttgcagcaggtgcagagcaagtccggggcagtgtctggcacagtacctttcctgtgtggcatccattgcgtgtgtgcctagttggggagagcttcctgccttctctctgaggacgggtgtccaagggcaagcaccactggtgttttagttggtggtgagggtggatggatgtggctgctctcgggatagtgcaagtgattgagtctctactgattcctgctatgtcctctcttaggggccacatcagccagcagcctcctccaaggcctcagcttcagcttgcaggatatcagcagcaagacctctggccttccagcaaatccctccccaggaccagccccacaggtgcacatctgccatctgctgggctgggcaggtgtagggaggaggcctcctcagcttagttggttttggcagggaaactaggtctggagtcagtggatcaaggacaaacagccttctagctacatagcagggaacttacaaaagttaaggtctatcatttactgtgtgaccttgggcaagtttcttgaccactctgtttttgtttctttgtctataaaatgaggtaataatagtacctccctcatagagttgttataagaatgaaataatatatgcaaaatgcctggaagagtaccttgcatgtagtaggcactcaatacatgttagcctttaataatatgctgtgggccctccaagctcgaatgttgctgttgggcgacagcttctgatcacctgggcttgtgtgtcccacaggccaccagtgtgaagttgcccacccccatgcagagcctgggtgccatcaccacgggcaccagcaccattgtccgtaccattcctgtggccaccactctctcctccttgggtgccactcctggtgggaagcccacagccatccaccagctgctgaccaatgggggcctcgctaagttggcaagcagcctccctggcctggctcagatctctaaccaagcatcaggtgagtctctcatgagaactgtggggactcccagatctgggatctttcccccaggaccttcccatctcatgtgggcaaggtatgatgttgaaaccagtcccacagggtcctggcattgacctttggattcagctgtgtggacccatcccccagagaggttgagagaacacaggctgtttcctgttgcctttcagattgactgatagggcatagatgacccagctggggaggaggccaagggactgtgttatgtgggggagaagctctccaggaaaggaaagcctcagtagaaggtggagagtgtgactcaaaaattctgcttctctctctttatctcaggcttgaaggtccccaccaccattactctgacacttcgtggccagccgagcaggatcactac

SEQ ID NO: 24037 - DNA, 2300 bp, Homo sapien
aagtccctgagcggggcagtcgacctgcctccccagctgccaagctgcccgcctcaccctcaggctcagaggtagtgtgagcagggagggagcgcttttgctggggaatcagcaccacagagttggttccttaatttcctggggatgcctctgtcttattagtgccatgggcctgtgagttcctacaaggggaattccagagggacatgctgactcatggtcagatcctagtaacattgtctcatctcttgaccttctcaccttactcaggatctctccagtgtgtccagcagccccacctccagtcccaagaccaaagtgaccacagtgacctctgcccagaagtccagtcagattggaagttctcagctgctgaagagacatgtgcagcggacagaagctgtgctgacccacaaacaagctcaaggtataggcacttggccagtggctcctcttgggtctgtcttctgtagttcatgtcacatggcagttgcacagtattgatatctatggcttttttcagggggatgtgagaggcgccctttctcacatttctgtgcaggcaaaattcaaaattaattattgaaatgaatgccaaggcctctgagttagtggggctttgtgatcactagttatagctttgtcttgctgttctggggaggctaggctttatgaacatgtatattggcctaaacttttttctaccttgccagccactcctccagtcggggctctccaatcatatgtattgggtgattgattttattaatcagattctagggtaactcacctggcatcatgccctttctttgtttgacccttgaagcgttaagattctcacactgagactttcagtgaagtttatcagggttctctgcatacaggtttcagatgaagctgggaagtattcctatagtcgaaagtaagagtttggtgagctgcgagtgctatgaaaggagctatagaaaagggagagttcattgggtagggaaagaagaaacagtggttctgtcccccttcccccacattgatccagttgggtggccttgaggtaaggcctcttgggcattggtgtttaacgatgtgtccaggagcatgtcacctgagcttttcaggaataggggtgcctgggaagaggcagcagccagagctggctgtctggcagacagacgtggaggggataggaggctcatctgtttactttccctgtgtttcttttagtggagccaaatgatcagaaccgaaacccagacctcttgtgagtttgcttataagagtagtactaacaaggagtagaagtgtgagtggatgggaggagttgagaaatgaggccaggccccaagggtctgcgcggatgctctgccatggatcttcatgagtggtggccagagccaagtcccgtgtggacagtgtgtctttacacttctgaagaagacagagctggtggtctgctgtgcttctgcagagggtgattagttgagaatctaaggagtttggaaggctgattggcgagctgggtttgaaatggggatctagggtgtcatgggggagagtagcagctttagaaccctggcttagcagagctgatgggcaaacggggaatactaatagcgaacatatatggagtccttgctgtgtgccatgccttcttcatggcactcgcattgctgtagtttgttgagttttggcatggccccatgaggcagatagtactattcagttttagatgcttctacagactgactccgtggcagagtcaggttgccatgcagtaatttcagaaggagcccctattggccattttctacaaccttttttcttattccctctctttttctcccttctctggctggctgtgattctgtaattctttctgattcattccagcacagtttgctgcttttctgaaacaaaatatgctggtgaggaaagctcttcctcctggcacctcctcctgtctctttggtgagtattactctttcttgcctgctcgtccactacattctgctcctcaaccccttatttattttccatctctgcctctcatctgcctcagtttggtttcctcctgttcttttctctctctttctttgtattcttttgttttgctgaccccttttgcttactctgtagtctttgccctttttccattcttttgtttgcttctcatggtgttttcttttttgtctcttagtgtggttctttctttcactacggtcttggctctgctgcttttttgtatgtctgtggcattgcctgagtctcagtttccttgtgtgtttttctccctgcctcctgtc

SEQ ID NO: 24038 - DNA, 2300 bp, Homo sapien
tcacccaggctggagtgcagtggtgcaatcttggctcatggtaacctccgcctcccggattcaagcaattctcctgctgcagtctcccaagtagctgggactataggtgcacgctgccacacccagctaattttttgtgtttagtagagacgaggtttcaccatgttgcccaggctggttgcaaactcctgagctcaggcaatccgcatgcctctgcctcccagagtgctgggattaccggcatgagccaccatgtccggcctttttttttttttttgagacagagtctcgctctgttgcccaggctggggtgcagtggtgtgatctcggctcactgcaacctccgtctcccgggttcacgccattctcctgcctcagcctcctgagtagctgggactacaggcacgtgccaccacaccctaatttttgttttttttaagtagagatggggttttaccatgttggccaagctggtctcgaactcgtgacctaaggtgatccacccgccttggcctcccaaaatgttgggtttacaggcgcgagccactacgcccagcctgaatatttaattctatttaaattttttttttttgggccgaggtctctgtcacccagactgaagtacagtggtgcaattttggctcactgcaacgtccgcctcccaggctcagttgatctcccacctcagcctcccatgtagctgggaccacaagctaatttctgtattttcagtagagacggggtttcaccatgttgcccacactgttgaacttgtgggctcaagtgttctgcccaccttggcctcccaaagtgctgggattacaagcctgagcccttgtgagcccttgtgcccagtaattttttttttttttttttttttgagatggagtctcgctctgtctcccagtctggagtgcagtggcgcaatctcggctcactgcaagctccgcctcctgggttcacaccgttctccttcctcagtgtcctgagtagctgggactacagatgcctgctaccatggctggctaaatttttgtatttttagtagagacggggtttctccatgttagccaggatagtctcgatctgacctcgtgatccacctgcctcaatttaagtagtcgtgtgtggcttatacctactgtattgaacagtatctaggcaatcaacttgttagccacttttctccatttgtactgttcttgtccctaaacgagctctcatgatttctggcccatctcagtcaactgcagtggctgcctagctggtcttctaaattccactcctgagctgtagcctactaaacaaaaattgaaagtgatcttttaaaaatattagcttgagccaaatcaacttgcttatggaatatattgtccttttttttgagactgggtcttgccgtgtcacccagactggagtgcagtggcatgatcagagctgactgtagcctcaacctcctgggctcaagcaagccatcctcccacttcagtttctgggactgcaggcgcataccaccatgcctggctaatttttgtgtttgttttagagacggggttttgccatattgccaaactggtcttgaacttctgggcttaaacaatcctccttcagccttccaaagtactgggattacaagtatgaatcactgtgcctggctatatttgtcatttatttatttattttttgagaccagctcactcctgggcttaagtgatcctcctgcttcagcctcccaagtgctgggattacaggtgtgaatcactgtgtctggctgtatttgtcatttatttatttatttttgagaccaggtcttgctctgtcacccaggctggagtgcagtgatgcaatcatggctcactgcagccttgacttcccgggttccagcagtcctcccaccttagcctccttagtagctgggatcacaggtgtgtgccacatgcccagctaatttttgtatttttggtagagacagggtttcctcatgttgcccaggctggtcttgaactcctgagttcaagcaatccacctgcctcggcttcccaaagtggtggtattacaggtgtgagccagtgcacctggcccatatttatcttaaaaaaaaaatagatgtttatcattttttatatagactcattgaaaaaatgactttgtgttcttccagtacataccatcatgtctgagagggcagagatctagacaagtgtgggaaagatgactttggatcaaaattttcttgtgaatataatgtgcttatgcgtaatttaaagctgactgtattaaagatacattttttgtcaacc

SEQ ID NO: 24039 - DNA, 2300 bp, Homo sapien
gtcttgaactcttgggctcaagcaatcttcccaccttggcctcccaaagtactgggattataggcatgagccacagatcccgggtgagatttatcatcttgaaccatgtctcttgctgtcttgtctcatgtctcttgatgtcatgttgtcagtcagtcaaccaaataaccaattattgatcagtcaacatttgaacaattacctatgttctgggtgtatgttctctggaggatacaaaggttaatgtccctgattttgaggatctactctctctacacaaaacacataggaaagttaaccacacaaaacaatctagggtcagtaacaaaattctttttttttttttttgagacgtagtctcactccgtcgtccaggctggagtgcagtggtgcaaccatggctcattgcagcctggacctcccagactcaagtgatcctcccacctcagcctcccgggtagctgggactacaggcatacaccactatcacacacacctaatttctaaaattttttgtagatacgggggtctcatcatattggccaggctcatctcaaactcctgagctcaagaggtcctcccgcctaggcctcccaaagcgctgggattacaggcgtgagccacattaggtaaattcttaatgagtaaattcaggtggctgccctggtggaggtggaccgttgggtgctcgaccgcccagagggcacaaaggaccaacacggtgggggtggcgagaactggggccgtagaagccagcctagtcctccgccctcgctttccctactgaatatgcgcgagggggaaactccagcctagttgttgactttctgcttcggacatgctcgcgtgttcttggctctcctcttccggacagaggcgccggagcttcatccgttccgggctttgccgctcaccgcctctcccttcccaggccgtaacccgcttccgcgttttactcggtgcccgcagcgccggggcgtggaggcgttaacgcgcacgcgcttagggatccggccgtggccgagcgcgcggccgtaagaccgcgggtgagagcagcgttggcttcgaggggagtggcgggccgtggggatcgcggccgtggttgggacggccgggggtctcggcgagggcttcagggctcccggggcatgcgggggcccgggctagggccggctgccggtgctggtcgggcggggcgggtcgggccgggggcgggctggcaggggccgcgtctgggcctccgtgacgcggacgccgagccctgccccagggagcgggaggcgggaggcgggggccaggcggctcctcctcgtcgcgaactctggatgaccttggccaaatcgcttcagttccccgagctggcgacttcgtctgtaaaatgcgagtcatagccctgtctcctagatgggccgtgtggaggctcagtggcgggaacgcctgcggggcagccggggtcctgggcggtttgctagggacgcctcactgggggtgagggtgaaagggcttccacggggatcattttgtcacaggctttgttgggggggcagttttcatttttatgtaaacaactctggaatattacgaagtacttaacagaacttttgtttcgcacaatacgagaggcttgaagaagtggagccctagctgggattcgcttttttgaggccggcgttgccctgccctttaggggtgcccacgctctagctgcggccccggctcccttcgcattgtcgttagaggatggtgtgaagcaacagagatccttagctttcaacgaattcatatttgtgatttcctgtttgtcaaaacccttcctgcccacctaggaagtggtgctggccaagcaagtttactgtctgtccacgcgaggtctttctgaaccttggggtcggtgagctctcccgttaggtaatttcagttcgctagaggttgagtatgggacaactcgtggcaccatagttttttttttctttttttttggtgttggtgtgggattccacgaaccgtccccaccagaggtctgccgtgaaatggatactcaataggaatgatagtaggttacaaaagtaagcatgttagatggtgtagattgggagaaatttaggatattggaattgacctaaactgaaacttttcactgcaggtgactagcatgcagatacccatgctctgactttctgcccctccactgacatggcccaccggggtggggagagggacttccagacttcagctcgacgcatgggcacctcgctgctcttccagctttcagtgcatgaacgggagctggacctggtttt

SEQ ID NO: 24040 - DNA, 2300 bp, Homo sapien
tataagtagagaaatagcagaaccctggccccaaacaagcgcccaggagacaaagttaagggtagggagaggtggggcaggggctgctctatttgtgataatttctatggccttaagctccatatttctaaacagcacttttaaatagcattccttgattttttcaaatctatgaggcattttcccagttttattgttttccccggggctctccctcctggtcttctcttctcccccagctgagactagtggtccccagtcctgcagcatagctattgtcctgggatactctttgccatcaccttcagaattcctcgtctgcttcttgtgttagaccctgcttccccgatcctatgccttccgtcttctcagtttaccctctcatctttgtggaacacagctttgagtggctttctgaatgtttcgagtgtttgcatgtctgtacctatcttttttttttttttgagacagagtcttgctgtgtcgcccaggctggagtgcaatggcgcgattttggctcaccgcaacctctgcctcctgagtttgagagattctcccacctcagcctcccgagtagccgggattacaggcatgcgccaccacacctggctaatttttgtatttttagtagagacaggatttcgctatgttggccaggctggttttgtactcctgaactcgtgatccaccctcctcagcctcccaaagtgctgggattacaggcgtgagccaccgcacccggccatttctttttttaaatagaaacgaagtctcactgttttgtgcaggctagtcttgaactcttgggctcaagcaatcttcccaccttggcctcccaaagtactgggattataggcatgagccacagatcccgggtgagatttatcatcttgaaccatgtctcttgctgtcttgtctcatgtctcttgatgtcatgttgtcagtcagtcaaccaaataaccaattattgatcagtcaacatttgaacaattacctatgttctgggtgtatgttctctggaggatacaaaggttaatgtccctgattttgaggatctactctctctacacaaaacacataggaaagttaaccacacaaaacaatctagggtcagtaacaaaattctttttttttttttttgagacgtagtctcactccgtcgtccaggctggagtgcagtggtgcaaccatggctcattgcagcctggacctcccagactcaagtgatcctcccacctcagcctcccgggtagctgggactacaggcatacaccactatcacacacacctaatttctaaaattttttgtagatacgggggtctcatcatattggccaggctcatctcaaactcctgagctcaagaggtcctcccgcctaggcctcccaaagcgctgggattacaggcgtgagccacattaggtaaattcttaatgagtaaattcaggtggctgccctggtggaggtggaccgttgggtgctcgaccgcccagagggcacaaaggaccaacacggtgggggtggcgagaactggggccgtagaagccagcctagtcctccgccctcgctttccctactgaatatgcgcgagggggaaactccagcctagttgttgactttctgcttcggacatgctcgcgtgttcttggctctcctcttccggacagaggcgccggagcttcatccgttccgggctttgccgctcaccgcctctcccttcccaggccgtaacccgcttccgcgttttactcggtgcccgcagcgccggggcgtggaggcgttaacgcgcacgcgcttagggatccggccgtggccgagcgcgcggccgtaagaccgcgggtgagagcagcgttggcttcgaggggagtggcgggccgtggggatcgcggccgtggttgggacggccgggggtctcggcgagggcttcagggctcccggggcatgcgggggcccgggctagggccggctgccggtgctggtcgggcggggcgggtcgggccgggggcgggctggcaggggccgcgtctgggcctccgtgacgcggacgccgagccctgccccagggagcgggaggcgggaggcgggggccaggcggctcctcctcgtcgcgaactctggatgaccttggccaaatcgcttcagttccccgagctggcgacttcgtctgtaaaatgcgagtcatagccctgtctcctagatgggccgtgtggaggctcagtggcgggaacgcctgcggggcagccggggtcctgggcggtttgctagggacgcctcactgggggtgagggtgaaagggcttcc

SEQ ID NO: 24041 - DNA, 2300 bp, Homo sapien
aattatccgagcatggtggcacacgcctgtggtctcagctactcgggaggctgaggcaggagaatcgcttgaaccagggaggtggaggttgcagtgagccgagatcacgctactgcactccagcctgggcgacagagagagactctgtctcaaaaaaacaaaaacaaaacaaaacaaaaaactcattaataagcaaataaatgggataagataccatttatcacctcttaaattggcaaagaatgaaacaaaatgataaacgtggtgtgctgaggaaaggaaggggcagagaaaagatacaaatctgtttttagtgggaatgggaatataagtagagaaatagcagaaccctggccccaaacaagcgcccaggagacaaagttaagggtagggagaggtggggcaggggctgctctatttgtgataatttctatggccttaagctccatatttctaaacagcacttttaaatagcattccttgattttttcaaatctatgaggcattttcccagttttattgttttccccggggctctccctcctggtcttctcttctcccccagctgagactagtggtccccagtcctgcagcatagctattgtcctgggatactctttgccatcaccttcagaattcctcgtctgcttcttgtgttagaccctgcttccccgatcctatgccttccgtcttctcagtttaccctctcatctttgtggaacacagctttgagtggctttctgaatgtttcgagtgtttgcatgtctgtacctatcttttttttttttttgagacagagtcttgctgtgtcgcccaggctggagtgcaatggcgcgattttggctcaccgcaacctctgcctcctgagtttgagagattctcccacctcagcctcccgagtagccgggattacaggcatgcgccaccacacctggctaatttttgtatttttagtagagacaggatttcgctatgttggccaggctggttttgtactcctgaactcgtgatccaccctcctcagcctcccaaagtgctgggattacaggcgtgagccaccgcacccggccatttctttttttaaatagaaacgaagtctcactgttttgtgcaggctagtcttgaactcttgggctcaagcaatcttcccaccttggcctcccaaagtactgggattataggcatgagccacagatcccgggtgagatttatcatcttgaaccatgtctcttgctgtcttgtctcatgtctcttgatgtcatgttgtcagtcagtcaaccaaataaccaattattgatcagtcaacatttgaacaattacctatgttctgggtgtatgttctctggaggatacaaaggttaatgtccctgattttgaggatctactctctctacacaaaacacataggaaagttaaccacacaaaacaatctagggtcagtaacaaaattctttttttttttttttgagacgtagtctcactccgtcgtccaggctggagtgcagtggtgcaaccatggctcattgcagcctggacctcccagactcaagtgatcctcccacctcagcctcccgggtagctgggactacaggcatacaccactatcacacacacctaatttctaaaattttttgtagatacgggggtctcatcatattggccaggctcatctcaaactcctgagctcaagaggtcctcccgcctaggcctcccaaagcgctgggattacaggcgtgagccacattaggtaaattcttaatgagtaaattcaggtggctgccctggtggaggtggaccgttgggtgctcgaccgcccagagggcacaaaggaccaacacggtgggggtggcgagaactggggccgtagaagccagcctagtcctccgccctcgctttccctactgaatatgcgcgagggggaaactccagcctagttgttgactttctgcttcggacatgctcgcgtgttcttggctctcctcttccggacagaggcgccggagcttcatccgttccgggctttgccgctcaccgcctctcccttcccaggccgtaacccgcttccgcgttttactcggtgcccgcagcgccggggcgtggaggcgttaacgcgcacgcgcttagggatccggccgtggccgagcgcgcggccgtaagaccgcgggtgagagcagcgttggcttcgaggggagtggcgggccgtggggatcgcggccgtggttgggacggccgggggtctcggcgagggcttcagggctcccggggcatgcgggggcccgggctagggccggctgccggtg

SEQ ID NO: 24042 - DNA, 2300 bp, Homo sapien
aattgtatttcattgtatttctttgattattaacaagactgagggttttttaaaaaaaatttttttttgtcattttgggcaattatctgataggagctttgcctttgttttcctttgggatagtcatccttttcttattaagagcttgctctataaacatttattaaataaactgttggacattaagtatattgaaaatgttttccctgctttgatatttgtcttctagctttaaggcataatttctacataggaattttttatttaatacagtcaaatctgtcagcttttcacttacagggtcttttgtgtcacgcttactttgaaaagccattcacaaagcgaaaagcactgtgttgtgtttagatttcaagaaaaacttccaagaagcacttttttttttaatctgctgcactagaaagcaatcagcaccctgatcactgacccagcgtttcagtctttgaatccattcatctcttagactgcgtggtacgcttactgctaagtagttgtttcattaactaatagattgttcttaaacattgttttttttttttttttttttttttttgagacagtcttgctctgtggccaggcttgtgtgcagtggcgtgatctcggctcactgcaacctccgcctcccaggttcaagcgattcccctgcctcagctccggagtagctgggactacaggcgcgcaataccatgcccggctaattttttgtattttagtagggacggggtttcaccatgttggccaagatgatcttgatctcctgatctcgtgatccggccgccttaacctcccaaagatctgggattacaggctacaggcgtaagccaccacgcccggcctttttttttttttttttgagacagagtctcgctgtgttgccaaggttggagtgcagtggtgcaatcttggctcactgtgacctccacctcccaggttcaagcgattcccctgcctcagcctcccaagtagctgggattgctggcacgtgccaccacgcccagctaatttttgtatttttagtagagatggggttttgctatgttggccaggctgttcccgaacttctggcctcaagtgatccgtccaccttggcctcccaaagtgctgggattacaggcatgagccaccaatcccagcatttaaatattcattagttttcattctaactattggataagatgtaatttatacgatgttcaaccctaaagcctaaaaagccttgctgtggacaataagaataggtgccccagctccatcttaatgcacagaggctcagacagccataaagacagccacttcaaaaccgcattgtcttctttgaccttccatatgagctcattaattcaaaagctaatttccttttgtcaaagagggtctcgtatctaaacttaggtttttcttagtaaaaaggtttccacgttaggaagaactttccctgagacctcacagaaatagtccttgattttcctatcccttttctcaggtcacttcactgttttcttattttctcatctacattgtgtgactttggcaatgattggctccagacaacttgcttgtacaaggagaaaacatcaaccttatgtctgaccttgaaatcaaaaggacggcaaggagggcaggtgtggggtgggcaaaaaaaaattttttaaggccagacttggtggctcacgcctgtaatcccaacactttgggaggccgaggtgggcagatcacctgaggtcgggagttcgagaccagcctgaccaacatggagaaaccccatctctactaaaaatacaaaattagccgggcgtggtggcgcatgcctgtaatctcagctactcgggaggctgaggcaggagaatcgcttgaaccagggaggtggaggttgcggtgagctgagatcgcaccattgcactccagcctgggcaataagaaaagggggtgaaagcagccaggtggttttgtttctacaggcccagtcacctataccctgttcctcctcccccttctctttcccattaattcctctccagaaccaagaaccgcccacctttgtgacagcctgtctgttgcttagcaacagacaggaagtggggctccactcaccccaggatcgctgggaaaagtcttggactgaggagctccaaaaaggaagctgtggcgctgcgtagggaaggagggaagaaagtaggtctccgagatgctgcggcttgtggtgcagtcggccaagattgacccaccactagccccactacccaggccctgcatgtccatcgacttcagaggtgagagcctccctg

SEQ ID NO: 24043 - DNA, 2300 bp, Homo sapien
tacaggtgtgagccaccatgcttgtccagagggccattttaaagacaaaaatacaaaacgatcatgtgacaagttccaggcccctctcaggaccttgcaaggggcctattcaaatgggaggcccagctgggcgaggtggctcacacctctaatcccaacattttgagagccctacgcaggaggattgcttttgcccaggagttcgagaccagcttgggcaacatagtaaggcacctgtctctacaaaaaaaaaaaaattgtttttaattacctgggcctgatggcaggtgcctgtagtcccagctactcaggaggctgaggcgggaggatcgtttgagcctgagaggtgtaggctgtagtgagctatgatcatgccactgcactccagtctaggtgacagagcagcaccctgtctgaaacaaaacaaagcaaacccccagaaaacaagaggccctaaagccaaagctcgattcgcttggttcaaaatccagcttttctatgatgaagtggctcactggtaactgagccaggacttgctcccagacccgcgactccctacctgttcttaaaatctccacgagggccagaccatcccaatgtgtacccaccgcacctctctccttccctccacagctaccctgcctctccagctacatcaagttcagagtcttggactggtgagcaacctggtggaggctgaagcacacagggaaggaagaaatgagagctgggccgggggctcagcctgaggagtgtgtttctctctagccgcaagaaggactgcccggatgagattgggactgccagcctgtccctcaaccagatctcgtccaccggagaagagatagaaggcaagcaaagcctcgagcccacttcctacacccctcgtcctgcgcccgacccttctcactctctctccttccaggagtgtactccggcttcctgccctgctttggccccagcttcctgactctgcatgggggtaaaaaggcccctttcaggatccaggaagaaggcgctgtaagcttctcacatcagctctagggtacagtggaggtagagcttccccatgtaaagcactagggcctgggacgtgccccgaggccccggccctggtttctgtccctcggggtcttgtggaggacgtgaagcctgtccatgagcagccacgtgcatgtgggacaggcgtgggggcacaagaaaggagcaagcggaagctctgggctttccctgaggaaggggctttgagaggagaccatggtaagattttcagcaggtgggaagggcgcgaaggacggaggacacagcacaggcaagtgtgaggaagcatgaggttattcaggaatggcggtaaatgccagaaacccgactcgaacaggcttaaacccagggaaaaacaagagccctgtccgcccggatctactgtggatcccagtttctgactgtgcaaagaggccctgggaaggaacgaggcagggaaggatgctgaggaagaaccacaggcattggtcctcaaggccactaggaggtcctcactctccttcccccctgcctcattccctcctgcctcagtcagacttcccggctgggaacctcaccacacagcctccagcagggaaggccagggaagcattctaattgtcctccttaggtcatgtgtgctccccgtggctcacagttgccaaggaggcagggcaggctctgattggccaggcgggtagtgcaaactcagtggtaatcacagttaccacccagcctgaagcatggtgggagcacggtattccatggggcaggcaggatcccagggtgcagaagagggctcaatgcccagaggtttcccggcgtggaggtttctggaattcttctccgggattgtggttgcagtaagccccgggcaggcagtgactggacaaccttgtctttgcctcaggggtttcaaaggagattggcctgttctttttctctcaccccttttctccgttttcctctcgcttgccctagtgtattcccgactctgttagggatggtttagcttatcgaggccgagtcttcctggagttaatcacccaaatcaagtcctatcaagactccacgataaaggatctctcccatgaagtgaccaggatagaggtaactgcgggaaacaggtaacccagggaaaaacaagagccctgtctgccccggatctactgtggatcccagtttctgaccgtgtagagaggccctggccactggctgttgagtgtgtaaggatgcctgatcaatcggcctgattatttactaaggccctgctagtggct

SEQ ID NO: 24044 - DNA, 2300 bp, Homo sapien
gcctgcctcccaaagtgctgggattacaggcctgagccaccgtgcccagccaagaccccatctctttaaaaaaaatagctgtgacagctttaattttaaaaagttgatcccctgtaaagtaggctcataattatgtttatcttattaaatatattcatgctcaggaaagcaagagagtgttaactttggttaagtctattgggaagacataaacacagatctgtcaattgctctatatgagatgtgcatggaacactttgagagctcagacaggagaatctaccctgcctgagaggtttgagaaggacctccagaaggaagtggactgcagaaaaaaaaaagagggaagggaagctggagcataaagatggaggaaaagagtcatgggcaataaggccagggccagatggcagggggctttgtgtgccaaattgaggggcttgaatctcctccccacaggtgatggtgagccatcaaaggcccggttaataagaatgatgatgatgaaatagcgcttatggcttggtgcggtggcttacacctctaatcccagcactttgggaggctgaggagagaggatcactgaagtctagaagtatgagacaaatctgggcaacttagtgagacctcccccacaaccccatagctacaaaaaataaaaattagcaaggtgaggtggcacacacctgtagtcccagctacttgagaggctgaagtgggaagatcccttgagtccaggaggttgaggctgtggtcatgccactgcactccagcctgggtgacagagagagaccctgtctcaaaaacaaaaacaaaaacaaaaacaaaaaaaaaaagaaaagaaaaaagaaagaaatagtgcttactacacgcaaggcactgttctaagaggtttaccaatattgactcatttaaccctgacacttaccatggttagatagtttggatcactttagtggctacgtggagaccagtctggacacatgttgtggtgccggataaagacgaagggatgtgcctgtagtcccagtaactcaggaggctaaggtggcaggatcacttcagccagggagggagaggctggagctgagattgtgccactgcactccagcctgggcaacagagcaagaccttgtctctctttttttttttttttttgagatggagttttgctctatgtggcccaggctggagtgcaatggcttggtctcggctcactgcaacctctgcctcccaggttcaagcgattctcctgcctcagcctcccagtagctgggattacaggcacgtgccaccacgcctggctaatttttttttttatttttaatagagacggggtttctccaccttggtcaggctggtctcgaactcccaacctcaggtgatccgcctgcctcggcctcccaaagtgctgggattacaggcgtgagccaccgcgcctggccaagacctcgtctcaaaccaaaaagaaaaaaaagaggaagggaggaaaggaggtgatggcttttagaattaattaatttgtgtgctttcagttcttttatatctgtaggttgcttgatggcccagactatcacggcaaaggagtcatttgcatttgaagagaatgtgtcttccgcagttgttaggtggagtttctataaatatcatcaggtcaagttagttggtagtgctgttcaagtcttttataaattgatagttttccagctattttacggatttgtctatttctcctttcactgctatatcttccaaattgattcagagagctgcagtcaggagcgtactattgcagagaggatagaatgtttgggaccagaagaaacgttttatctctttaaatttactctcgtacgcagaaaacaaaatacaaataaactacgtatcccagcaagcctagtggaactcagggcaaatgcaaataagggggggggctgggcattcggctacgccccttttctgggttggcaaggcaactgatacagaagccagccaatcggtgatatagtcacctgcaggggcgggggcttgacgaaagccaataggacgcagggcagatggctcttcgggccaatgggttgggcgacggggcgggcttttgatgaagggtcgttggtgggaaagatggcggcgactctgggaccccttgggtcgtggcagcagtggcggcgatgtttgtcggctcgggatgggtccaggatgttactccttcttcttttgttggggtctgggcaggggccacagcaagtcggggcgggtcaaacgttcgagtacttgaaacgggagcactcgctgtcgaa

SEQ ID NO: 24045 - DNA, 2300 bp, Homo sapien
atttttagtggaaatgagtttttgctatgttgcccaagctggtaatcccacatttaacctaaatatctaaaaaacttatttttccttttctttattggcttctgtcattagactcagtgcatatgaacagagcttctgagtgtagacagcctgaaaagggtaaaataaaaggagccaattcgtacttaagcagaaaaaagacataatagagaaaaaaataaaatcataagaaaaagggaaaaaatagccaattgattgataatagaatgggaaagtttctaagtatgggaggtgggggtaggggtggagcagggcgctggtgttacagctcactaggagatgaggagagctgggtttgctttgaggcaattcaggtagctcttcctggttggtggagacagggaaggaacaggcagtcaaggttctgcttttgttctgtctcagccagtgcccattccaaggctcctattcctcgaaaaaactgacctgctgggcactcactgcaaagtatccgctatgagtggggcccctactagcaacatacttctccaggctggcctagtttacagaaccctcaatcccagctaacagggctttcttgagtcagggcctctctgctaccacacctcctcccacaacattgtgtgatcctttctgtttaggctccttccgtttggtactgattgctgcttttattagcaaacattacaccaaaatgaaaataaatacaagtgtcagtgcgggaagggagtaaagtgggttctgtgtcttcagtactggcaaaagatttgctgtgagacctggtggtcaacccagtacctgatcttctctgtgcacctgtgcaattattgtaaggatgtttatctgtctgtcttcttccccctcacagggcgggcagctgtggtcttccttatacaccctactgacacagggctagggccattcaggaagcagtcatttcagggataggcccactgccgcgcctgcctgctcatgtccacaagcagctgcccagctgatcaatcaccacaatttggggttaggagtttggtcctggaaggcaggtagcaacaactactacctagccaaagaatattctaaagagctgtcctgtcatgttcaatgtctaggtccacaatcccgcaagcttagcgaagtaatgctctgtcattcttacccccatttacagatggagaaatgggctgggagatgacagtatggaggcaccaggatttttgtctcggctcaatttctgcatctctaaatggaaataattctactaactctgagggttgttggggggatttaatgaatatatgtgtttacttgtttatctcctgttttctgttctagactgtaaaccccaatgggcagcgactttggcttgttcactgctctattgtcagagcctagaacaagtgcctggtacaaagtaggtgttcaataaatatctatgcctaaatggaagagacaggagagaagtctaggccagagcctgccccttctataaccttagttccccagatttgccttccacatcaggcagccactggttgatggaagcatcgtcgggctggggctggggctggggtaacctacttctggccttaggacaaggtcggcaaaaatctcagcagtgaggaggccagaaaagtctccaaggggcaggctgcaatgccagcctaagccctcaggtttcctttttctttttctacatcaggaaaagcacttttctcgccctgcctgcagagcgggccacccctagctgcaggtgagggacgggagaggagcctcccacgtgcggccgtgcgaggccgaggaacaggaacggcgtagctaggagaccaggtcccggagaaggagagctggccccactggcagagaaaggcggggaagggcgcggaggcggagcactgggcgggtacccgctggcggctctcgcgcggcggcgctgctccaccttaagcgactgtacccccttaagggcgggcgctcaagcagcgagccccgggggcggggcctccaatgcaaatgaggggcgtgggcaggcggggcggggcgggcggggcgctgacctgacgtcaggctcgcggcccgggcagttggctcggcggcagcggagcggccggagctgcggtgcggaccggggccgcgcggcgtggcgcggggagcggcggcggcggcagagccagagcaacatggcgccggtgggcgggggcgggcgcccggtcggcggaccggcccgcgggcgcctcctcctggcggcgccggtgctgctggtgctgctgtgggcgctgggg

SEQ ID NO: 24046 - DNA, 2300 bp, Homo sapien
cttgtctgacttgctgcattgtcccacagggaagtcccacctggccatcgtgcagaaggtaaacaacgagggtgagggtgaccccttctacgaggtcctgggcctggtcaccctggaggacgtgatcgaggagatcatcaagtcggagatcctggacgagtccgacatgtacagtgagtccagccttccacagggcccaggacccctttcctgcttggatcgaaacttggtgtccctagctggaagggccatagtgcagggacacaggaggcctagcatccagaggcccagtggctgggtgccctgcactggccggggtgagcagggagcaggttgctgagagcagtgcccggaggctgccttcaccctcggcctttgtgcctcggcgtcagcccaggaccctgccagccagagcctgctgctcctgcgtgggactaggggctggagagcaggagctgcggggcgggttccagtctcttcctaagtcctcaggggtctgtgttctcaattccacgctcttcttccggcagctgacaaccgaagccggaagcgggtgtctgagaagaacaagcgtgacttctctgccttcaaggatgcggacaatgagctcaaagtgaaaatctccccgcagctcctcctggccgctcatcgcttcctagccacaggtagcatgaggaggaccttccggtcttggtggaaatacggtcacgggggagaagtcctgggtttccggctgctttccccccataggacgagggctgcagcaggtgaggggtgcagagacaacacagccacccctggaaggggccgggtatctgctccacccctggggatctccctgcgattcatttgccattaatgggcggctactgcaaacttctaggaagcatccaagttactatatttaatagtttgggaaataatgactaggcactatggcttatacctgtaatcccagcactttgggaggccgaggcaggaggattgcatgagcccaggagttcgagaccagcctgagcaacatggcgagaccccatctctacaaaaaatacaaaagccaggcatggtggtgccctcctgtagtcccagctacttgggaggctatgaggtgggacagttgcatgtctgtggtcccagctactcaggaggctgatgtgggaggaccgcttgagcccaggagtttgaagctgcagtaagttgtgaatgcaccactgcactcagcctgggccacagaacaagattctgtctcaaaaataacaaaaaagaaaataaccactgaggtgggcccctaggctggccaggcccatcagggcttgtggaatgggaaggagaagggacgcttccccttctgcaggcctgctgggtgtggctggacccctcgtgtgctcacccactctgaggagcttgcatccagctctgctcttactctccagctctcccctttgcagacgtgtgctggttcccgcaggaattcacttctagttcagagacatttctctcttttcagccctgattcaaagctccactggggacttgggtgacaggttctgctctgcccgctctgtccccctcttcccctggcccaattcatcttccttcccaccccttacttgctaaaggggtggcaattccctctccattatttttcctgtgggatattgatgctgatgcaataattatagtctatatattttagtatatatggacagcacatatatactaagtgctgtccatgtgctatcccattcaccctcacaaccaccctgtgaagcttttacccccatattacagatgaggaaactgagatgcaggttaagtaatttgcccaaggtcatgtgctgttcttgcaggagccactgttcaagcccaggcaggcaggcagccttgtatccaaccagtcagaagccaagcgtgctccctccccagggaggtgcagaacgagggccggccgagcagggcgggagtcgtctgagcacagcgtggctgctgtggttggggtggaggcacagcagtgatcgagctttagggccacctggccagccccgtgtgaggtctcttctctctcctcctacagaggtctctcagtttagcccctccctgatatcagagaagatcctgctgcggctactcaagtacccagatgtcattcaggaactcaagtttgacgagcacaataagtactacgcccgccattacctgtacacccgaaataagccggccgactacttcatcctcatcctgcaggtgagcccgctcagccctgggcctgccacctgctccccctggcactgcagcaaccc

SEQ ID NO: 24047 - DNA, 2300 bp, Homo sapien
tagttgggactacaggcacccgccaccaagcccggctaattttttgtatttttcgtagagacggggtttcaccgtgttagccaggatggtctccatcttctgacctcgtgatgtgcccgccttagcctcccaaagtgctgggattacaggcatgagccaccgcgccgggccactattaccatttttttttttttgagacatagtcttgctctgtcgcccaggctggagtgcagtggcgtggtctcagctcactgcaagctccgcctcccgggttcacaccattctcctgcctcagcctcccgagtagctgggactacaggtgcacgccaccacacctggctaattttttgtatttttagtacagatggggtttcaccatgttagtccggatggtctcgatctcctgacctcgtgatccgcccgcctccgcctcccaaagtgctgggattacaggcgtgagccaccgtgcccggccagctattaccatcttttaaaaagttttttacaggccgggcgcggtggctcacgcttgtaatcccagcactttgggaggccaaggtgggtggatcacgaggtcaggagatcgagaccacggtgaaaccccgtctctactaaaaatacaaaaaaattagccgggcgtggtggcgggcgcctgtagtcccagctactcggagaggctgaggcaggagaatggcgtgaacccgggaggcggagcttgcagtgagccgagactgcgtcactgcactccagcctgggtgacagagcgagactccgtctcaaaaaaaaaaaaaaaagttttttacaaagccttttcctttggtcactcaccaccagcttactcatttttttttttttttgcacattaccttccacacaagttttactttgtggccacaatgtgcatactttttttgattgttactttcatgacatagcaaattgtttctatagagtctttataaaggtcatttaaaatgacatgtgcagtaagtcaaagtcttcttgtgctaggaaatttgaaaaaacaaaagtgtagagaaaaatacaaaaattactgaatctgaacatctatagagaagtgttgttagcagttggtttatttccttccaatcacatacagatcatatctgatgggtaaagaatattccatactgtcaacagaccacactgtcttctaaaatcgcttcagcagtgaggatcctctggaatagatcttgttaatcctgaggaattattctcccagcggtgagctatgagaagtggaatcaccagatgtagtaattcctgacagaactgccgcctgcttgtgtggctgagatgctgacctaggtatcaggctggtcgcgccggaacccagcacccacgctgagtctttctgagctccactctgctcctgttagatattaaccacctgaggtagctgtccagattcaaggcggtagtgattttgtgtgtctgtgtatttatcacggggtccgcggcgggaacgcaggggctgtgtcccacgtccccaaacctctagtagggtacggcgcgatgaacatcttccataaaccttaaacctcccggcgctcagtcactggttcttatttcagccctcttagccccgtaggtcggcgcgctgaaaacctttctggtacctggggcctttcctaagaaaaaggcacatgtctcgcacatttcagtctggtctgcaacttcaggcgcgccagcacccgaggttcttccgaccggccgctccgctcccaagccgggaacttcccagagaattggctcggcctccgggcgcgggggacagcatcgggaggagtgggactccgggcgccgcgcacgggccgaggacagccgggcttgggaggccctgcccgccgccccgcgtcctcccggccactgccaccccgcgcatccggagccgcagcagactcggcggggcccggagccccacgcccccggcccgcccctggccgccacttgtttactccccggcgcagcctagtccgaccctggggcccgcccccgcccaccgcctattggccgaggaggcgcgaagagccgtaacgattggcccggggaggcgcggggcgagcggggtaggctgcgcgagaggccgagagggggcagcaggcgatggcggcggcggtagctgcggcgggtcggttaggctggttgttcgccgcgctctgcctgggcaacgccgcgggggaggccgcgccgggcccgcgagtgctgggcttctgcctggaggaggatggagcggcgggcgcgggttgggtacgcggaggggcggcgcgggacacgcc

SEQ ID NO: 24048 - DNA, 2300 bp, Homo sapien
ttttttttttgcacattaccttccacacaagttttactttgtggccacaatgtgcatactttttttgattgttactttcatgacatagcaaattgtttctatagagtctttataaaggtcatttaaaatgacatgtgcagtaagtcaaagtcttcttgtgctaggaaatttgaaaaaacaaaagtgtagagaaaaatacaaaaattactgaatctgaacatctatagagaagtgttgttagcagttggtttatttccttccaatcacatacagatcatatctgatgggtaaagaatattccatactgtcaacagaccacactgtcttctaaaatcgcttcagcagtgaggatcctctggaatagatcttgttaatcctgaggaattattctcccagcggtgagctatgagaagtggaatcaccagatgtagtaattcctgacagaactgccgcctgcttgtgtggctgagatgctgacctaggtatcaggctggtcgcgccggaacccagcacccacgctgagtctttctgagctccactctgctcctgttagatattaaccacctgaggtagctgtccagattcaaggcggtagtgattttgtgtgtctgtgtatttatcacggggtccgcggcgggaacgcaggggctgtgtcccacgtccccaaacctctagtagggtacggcgcgatgaacatcttccataaaccttaaacctcccggcgctcagtcactggttcttatttcagccctcttagccccgtaggtcggcgcgctgaaaacctttctggtacctggggcctttcctaagaaaaaggcacatgtctcgcacatttcagtctggtctgcaacttcaggcgcgccagcacccgaggttcttccgaccggccgctccgctcccaagccgggaacttcccagagaattggctcggcctccgggcgcgggggacagcatcgggaggagtgggactccgggcgccgcgcacgggccgaggacagccgggcttgggaggccctgcccgccgccccgcgtcctcccggccactgccaccccgcgcatccggagccgcagcagactcggcggggcccggagccccacgcccccggcccgcccctggccgccacttgtttactccccggcgcagcctagtccgaccctggggcccgcccccgcccaccgcctattggccgaggaggcgcgaagagccgtaacgattggcccggggaggcgcggggcgagcggggtaggctgcgcgagaggccgagagggggcagcaggcgatggcggcggcggtagctgcggcgggtcggttaggctggttgttcgccgcgctctgcctgggcaacgccgcgggggaggccgcgccgggcccgcgagtgctgggcttctgcctggaggaggatggagcggcgggcgcgggttgggtacgcggaggggcggcgcgggacacgccggacgccaccttcctcctgcgcctcttcggcccgggcttcgccaacagctcttggtcctgggtggccccggagggggcgggctgccgggaggaggcggcctcccccgcgggcgagtggcgcgcgctgctgcgcttgcgcctgcgggccgaggccgtgcgcccgcactcggcgctgctggcggtgcgcgtggagccgggtggcggggcggctgaggaggcggcgccgccctgggctctgggcctgggggcggccgggctgctggcgctggcagcgctggcgcgaggcctgcagctgagcgcgctggcgctggcgcctgccgaggtgcaggtgctgcgcgagagcggctcggaggcggagcgtgcggcggcgcggcgtttggagcccgcgcggcgctgggccggctgcgccttgggcgcgctgctgctgctggccagcctggcgcaggcggcgctggcggtgctgctgtaccgcgcggccggccagcgtgcggtgcccgccgtgttgggcagcgcggggctcgtgttcctggtgggagaggtggtgccggccgccgtgagcgggcgctggacgctggcgctggcgccgcgagcgctcggcctcagccgcctggccgtcctgctcactctgcccgtcgcgctgcccgtggggcagctgctggagctggcggcgcggcccgggcggctgcgggagcgggtgctggagctggcgcgcggcggcggcgacccctacagcgatctcagcaagggcgtgctgcgctgccggaccgtggaggacgtgctcacgcccctcgaagactgcttcatgctggacgccagcaccgtgctggacttcggcgtcctggccagc

SEQ ID NO: 24049 - DNA, 2300 bp, Homo sapien
agggtactggttttaccttcaatctccgaactgctcagctaaaacagtgaagggagggatgaaaatgtggagttaagggagaacttgagaccttagggttagaaaagaagaggtgaggctgggcgcggtggctcacgcctgtaatcccaacactttgggaggccaaggtgggaggatcacttgaggtcaggagttcgagaccaggctgggcaaaatagtgagaccctgtctctacataaaattttaaaaaacaggagattaaaaagcaaaaaaaaaaaaaaaagggccgggcacagtggctcacgcctgcaatcacagcactttgggagggcgaggcaagtggatcacctggtcaggagttcaagaccagcttggtcaacgtggtgaaaccccatctttactaaaaatacaaaaattagcccggaatggtggggtgcatctgtagtcccagctactcgaaggctgaggcaggagaactgcttgaacctgggaggcgaaagttgcagtgataagagatcggccactgcactccagcctgcgcgacagagctgggagaaagggagactaagtcagcataaatggagttacttttggtgaaagcaaagtgttaagtttccctgactttaccgcagataagggattgacacctaaatacccttatctgcagtaacgccagggaccttaagaatgctctgaaggaaacattacaggtccagtcaatttgatattacatgtgtgcacacaacaatatcccagatacctggagactaccatcttttctatgttcttctagtttctatccaaaaatttggacctgctacaaagtcaagcacacagaaacactctgggagagggaaagagctgggggattagaggacaagcggacatacccctccctgcaaatggggggggggggctatcctgacgcgggggttaaagtgttcgctgtctaaaggattcctcccactctgatcgatggcctttaagtatttcaaaaggtcattccaagctgcaaggccaataccgtcttgaaaagggaccttagaggtctcactgctctccacaggggtgggaccctttccagaaggcttccataactctccaccccttttcagggagagggcactcgcacgggcgtcccctgcaccatgcccgggccgttacctcgcttgaattcctccaggacagcgtccagcttggtgtcgttgaagacgaagtggagcggatggttgtagaaacgagtgatggtgctgagcggcgtgcagtcttcgggatccacgaaggccaagtccttgaggtagagcatgtccacgatgttggagcgctcctcctcgtacaccgggatgcgcgtgtggccgctctgcatgatgctggccaggacgccgaagtccagcacggtgctggcgtccagcatgaagcagtcttcgaggggcgtgagcacgtcctccacggtccggcagcgcagcacgcccttgctgagatcgctgtaggggtcgccgccgccgcgcgccagctccagcacccgctcccgcagccgcccgggccgcgccgccagctccagcagctgccccacgggcagcgcgacgggcagagtgagcaggacggccaggcggctgaggccgagcgctcgcggcgccagcgccagcgtccagcgcccgctcacggcggccggcaccacctctcccaccaggaacacgagccccgcgctgcccaacacggcgggcaccgcacgctggccggccgcgcggtacagcagcaccgccagcgccgcctgcgccaggctggccagcagcagcagcgcgcccaaggcgcagccggcccagcgccgcgcgggctccaaacgccgcgccgccgcacgctccgcctccgagccgctctcgcgcagcacctgcacctcggcaggcgccagcgccagcgcgctcagctgcaggcctcgcgccagcgctgccagcgccagcagcccggccgcccccaggcccagagcccagggcggcgccgcctcctcagccgccccgccacccggctccacgcgcaccgccagcagcgccgagtgcgggcgcacggcctcggcccgcaggcgcaagcgcagcagcgcgcgccactcgcccgcgggggaggccgcctcctcccggcagcccgccccctccggggccacccaggaccaagagctgttggcgaagcccgggccgaagaggcgcaggaggaaggtggcgtccggcgtgtcccgcgccgcccctccgcgtacccaacccgcgcccgccgctccatcctcctccaggcagaagcccagcactcgcggg

SEQ ID NO: 24050 - DNA, 2300 bp, Homo sapien
gagctggcctgtgggcaggcatcagtgtgagtggttccactctggtggctcagcagatgagaggtgaccttgagtccctgcagctgcccttgctctgtccctctgctgtcatctttggctgccatctagacccctcagacattcttcttgggattcagtcacacgaccactgttccaggggatcttccagggcctgctttcttctgttcgtgatagaatcatcccagtgtggcaggccatggagaattgtgtgccttgttctagagaagtttgaaagcaaaggagtgagtccctttctgtaggaaacctgccaaaggggctggcttcctgggagaagggagccgagatgaggcctctctgcgccgaggtggccatttagatcctgggctttggtgctggaatccaagacattaaccaaaaccacatgtcgcacttggccttcctggcctggcctggcctgacaggtttgtactctggtggggcagccgtggcccatgtagagacggcacccagcacaagcactgagggttagaaggtgtctagaaacgcggttcagcagggctgagtggcaatctccaggggccctagccttcctcccggaaagcggggagacgattcatgtggccatttccagctttttgtccagggcaatgcaagcatcctggagaactgtgctttatttaatcaagcccatgggatgtaaagtatgatccacacaacaacacaaacttgactgtttgatttcccaggagagtcttgaagcagataccccctcacaggcaggtccaggccagttacccctcagcgtttccactagtgacaaacgagggcctggttgaatgagttgctcccatccccctgtcctggacctgtgccgcccaggccggcagccccctccacctggggctgtgctacctaaaggtggagtctgagttgagatgtgctgtgagcataaaacacaccagattcagagagtgcaacatagacaaaatgtctatgaatattttttgtattgattacgtattgaaatgctattttgactatattgggttacttacaatatattattaaacttaattttatgtgtttcttttgacttttttaatgcagctattcagattttaaattacttaggtggcttgcattctgtttttttcagacgggtctaacgtagtgtggatgaaaagcacttatctgagacatagtaaattcctgaagcctccccagcattccccagcactctgagacttgggcttttttccaagcttacattccctcactaagcaaacaaaccaaataggaagctaacctgagaaagacatatagggtaaggtggaaaatctcagcctggtgctcctcctccctgcacagcttggctcccgagtggccagctaccactcttctcatcccctagttgacagcccctaatgggcagctttaagaattaggaaaaccaaaagatacacagacacacacacatacacacagtctatctgtctgtctgtctatctttctatctctttctaatttctatcataaagaaggacaagaagccatgcacatttatgtaggatggacagcatatatatttactttaagaagaaaaagacttaggaaatcctcccaaggacagtcaggctgggtggccccactcagctgccccgtgtggactgtcgcaggagagcctgtgtttccagagtcagtgcccttgttagcctgcatgtgcaggctggctgatgtgtgaggcatttgtgttctccactggagggaggcatccttgtctaaactgcatccatgtcatggaggtgcacggacctggagctggatcccagctctgccagctctgcctggggggccttgtgcagatgggcatgagcccactgcttcattttcaacctgtgtgaaaataaggccagttctcataatcacgctgggagtcttaagtaaaaacctagaaaagagtgtggctctgtgcctggcacgttgtaggagcatgaacgttagccgtgtccttttggtgggcctataccaggggagatgaatcaaactggggggggcccagcaagctgttccatgagtgtcctccccccacagggaagtcccacctggccatcgtgcagaaggtgaacaacgagggtgaaggcgaccccttctacgaggtcctgggcctggtcaccctggaggacgtgatcgaggagatcatcaggtccgagatcctggacgagtctgaagactaccgtgagtccagactcttggcagttctgtctccgctgggcctgcacacttccccaggcgtatgt

SEQ ID NO: 24051 - DNA, 2300 bp, Homo sapien
tgtaatcccagctctttgggaggcccaggcaggcagatcacgagatcgggagttcgagaccagcctggccaatatggtgaaactccatctctgctaaaaatacaaacattagctgggcgtggtggtgcgtgcctgtagtctcacatactcaggaggctgaggcagaagaatcgcttgaacctaggaggcagaggttgcagtgagttgagatcacgccactgcgctccagcctgagagactggagggggtggaaataagtcttcccaaagcagctgatcccgtgcccttgattgcatggtaaaagtgtccgcctgttagcatggtggctgaggtctgcagggctgtacagagtctgtgcgtcatggccgggccgcctgccctgcatgcttccagaagtatcgctttaatcatgcgtcgattttcaaacatagcatctctagttccgttcttgagactgccataggcatggggtctccaggttaattgctgcccatttgcattggtaatccttgaatacatgctttatagtgagaagtttttcagtggccagagaggctgttattattttttaattttttttttttattttgagacggtcttgctctgtcatccaggctggagtacagtggcgcattcatggcttactgcagcctcaacttcccagactcaagtgttcctcccacctcagcctcctgagcagttgggactacaggcgcatgccaccacacccgtctaattattttatttttttgtaaagacacggtctctctatgttgcctaggctggtgttgaacttctggccttaagtgatcctcccgcctcagcctcctaaagtgctagggttacaggtgtgaatcactacatctggcctaaatttaaaaaagtttttagtctacatccagtgacctatcagggatgcttgttattttatacaagctgctttgttatcatatcagcattctcttcagccagctccaaggcagatagtcacccctctctctgtgtggttggggtgggagcaggccccgtggagggagcggtgctgaggacatgtccctggcgttccgatgctgctccatcgaggaccccctggcctcaggaggaaggagcaggcgatgcagccccttagtgtggtcgtgttgactgacaggtggctgatgcctgagcgcgccctcttcttccatcttaggagacaccgtggtgaagaggaagcctgcttctctgatggcccctctgaagcggaaggaggagttctccttgttcaaggtgtctgatgatgaatataaagtaacaatctcgcctcagctgctcttggccacccagcgcttcctgtcccgaggtgaggcgggagggtggtccatgccccctgctctcctcaccgttctgtgggtcaggaggccgcccagggccgacactgactctgctccccactcctagcaggcgggtgcgtcttgaggacttctgtgttctctgcagccctgccagcatcttgggtcatgggagagacacctcctctctgccagatgaccaagagcagggccaggccagtgccacgcctggtgcaccacagccagggggcctcagctctcagctgggcggatgtggggtgccctgcccagttctttttttttttttttttttaaagatagggtctcgctctgtcacccaggctggagtgcagtggcacgatgttggctcactgcaacctccgccttctgggttcaagtgattctcctgcctcagcctcccaagtagctgggattacaggcgtgtatcaccacgcccagctaatttttgtatttttagtagaggcggggttttgccatattggccaggctggtctccaactcctgactgcaggtgatccacctgcctcagcctccgaaagtgttgggattacaggcgtgagccaccgcacctggcccctgcctagttctcttgtgttgaggtgttaggggcagctgctcacaggccacccgggagatccctggtgggcacaataactttaaattgcctacagtgttgggtgtggttccactggccactaggccccagtggacactgtcccttttttccaccacgtgcagaagtggatgtattcagcccgctgcgcatctctgagaaggtcctgctgcacctgttgaagcatcccagtgtcaaccaggaagtgaggtttgacgagagcaaccggctggccacacaccactacctgtaccagcgcagccagccggtggattacttcattctcatcctgcaggtagctgtgggtcccaggcctggagtccctcctgcttcctcag

SEQ ID NO: 24052 - DNA, 2300 bp, Homo sapien
agggtgtgaggcccagcaagcccatctgtgggctgctggccccagcctggtgcagcctctggcgggaggcaaatggcagggaggtgttaggttgctagagttctttagaaggaatatggttctacctgactagaaagtcctaggatctgttaccctatcattccaccctgttctttccccacaacaggctgattcctcagtgctccccagctcctgaactcctgaggtggggcccggtgggaggaagcatgggtgtttgctacggaggctttgccccaggcacaggtcccaataactcataaccttcacaactcctttaggcaattgccttaagtgtttgagcttaaatgtagcttcaaaaggagccgagaactgaacccaggcatttagaattttaccccggggggacttctctgtccctctgagcttggagtcaggtggcagtcagtatgatctggtaggaatcttaacaacatgggggaagctaaggtgtcatctgccctgaggctacctgggcaaatgcccagcagtataaataggttgtggcctcatgtccccccagctgtgttcctgctgacaggagcagggtaggcggggatccgttgtccccctgggtgtcagctgatgacacagttgcggagcctgcagcacccacagggtgagggagcttgccagcactctggactgcaggagctttgaggccggctcccatcccgggcaccagccttgtgacatctgcccttataagacagctccctgctactccacagctctgttttctaagggttcctccaattttcccaactcagtactcatatcctgttcctacaggtaagtggagaaagagttgaagggaaagtgttgggatttggacatggagttcctgaccctggagcctggcctagtgactggaggaggggcccccaagaggctgtggcccgggagaagctgaaattggaagaagagaagaagaagaaagtgagagaggggcgggggccggggttgggggcagtggctaatccctgaggccggctgagcagtgaggcctggagggactctggtggggcagcctgagcagctggtgtctcctgtcggcagggcagagagatctcttgaccagcggctgatggctggcatggtcttgtcttctgccccagcttgaaagatttaacagtaccagatttaatctggataacctggctgacttggaaaacttggttcaaagacggaaaaagcgactgagacacagagtcccccccaggaaacctgagcccctggttaaggtgagtgggaggtcggggttagggcagtgcacacaccagggctccagttccagaggaagggcttggggcagagtgggcactgcaggccaggaccacacagccagtgcctggggagcccattaaatccactccagagcccccgcggatgtgtccgccagggctgccataacaaagtcccacagcctggacagcctcaacagcaggcatgtgtcacctcgctgtcctgggggctggaaggctaacaggaaggtgttggcgaggctggttccctctgagggtggtgagggagaatcccttcatgcctctccggcttctggtggatgctggtgatctttggcgttccttggcttgtagatgtatcacccaactattgccttcatgtttgctgggcgttctgcctgtgtgcatgcctgtgtccatgtgtctcccccaactttttttttttttttttttttttttttgagacggagtctcgctctgttgcccaggctggagagcagtggcacgatctcggattactgcaagctctgcctcccgggttcatgccattctcctgcctcagcctcccgagtagctgggaccacaggcacccgccaccacgcccggctaatttttttttgtatttttagtagagatggggtttcaccgtgttagccaggatggtctcaatctcctgtccttgtggtctgcccgcctcagcctcccaaagtgctgggattacaggcatgagccaccgcatccggcccacgtgtcccctttcataaggacatcagtcacattggattagagcccactttaacacaagtcatattggtgaggggcccaccatacgccggtgtgacctcatcttaactaattacatcctcagtgactctgtttccaaataaggtcacattctgaggtacctggggttagtacttcatacgaatcttggggagatacaagtcaatccataacacacacgctcacacacacacagtctattcaatctcctggcgtgggattagaataagaaac

SEQ ID NO: 24053 - DNA, 2300 bp, Homo sapien
gcactcattttattttttttttttttgagaccgagtcccgctctgtcatcgggctggagtgcagtggtgcgattttggctcaccacaacctctacctccagggatcaagtgattcttgtgcctcagcctcccaagtagctgggactacaggtgcctggctaatttttatatttttagtagagacggggtttcaccatgttggccaggctggtctcgaactcttgacctcaggtgatctgcccacctcagcctcccaaagtactgggattacaggtgtgagccaccacgcccggcccctttgccctcattttagatgactctttccctcctcataaccaaaagcaaggaacaggctgggtgtcacctgaggtcaggagtttgagaccagcttgaccaacatggagaagccccatctctactaaaaatacaaaattagccagggtgatggcacgtgcctgtaaccccagctactcgggaggctgaggcaggagaatcacttgaaccggggaggtggaggttgcggtgagccaagatcgcgccattgcactccagcctgggcaccaagagtgaaactccatctcaaaaagaaaaaaaaaaaaaaaagcaaggaacacctttgtctgaaaaaagcaccctaaatttagcctaagaactaagttttcagctgggcgcgatagcacaagcctgtaatcccagcactctgggaggctgaggcgggtgaatcacaaggtcaggagttcaggaccagcctggccaacatggtgaaacaccgtctctactaaaaatataaaaaattagctgggcatagtggcaggtgcctgtaatcccagctactcgggaggctgaggcaggagaattgcttgaacccgggaggtggaggttgcagtgagctgagatcgcgccactgcactctagcccaggccacagagcgagattccgtctcaaaaaattaaaaaaaaaaagaaaacttttttttttttttttttttagacggagtctcactgttgccgggccaagaactgagttttctaagaaagctctgccttttcctgagttctctgaaaatgtggaagcccttccaagaggccagttctttgggagctggggagccatctggggcctgtggccatccttggccacagttctccctccttgtaccctggtcatgtcttctcaggttgctccgattttggggtcttatttactggctgatttccttgcaaaggccaaggcggagttcaaggttcagctgggtgaagggcatgcctggcttcctgagaattaggaagggtgactgatggcttgagacacattgctctgcggctggatttcatggttactattccatcccgggacctgacgcggatcagtctcccctttcctgtggctggaggggcacactccgtccctggagagcgtctggtaggggcttgtagaggggcggggaggacttccagaggcccgaggacaggcgccaggcttggcttcggggctggggcagctgccatgtgctctcagagcactgagggaggagcgggggagcccgggggcgagaaacccacagcacagggaagggaagggcagccttgaaactgcaagttgggagatcacggtttcctcacgtggccaccatgagggctgaggctgtaggctggccgctcctgcccctcccgaccaccccctcaggcttccagcctccttgctcagccacctaggctgggctttcaggttcacaggcagccggccctacaacatggaggcccaggctgggctttcttcaggagtggcatctaaacttaggagaggggaacacgtttcacccgaatctgggctagcagtgtgttggttaaatggcccctgagtaggtgtggggcatggcagaggtgcaggagtgggtgtccgaggatgcagccaactcatctccaaacagctccttttcttttccccagtgggctgcattcccagactggtattttagttggtgtgacagagtcccagagtcatctggcccaggggcttgcacctgcgccagtccttccctgtccacccctgcccgtctccaggcgctcctataaagggctgagcagttcagctcttctcactggggggtgtgaggaacaggggggaccatggacttcatcagcattcagcagttggtaaggatgtgggacggaggtgggaggcaccctgggaccggcttgataggaggaggctggctagagagggctggcagcttctttctgtggtgtgagggtcaagtcttaggtgcagggaagcatgcagttcttttataaaaatct

SEQ ID NO: 24054 - DNA, 2300 bp, Homo sapien
acagggtgctgtgccccttcagagggagtgcagggcttggggtgggcctagtcctgctcctagggctgtgaatgttttcagggtggggggagggagatggagcctcctgtgtgtttggggggaagggtgggtggggcctcccacttggccccggggttcagtggtattttatacttgccttcttcctgtacagggctgggaaaggctgtgtgaggggagagaagggagagggtgggcctgctgtggacaatggcatactctcttccagccctaggaggagggctcctaacagtgtaacttattgtgtccccgcgtatttatttgttgtaaatatttgagtatttttatattgacaaataaaatggagaaaatgaaacgattgctctgatggggctaagatgtttgggctaaagcctttctgggtaccaagagggaaggctctctgggtggagggaggctggactgggcctcccccacaatcccagggcagccaccacttttgtggtccctgcctgcctgtgggaggggacagcccagctctagtgttttcccacagtggtggctgcggggctgggaacgagaccatggccatagccccttgggagccagccttggcttctggccagaaggagaagtcagggcactgggagtccaggggagaagcggagtggtggggggggtgccttcccagaactcaagacgggtagtgggaatgaggggccaaaggagtggaaggttgtggagatgagatcattgcttgtgtgaggatggggttctcaacctgcttaggggaggagaaacgacttccagccttctacccaccaggaatgctagggtcttccgtgccccaactagcgggggaaggaacttacatccagtgtgcaccagaccactgtcctggagagggactggcacagaacccaacctgcattctgtcgttcatgcactctttctaagccgatcaggcggtctcccctgtacacttgatcgtggcttgagcaggcagctgcctgggttttaactgggaattgagaaggctggggtccgctgaggagcacgctgcgaaggtgcgcggtccgcagacggcctcccggtgggttttgatcatgaagaccgattccgtaaactcagcgcccactgtggggccagggggttctgcacaaaccaaggccctgcccctgccctgaggtggagctacaggcaggacaagttgtggccacctgccccttgctggacttgtaaggaagagcagggtacggggaggggcgtctcgaggcctttccagccgtcactttgccgctgccccgggggcggtcggccttggtccggggtggtgccaggaagaggggctaaaaaccgtggagcgcgccccggcccgatggctcacgcctgtaatcccagcactttgggaggccaaggtgagcggatcacgaggtcaagagatcgagaccatcctggcgaaaccccgtctctactaaaaaatacaaaaaattagccgggcgtggtggcgggcgcctgtagtcccagctactcaggagtctgacgcaggagaatcgcttgaacccgggaggcggaggttgcagtgagccgagatcgcgccactgcacacaagtctgggtgacagcgagactccgtctcaaaaaaaaaaaaaaaaaaaaaaaagaccgcggagcgcgtggcgcctccctgccctagggactaggggcggtaaagagaggaggctgcgaggtcgctggacggctgggtcatggcgaaggtaacgggaaagctcccgaccggacccagctgcctcatccccacaccctgcaaggccaggcggcccggcggccctccagcggcgcgcggctcccggaacccagcgcctcagtcctcgcttggccttggacgccctcgcgcggaggcctcggggcacggccgggcgcaacaagccccgccctaccgttgcaattggttctcgagctaaggcctaggcgtttgattggtcagctttggcgagaaggcgggactagggcgacagccgcggacgccgagcggccagatcagggacgcggggcgggccctgcgtccgcccctcccgccgaggctgagcctgagacccggggcggatcgactgacgccggggccgggatggcgacgcctcggccctgcgcggacgggccctgctgctcgcatcccagcgcggtgctcggcgtacagcagacgctggaggagatggacttcgagaggggtgaggctgccgcgcggccctcgtggttctcaccaggccccggcccaaggaggaggcgtggggccaaggagag

SEQ ID NO: 24055 - DNA, 2300 bp, Homo sapien
ctggctcggtgagtgctagggcagggatgcatctccccacccagctgcggtgccatcccaccctgctgatggcctgccccccacaccctgcccccagtgcattaacaactggcatcggcgccacggctacaccagctccctggagctacccgacaacatcctcaacttcgtcaagaagcacccgctgatggaggagcaggtggggcctcggtggagccgccccctgctcgtgaagaagggcaccaacttcacccacctggtggccgaccgggttacaggacttgatggagccacctatacagtgctgttcattggcacaggtgggtgcatgggtatgcaggcatggctgctcaaggctgggcagaagcccgtgtgcccagggcagggagatttggagctgccccacggccttgtgccctctcatttacaccttctcctctgcaccccccaggagacggctggctgctcaaggctgtgagcctggggccctgggttcacctgattgaggagctgcagctgtttgaccaggagcccatgagaagcctggtgctatctcagagcaaggtagtaagttgggccctatctgccactgtccccagcactatcccatctcactctctccatctggctgcttctcccagttgggcctatgtgcttggccagtgcagagttaggaacacacacacatgtggatgcacaccttgcctaacttggggtgggttcctggaaacgagaatgaaaacagaatggaatctgcactgcacagggccattatatatagccaggtcacggggctgcgctcccagcatcaagccttggcaactgctcccatgtttctttcagaccctccaagctgtgctgtggttctggctctggcctcttccctgaccatgcccctgtgaccagacctcccaggctgtgagatgtttatgatgccctcaccatggtggttttccttccagcccccatttccgtgactgtttccctgaagtgcttgcattatacccttgtgcaatactctttttggtttttttttgagatggagtctcactctgtcacccaggctagagtgcagtgacgcgatctcagctcactgcaacctccacctcccaggttgaagctattcttatgcctcagcctcctgagtagctgggattacaggtgcctgccactatgcccagctaaaggttttttgtttttgtttttgttttctttgagatggagtctcactctgtcgcccaggctggagtgcggtggcatgatctctgctcactgcaacctccacctcccgggttcaagcaattctgcctcggcctcccaagtaactgggactacaggcacgtgccaccatgcccagctaatttttttttttttttttttttttgagatggagtctcgctctgtcacccaggctggagtgcagtggcgcaatctcggctcactgcaagctctgcctcccaggttcacaccattctcctgcctcagccttccatgtagctgggactacaggctcccatcaccacgcctggctaattttttgtatttttagtagagacggggtttcaccgtgttagccaggatggtctcgatctcctgaccttgcgatccgcccgactcagcctcccaaagtgctgggattacaggcgtgagccactgcgcctggccagccggctaatttttgtatttttagtagagacaaggttttaccatgttggccaggctggtcttgaactcctaacctcaagtgatttgcccacctcagcctcccaaagtgctgggattccaggcatgacctgctgttcctagttgccttgtgcaatactcttgtggcatgtttgctacacctcctgaactttgatttgtttgccttttaccagctattatgactcaaaattgtcccctagaacatggaataatggcagaaagaaagtgtgtggttgaataaacacacagattggcatccaccgttgaaacaggaaaacatcttatgttatgctgctgctgttgtgagggctgatgggccttgaaatgtatttcctgcactatgtgtgtgtgagtgtgtgtgattatactttttggcctcacagccccatcatccctttctaataacgtcacgtcgataaggggcttaggattgcatctggcctgtgtaagccctctgagttctgcggttcttagagttcccttttcagcactatagctctgccttgttcccttgttcctccttctggcgccccgtgctgtgccccctgcaggagtccaagctgtccccatgctgcgttctggtccggccgcccctc

SEQ ID NO: 24056 - DNA, 2300 bp, Homo sapien
cccccatgcaggctgggtgagtccttggggcttggttccacttgggtctgtgttggccggatgtgtccatacctcatgtgtggcctagctgacctctgtctcccatagatggtgagctgtactcggccacactcaacaacttcctgggcacggaacccattatcctgcgtaacatggggccccaccactccatgaagacagagtacctggccttttggctcaacggtgagccaccggggggcctgtgggagccatgggtgggaggtcccccggggcccagcccctccctgctgacctcctccccttcccacagaacctcactttgtaggctctgcctatgtacctgagagtgtgggcagcttcacgggggacgacgacaaggtctacttcttcttcagggagcgggcagtggagtccgactgctatgccgagcaggtggtggctcgtgtggcccgtgtctgcaaggtaccgagtctcacagcggtgggccctgggagccctgctggcccagcggggctgaccggcagtgtccccttgccgtctgccagggcgatatggggggcgcacggaccctgcagaggaagtggaccacgttcctgaaggcgcggctggcatgctctgccccgaactggcagctctacttcaaccagctgcaggcgatgcacaccctgcaggacacctcctggcacaacaccaccttctttggggtttttcaagcacagtggtgagttggccagggctcccacagagtggggaggagctggggttcaggtcagggacggtgcatgggtgggagcctggaccaggcctcagaggcagtcccggaagccaggtgtccagaagccaaggagaatgctggcacctgcccctttcagagctgcctgtgaaggggcagggccccatgccaggtggcacttgagctgccagggcattctggtacccatggccagtttgtgccaggccctgccttcctgctgcttgcccttagctggggtgggaagagataaggtgggtacctgaccctgggctccctctcgctgtgacaggggtgacatgtacctgtcggccatctgtgagtaccagttggaagagatccagcgggtgtttgagggcccctataaggagtaccatgaggaagcccagaagtgggaccgctacactgaccctgtacccagccctcggcctggctcggtgagtgctagggcagggatgcatctccccacccagctgcggtgccatcccaccctgctgatggcctgccccccacaccctgcccccagtgcattaacaactggcatcggcgccacggctacaccagctccctggagctacccgacaacatcctcaacttcgtcaagaagcacccgctgatggaggagcaggtggggcctcggtggagccgccccctgctcgtgaagaagggcaccaacttcacccacctggtggccgaccgggttacaggacttgatggagccacctatacagtgctgttcattggcacaggtgggtgcatgggtatgcaggcatggctgctcaaggctgggcagaagcccgtgtgcccagggcagggagatttggagctgccccacggccttgtgccctctcatttacaccttctcctctgcaccccccaggagacggctggctgctcaaggctgtgagcctggggccctgggttcacctgattgaggagctgcagctgtttgaccaggagcccatgagaagcctggtgctatctcagagcaaggtagtaagttgggccctatctgccactgtccccagcactatcccatctcactctctccatctggctgcttctcccagttgggcctatgtgcttggccagtgcagagttaggaacacacacacatgtggatgcacaccttgcctaacttggggtgggttcctggaaacgagaatgaaaacagaatggaatctgcactgcacagggccattatatatagccaggtcacggggctgcgctcccagcatcaagccttggcaactgctcccatgtttctttcagaccctccaagctgtgctgtggttctggctctggcctcttccctgaccatgcccctgtgaccagacctcccaggctgtgagatgtttatgatgccctcaccatggtggttttccttccagcccccatttccgtgactgtttccctgaagtgcttgcattatacccttgtgcaatactctttttggtttttttttgagatggagtctcactctgtcacccaggctagagtgcagtgacgcgatctcagctcactgcaacctccacctcccaggttg

SEQ ID NO: 24057 - DNA, 2300 bp, Homo sapien
ggagtactcatagccgtctgtgcctcctgctctgctggactctgatagaggcagtgggcagcagggcaaagaaggaagcagccgccgaggaagcgaaggtggggtgggggtgcccagccctgcggccggaggtgccattgaccctgagagcaagagccatcagtctgatggcttcctctggccggaagctgtggctgagatatccttccttcctcccagcagcctggatttgcctcctcccaggctgggaaaggctagggaggcccaggtggggctgtcagggccaaaggctgtttcaaaagtgtcctttattgccaatcagggggtttggctggcatctgcttgtggcatggggtgctggctctcgtggagcaagactgagggctgtcgagccccaggggtcctgcccatcagcagccatgcttacccctgcagagctggccacggtagtacggcggttctcccagaccggcatccaggacttcctgacactgacgctgacggagcccactgggcttctgtacgtgggcgcccgagaggccctgtttgccttcagcatggaggccctggagctgcaaggagcggtgagaggtggggcagtgggaggcagtcgggcctgccagagggcaaggcccagaggggctgtgcttggctaggtggtccctcagcctggctgcccccacagaagtgctgctgggcatccggggcctgccctctggttggggtcagcatgcggcattcctctcctctctggcacttactgaattctgtgtagtggggtggtttggggcttccattctgtactaaaggaagtccccagagaatagggaccatgcctctgcactgggcgtccctgtgttgctgctgcaggctgtgcttgtgacacgtgctcagtccgtacctgtaacgtggctgacatccccttccctttccccagatctcctgggaggcccccgtggagaagaagactgagtgtatccagaaagggaagaacaaccaggtgggtgcttggacgctgctcctggtgctgccttcaccccaggacgtctcctcccattctggccctcgcgctctcactaaccggacacctttctgcccccagaccgagtgcttcaacttcatccgcttcctgcagccctacaatgcctcccacctgtacgtctgtggcacctacgccttccagcccaagtgcacctacgtcgtgagtgctgccctcctacctcggtgtccccagccccccgccctcctcacccttctctggactcgtggatgtggcccacagagccctgcccttaagcatctcctcatcacctctctctctgtccttagaacatgctcaccttcactttggagcatggagagtttgaagatgggaagggcaagtgtccctatgacccagctaagggccatgctggccttcttgtgggtgagtggctgccccccatgcaggctgggtgagtccttggggcttggttccacttgggtctgtgttggccggatgtgtccatacctcatgtgtggcctagctgacctctgtctcccatagatggtgagctgtactcggccacactcaacaacttcctgggcacggaacccattatcctgcgtaacatggggccccaccactccatgaagacagagtacctggccttttggctcaacggtgagccaccggggggcctgtgggagccatgggtgggaggtcccccggggcccagcccctccctgctgacctcctccccttcccacagaacctcactttgtaggctctgcctatgtacctgagagtgtgggcagcttcacgggggacgacgacaaggtctacttcttcttcagggagcgggcagtggagtccgactgctatgccgagcaggtggtggctcgtgtggcccgtgtctgcaaggtaccgagtctcacagcggtgggccctgggagccctgctggcccagcggggctgaccggcagtgtccccttgccgtctgccagggcgatatggggggcgcacggaccctgcagaggaagtggaccacgttcctgaaggcgcggctggcatgctctgccccgaactggcagctctacttcaaccagctgcaggcgatgcacaccctgcaggacacctcctggcacaacaccaccttctttggggtttttcaagcacagtggtgagttggccagggctcccacagagtggggaggagctggggttcaggtcagggacggtgcatgggtgggagcctggaccaggcctcagaggcagtcccggaagccaggtgtccagaagccaaggagaatgctggcac

SEQ ID NO: 24058 - DNA, 2300 bp, Homo sapien
tatgtgcacatgctcgcatggttgccggggcacagcggggacccagcagtgctccctgtgcacacacccgtgtgaaaggtgatgtcaggtgtttgtatcagccgtgcgctctggggacctgggatgagctcacctcccacaggctccactcgggtgccagtgaagccctgccatgccggtctgtgtctggatccattgttgcctgcaaagactaaggctggtttggggggaccctgaggacaggtcggcagccatatttggcagctgatgtaggaatcacgtgactgtataaatgtcgtagtgccctgcatgccgggtggcagcaagacttcccaggccccagccccatctccgctctctgagcctctggtttctccggacctccctggcctggctcacagcccagctcccctcctgccatccccacctgtcctagtggcctgctgtgctcgcatctctggcagcctggattggggtcctgctggagtgaagggtttcctgaggcagggagtactcatagccgtctgtgcctcctgctctgctggactctgatagaggcagtgggcagcagggcaaagaaggaagcagccgccgaggaagcgaaggtggggtgggggtgcccagccctgcggccggaggtgccattgaccctgagagcaagagccatcagtctgatggcttcctctggccggaagctgtggctgagatatccttccttcctcccagcagcctggatttgcctcctcccaggctgggaaaggctagggaggcccaggtggggctgtcagggccaaaggctgtttcaaaagtgtcctttattgccaatcagggggtttggctggcatctgcttgtggcatggggtgctggctctcgtggagcaagactgagggctgtcgagccccaggggtcctgcccatcagcagccatgcttacccctgcagagctggccacggtagtacggcggttctcccagaccggcatccaggacttcctgacactgacgctgacggagcccactgggcttctgtacgtgggcgcccgagaggccctgtttgccttcagcatggaggccctggagctgcaaggagcggtgagaggtggggcagtgggaggcagtcgggcctgccagagggcaaggcccagaggggctgtgcttggctaggtggtccctcagcctggctgcccccacagaagtgctgctgggcatccggggcctgccctctggttggggtcagcatgcggcattcctctcctctctggcacttactgaattctgtgtagtggggtggtttggggcttccattctgtactaaaggaagtccccagagaatagggaccatgcctctgcactgggcgtccctgtgttgctgctgcaggctgtgcttgtgacacgtgctcagtccgtacctgtaacgtggctgacatccccttccctttccccagatctcctgggaggcccccgtggagaagaagactgagtgtatccagaaagggaagaacaaccaggtgggtgcttggacgctgctcctggtgctgccttcaccccaggacgtctcctcccattctggccctcgcgctctcactaaccggacacctttctgcccccagaccgagtgcttcaacttcatccgcttcctgcagccctacaatgcctcccacctgtacgtctgtggcacctacgccttccagcccaagtgcacctacgtcgtgagtgctgccctcctacctcggtgtccccagccccccgccctcctcacccttctctggactcgtggatgtggcccacagagccctgcccttaagcatctcctcatcacctctctctctgtccttagaacatgctcaccttcactttggagcatggagagtttgaagatgggaagggcaagtgtccctatgacccagctaagggccatgctggccttcttgtgggtgagtggctgccccccatgcaggctgggtgagtccttggggcttggttccacttgggtctgtgttggccggatgtgtccatacctcatgtgtggcctagctgacctctgtctcccatagatggtgagctgtactcggccacactcaacaacttcctgggcacggaacccattatcctgcgtaacatggggccccaccactccatgaagacagagtacctggccttttggctcaacggtgagccaccggggggcctgtgggagccatgggtgggaggtcccccggggcccagcccctccctgctgacctcctccccttcccacagaacctcactttgtaggctctgcctatgtacctgagagtgtgg

SEQ ID NO: 24059 - DNA, 2300 bp, Homo sapien
aggcgtgagccacccctccccgccacgccccgctagtttttttttttttttaatttggggctgggcgtagtggctaatcccagcactttgggaggcctaagcaggtggaccacctgaggtcaggagttcgagcccagcctgaccaaaacggcgaagtcccatctctactaaaaatacaaaaattagctgggcatggtggcgcatgcctggtcaacatggtgaaaccccgtctctactaaaaatacaaaaattagccaggtctggtggcaggcacctgtaattccagctacttgggaggctgaagcaggagaatcacttgaacccaggaggtggaggttgcagtgagccgagatcgcgctattgcactcccgcctgggtgacagagtgagactctgtctcaaaaaaaaaataataataataatttcttttgtagagacagggtctcagtatgttgccctggctggtcttgaactcctggggtcaagtgatcctcccatctcagcctcccaaattacttactttttaaagggtggtcataagggtgaagtaagaaaatgtacatcaagacaagctgcaaaaatctaaagcacagaacacaagtgagggcacttgcatctcagtttaccctccgcttgaatagatacggggaataaactaaacacgagggtgacacaccttctcccaccttgtcagctgaagcaggaggccttccctgcccaccccatggtcattatctccagcatctccaaggccacagctttttttctttttcctagtggaaaagagctgggaaacgtggctttggccagcaagggagaaggggccattatgtgtaccagcaaagacccgattgttactgaaaccaaactgggctgcttttctcaattatctccaccacttttctggtctccacttttcagatgccaagttttaacccagaacaaaagctgctgtcggactgatttataatccagatctgctgacgcagcctgaagtgttcctcccctccaggactgcaccctggcttaaagttacctccaaacctcaggacgtcaagccccttcacctctgccttttgcccctagccaggaggtagcatctgtctccaggtgcccgtggggtgtcctccatgaggaccacctcttctaaccacctgcccagctcagaggaccagctggcaggaaagacgctgcaccgcccatgaggccagagctacaagttgcttctaggagtggctgtgggcggaggctggtggttctgaaggtggcggtggttctgcagcgtggctccccacagcccctttcatctgaacagtagggctcatgccacttgttaatcagccttccagtggcacgaggagtcattttctggggataggcgctttgcccaaagcgtgagaagcaggagcaggccctttctgttgattgaagggtcttcctggctggtgaagccctttccagacttgagggcagggaccagtggtcctcggggcctagaaagaggcagaattgggggccaaacggcagacccctctggtccgccccaaaagacgcctcggttcccccagcgtgcctcccctggatactcgcctcgacgtggctcgcccgcggtcgttcctgcaactgcacggtcgggagtccctctccccagcccagcccgcccggagtcttcgggggacacttcagaaagatcgggtgagtgtgattcccccgtggccatacccggagtccctcccccgccccacctccctccaggcgctgtggcgcagcccgcgactccgagccccggggctgctggacacccggaggggttgaggtccgggcacccagagaggcggaggtccgagcccccgggcggagagcgggcgggtccacaggtcgctgcgggtcgcagccccctcctgagcgagccttcgcggcccgcccccggcctccgctcgacccccccagcctgacgtcaaggggaagggggcggagagccgcggccgcgctggagaaagagccggcgcccgccgtggtggcgcggggagcccgagcctaggggcgcggagccgggcggggacggaggggcggtggcagagaggccgcggagggctggcgggcgagcgcgggcaggcggcgacgcgggggcaggggtggacggcggtcagagccgaacgcgagggcggcgcccggggactggagctgcgcgcaataggtgagcgaggccgggcttgcgtgaggctggagccgcggggccccggagccgccgctttgtccctttgcttgggcaggggctgccggacgcgggagggacagggg

SEQ ID NO: 24060 - DNA, 2300 bp, Homo sapien
cattccagggagtgggggggaataggtgataaaaagcaagtaaattgcaaaggggccaagcgctgtggctcactcctctaatcccagcgctttgggaggccaaggtgggtggatcacttgaggtcaggagttcgagaccagcctggccaacatggtgaaaccctgtctctactaaaaatacaaaaattagctggacgtggtggtggccgcctgtaatcccagctactcgggagactgaggcaggagaattgcttgagcccaggaggtggaggttgcagagagcagagattgtgccactgcactccagcctgggggacggagcaagattctgtttagatagatagataggcagacagatgggaacttgggcaggtgggcctcactgagaaggtgggtgtggagcaacggctggaaggaagagagaggcaggtgctgtctggtcagaaggcccaggcagggcaccagctccaggaagcagcaggcaggtcgttgggtctttgcagacacttaagatcttggcttcctgtcctaggtgaggaggaagccaggatttgcacccaggagcaacatgctgtgtggccagttgcttctctggaaatcagcctccaccacctcttccctgcctctgagaaggctggtggaggcctgtcttcctgagggatcattgcttctcgccctaggtgtctgccctaagcggccgagtgtttgtagagccagctgccagcagtgatgtcggtgtagggagagttctggtctggcccatccccgctggttcctgcaaggcccaaacaaccccttatcctggagaggggtttgtgtgtgggggagaggctggctggagcatccagagatggaaacaaaagggaataaacaatcggaaggcacaacggcacaggcagatcgcaggggcagcagcttgctgcactgagcacagccaagctgttttcatgagtgagaggaaaaacacaagagcaagcatcgcaagagtgctgtcctgtgcgcccctgcccagccccacccaggcctcccgtagcagggagggtcccggctgggcgaggcctgcccaaaggccacgctgggggtgtgggctgcagagcctgaccctatgcttgcacagctgtgagccctgagtgggcagaactgttctggaaactatcttgacttgtgaagcctgaggaaggtggcacagccatggtttgggtgaagccccagatggtgcctcccttcgcccagaaccttcctcccccctcccaaaaggatcagaaactaggctgagaagccctggccgcctcccagaagctgaggccctgggcctgactcctagcccccagcccagctgctcttgtgggctgtctcagcccataaccggctgatgtgctgagcaggtggtaggtgagtcaccggaggaagccaggtgtgccagccaggctaagctcaagaggggggctgggctgcagggctcaagcccctagcccatggccaccctgcttctgtgccatctaaagagatggtgcttttgtgaactaccctggatctgctcccacttactccccgccctgcccccagggctgctgtggcctcacagaggccaagggctgggagcctgcctgcctctgccccagccaagagttagcttcagggcagctgggcagtccttgctggggctgggcccaggctacccgaatcaagtgcatgcactgggccagaaggagcggctaactgtagacacctggacttacgcaggtcacattccctccagaggggttcagagaggttgggcagtttattcaaaaactaaatgggggctggggcggctaatagcttaggtgccatagtcagccaaaagcagtgtgtgggccttgtgttgaatctcccttcaaacagaccaactgttggaggacattttagagacagagaaaactgaacacaggtgttggatgatgataaggaagtctcgttgattctgttaggaaagaaatggtattatgattagattggggggaaatccttatcttttctgtagaagctctttatgggtaaaacgatacgatgtatttgctttaaaatcccctggaaggaaaagagcgggaaggggagtggaaggcaggggctgaagacacaggccaggcggaatgaagatgatggtggtcttgctcatggtgatggactgttggggacttagtccatggtctctcttcatggtgttccaaacctccacagagaagagttaaaccaaaagagagggatgcaagggagggtgggcccacagatgcagagcggcagtgcagggggtggggatg

SEQ ID NO: 24061 - DNA, 2300 bp, Homo sapien
agttagaggcaggggggagcacaagatggggtgcctgggagggctctgggatgcaggctgacggacaggcccagcgcagagtggaggccagagggggcgcgacacaggtggccagagagagagttagagccagttcaaggcttggcattttgcttcattttgttttttcttggccagcagctgtgcatagagtgaggagagcttggtggggctgccttcctggtggaggtcagagtggcagaggggaagtgtcatggaggaagggctgggtcgttgggcccaggagttggaggctacagcgagctataatcacaccaccgcactgcagcctgggcaacagagccagacaccttctcttaaaaaaaaaaaaaaaaaaaaaaaagagtggggaatgggggcgcgggaggcagtgtctctggcctgtaatctcagcactttgagaggctgaggtgggaaaatcatttgagccctggagttctttacaaaaagtaaaataattagctggacatggtggcatgtgcctctagttccagctacttggggtggggatgctgatgtgggaagatggcttaagctctggaggtcaaggctgcagtgagccatgacggctccactgcactccagcctgggcgacagagcaagacccgcttttttttttcttttttttttaaagtacatggagtggcgctgcctccccttgagagatcctggccaggcaggtctcccaggctccccaggggccagggtcttgcagcctgtcagggccaagccaggtccagcccacttgctgcatgcccaccatgcacccatgtgtttattagacactagctgagcaacctgagtgccaggctctgtgccaggtactggcactggggagacagcaccagatgacctcagaagagaggggtgagcaagtcggccacggccatagtgactaactctgtccaggcacagtgcggcagctgctagagaagatgccctgagccaggtcttggaggctgagtcagtgcttgtactgcaaaaaggagaaagggagtgagagattcatggcgactggagggataggaaggactggcaggggcctgcccatggccttcctggagctccttccccatctccactgcaagcccagggctgctcacagcctcctcccaggtcttcaggctgccaggcactcccctttccagtctggcctgtcagaccttcctgaaacactccttcaaagggccacctcgtccccacagccacccactcagcccacatgcccctttcccaatgtctcctccacggggcttgccagtgctgcatgttctcatcgggcctcctcacaggccctgcctgccctctgcacacagcttttgctgtgtctgggcctcttcttcctttccacctgtcacccccgacccgcagtagtggcagctcccatgtacaacagcacagctgtgtcctggctgctgtcctcagtgctcgcccctcctagcagcccaaggccctcagacttactgtcatccatattttacagataggggaactttccagggtcacccaacagggaagtggtacagccgggattattttatttttgaggcagggtctcactttcccaggctggagtgcagtggtgtgatcacgactcactgcagccccaacctccctggctcaggtgatcctcccacctcagcctcccgagtagctgggactatgggcgtgcaccaccacacctggctaatttttgtatttttttagcggcagggtttcgccatgttgacaagggtggtcacaaactcctgggctcaagtgatcctcttgccttagcctcccaaagtgctgagattacaggcataagccactgtaccccgcctagagctgagattaaagtcctgcccttgaccactgcagggcaccgccttagcctgtccagctctctccttgcctctggacatcctggaccacacccgccacttcatggtgaagtgccctgctgggtccttgggctttagtcccggttcacagacaggaggacaagggccgtccctccctttcctcatcagtgcacaagtgctggagaaatcctatcaatcgattcactgtaaaagggggcacaggggtttagaattgactggtgtaggagcagaggacctggggctggatctgggcacagcaatttgcagggcactgctgggcaggagtccctgatggccaagctgctgggctctgtatctcccacaagctgcagcggaggccccatggagcaggagcagaagcacacgttggagaactgaacttgaaggacaggactt

SEQ ID NO: 24062 - DNA, 2300 bp, Homo sapien
aacgcggcaggaaaaaagaattaggagccctttacaacccaatcagggatgacggccagaacacaccctgaagagcaaagaaggtgcggaaacggcgggtacgtgcacacgcagacagaggctggcggccagccaggtggctctggctcaggggaagaagcgcattttcaacatcaaatttgaaaggagtactttcaaaaaggtactccttggtaccttacgaattttgttttatttgaatgcttttatctatttagaaaaataaaatcaataacactgatcccgataaggcaccctccttcctagtaaagctcttggcacaaagcatcaccctgctgacgtggctgcctgaaaggcaggcgcaagatgctctgtttcattcatttcctggcatttaaagggcaattgccatgggccctggagctacccacagattccacaaaagacactgattcatgaaatcacagtttaacatggctagcagatgaaggagtgaagtcataaacttaggatatggagaaggtagcttcaaatctgtcttgaaaggatgaattattaagaccaaaaagctgaggcatggtggctcacacccgtgatcccagcagtttgggaggctgaagtgggaagatcacttcagcccagggatttgagatcggcctgcacaacatagggagaccttgtctctactaaaaatttaaaaattagatgggtgtgttggcatctgtctgtagtcctagctactaaggaggttgaggcaggaggattacttgatcccaagaggtcgaggctgcagtgagccatgatggtaccactgcactccagcctgggtgacagagtgagaccctctctcaaaaaacaaaacaaaaggcagaaaaattgacgttgggtccccactggctgtttggggatggaaaaaatcaagttagatccttctctcataccaaggacaaacagatttgagttgggattaagagctgatggacacaaagtaaagccagtcctgaaagagaagaaagcacactatctttatggtcttggtggggaaacccttcgtcttccacatggaaagattacattacacaaaaatcccaatcaattctctgcattatccataaaactgtcctgtaaatctaaatctattctaaaataaaaaaaaaaaggactgaaaaagtaaaaaaaaaaagaaaaaaaattccagttcactgaaaggtaccatacataaagatttaaaaaggacaatctatataacctttggagaaaacatactgtaacataataagcaacatgaagatcaacagagttgataagaagataaattaactgataggaaagtgggtaagaaataccaaaaggtaatttacagtaagagaaacacaaaaggccaataaatacatgaaaagatactcagtttcactggcaatcagggaaatgaaaattagaaccacaggatgatgttttccactcaccagattgactaaaactcaaaaacaaaactgggaatatgtagtattaatgagaatgcagaaaaatatgcactttcatacctatttggtggtgttactaataggtccagctttacatactttagggttgcaatttcacatcaaggaatttatctcatagaaatatctgcacagacactaaacagtcactggaagaatgtccagtattagtaagggaggacaccacccctcatgttatcttatgcccaatttctgcctcaaagaaaaagtaggagttaaagaaaagaaagaaatgaaatcagtagtcagacagcccagtgctgcgttccaggcctggtagttacagactgacccctgacttaaccggtttatgttatctatagattccagacattacacgggacagcactgtgaaaaaccctgtcctgttctgttccattctgattaccagtgcatgcagcccccagtcacgtacccacggcttgctcaatcgatcacgaccctctcacgcgggctctcttagagttgtaagcccttaaaagcgacaggaattgctgactcaagcagctcggtttttggagacgtgagcccgtcaatgctcccagctgaataaagccctttccttccacaacttggtgtctgaggggttctggactgtggtcgccctgctacattaggagactacagtggcacacacactagggaaatactatgcagctgtgaaaagagtgaggtttattgtgtgtatgtgtgagaaaaacaaccacaaacaccatgccctggatggagcaaatgagaaactggctggacgaggtggatgagggggcctagggacca

SEQ ID NO: 24063 - DNA, 2300 bp, Homo sapien
tgaactcagaggccaatcaatcatttctctggcagaaactgcaaagcccacatagcagaagggagatgttgcaactgtggggtctctcccttggagcagcagttagaaatgtgttgatctgagccaacagggccttgtacaatcaattctcccactaagaaactggcggggtgccccctccagcagaatgccagagccagcgtctcctcagagtccctgaagcgccagcctcctcaccacatggcccttgtcggggttctgccaacttgcaaggtcctccagacattgtttacatgggtattgtctgcgttcgggctgctgtgcatgttcttgaaccatgcgtcttgctggggtcagtccctgaaagtctccatgtgaccgggcacgtggatagaatggagcatgccagcagtcctggggtgcacgtgtatttgtatgtacaaacgaaggtctatttcagggtggtaaacttcacaaccacaggaacaaagctgctttctcctctgaacttaaatgacttagagaaaaaacatgcaatttgtaaactgcctggacattctcagagagacagcagcttggctcagaggataatctttgttttgtagcattctgttcctggcagattaaaaaatgatgtcctttttaaaggagaaggaggagaagcagaaggaggaggttgggctgactgaaaaactttttatctagggtggcaacgttaagtactttctgaaatgttctttgcatgcatttgggccattaaaaagaagaacaaatgtgacttacgttttcatttcctggaatccatgttaatgatctttgggacgtggtctagagagagcaagcaaagatggtggtcacaaaatgcgcaggacgtaggagaatcctaccccaaacccaggctctctggggatgaccaggagctcaggaacggtgacaaagtccagccaaccccctataaaatgacttctgaagcaccttctaccagaggccctacaaccatatgaaacatttcaacaactcattttgcaaagatctggaatcttgtaggtcaaggtgatctaccgggtcagtggtccccaaggcagggctcatctccacaccagcgccgattttgagagctcctgttaggaggaagaggcccgagggggtggtgtgaatgggcacacggtcacagccacagccgcgtggctggtctgagcacgcccccatccctggaatctgggacacttgcagctcacatggtttctgaagaatcctctatggaactcttgtttggtatttccttcccagaatgtcttcatcccgggcccctttctgttattttccggtcttctcaggtgtcccctttgtatctgaaaaacataaggcagagcagaaacgccctgtgtaaccagatcgcgagacgctggcctcgtgggggtaatcgtgcccgccccttgcagctggaggaacccgaggctaagacacccactcctggcctcactcctcacctttccacacccttggcaaatattccactttcccctgtggtcaaatggaaagggcagactgcactgccccaccatgtttttttgtttgtttgagacggagtgttgccctgttgcccaggctggagtgcagtggcatgatcttggctcactgcaacttccacctcccgggttcaagcaattctcctgcctcagcttcccgagtagctgggattacaggtacatgccaccatgcctggctaatttttgtatttttagtagagacagcgtttcaccatgttggccaggctggtcttgaactcctgacctcgtgatctacccgcctttgcctcccaaagtgctgggattacaggcgtgagccactgcctccagccacccgccatgtgttttaaacaccatgaggtgtgttcacgcaacattcaagaagagcaggtgattctgatgctagcctgggttcttttccttctgacagatcatgcactgagggcttgaaaagcacatttgtctctagcgttacagatatgcttcccaacagccagtgaagctgggtagtgacagcctcccgcggtgtcaccgagacaagtgtgctggcacagaggcctcccctaacctcagccctctgcctcccagctccccgccagcccaacagctctccttcctgcgcagtggcctcctgaacatcctctacctgcacatgcctgactgcccggtatccctgctccagtggctgttccaggtgaggaccgcaggcctgccactaggtggcgggagcgctgcagtctggtggcccggcaggcccacaggctgaggggt

SEQ ID NO: 24064 - DNA, 2300 bp, Homo sapien
aagttatttccttagtgattaccctggagattataattcatatcttaaatttatttatttattatttatttatgtattttgagacagagtctcactctgttgctcaggttggagtgcagtggtgcaatcttggctcactgcaactgccgtctcctgggttcaagtgattctcctgccccagccccctgagtagctgggattacaggcgtgtgccaccatgcctggctaattttttttgtatttttagtagagatggggttttgtcatgttggccaggctggtctcgaactctgacctcagatgacccaccctcctcggcctcccaaagtgctgggattacagatgtgagccaccgcacccagcctcattattataaaattttaatgttttgattatttattgaccatgtgtcatagtcatgttgatttgaatttctttcactattgagtttgaatcttgttgtttgttttttgtaaactgcgatttcctttgatcattagactctttattagcctttcatctgtgttgcagtttgagcctgggtccgatccaatgggagatgtctgtgtgtgtgccatggtccatcttgactggagacaggcagttcctcctactggaggacgcttgttgggccagccccagggcctcttaaatcactcattcattcagcgaaaatgcacaaatacctactgtgggccaggtctgtgctggtgcttgggaaatggcaggaaccagacatccctgttccataccttgtgaacaaacagacttacagggtggcaccaagtaagtaagatgggtggggcgtcatctcagaacatagcttttctgctgagctgtgctggttttgttttggttttggttttttttttttttgaaatggagtctcactctgttgccaggctggcatgcagtggcaccatcttgggtcactgcaacctctacctcccaggttcaagcaattctcctgcctcagcctcccgagtagctgagactaaggcacacgccgccacgcccggctaattttttttatttttattttactagagacgggtttcaccatgttgcccaggctgggcttgacctcctgacctcaggtgatccgtccaccttggcgcatgtctgtaatcccagctacttgggaggctgaggcaggagaatcgcttgaacccaggaggcagaggttgcagtgagccaagatcacgccgctgcactccagcctgggcgagagagtgagactccgtctaaaaaaagaaaattgatatcctcacatttgcccatcatgtccttgaaatgagaagtcagattgttctctccatctcagcaacttgaccttggtgggatcagaaggccagtcctcagggcggaccctcttgggcacagtgggcccaggccctcctctgtgggaatcacggggtttagaacctttagctttcttctggaggttcacctgccctcacaggcgcttccttccaggacagatgtcccacggcttgcagatggctgggccccaggagacggtgctagcccttcctctgagagaaggtaggcgtctctcacctgcacaggtaaatccccactgaggtttgggggcgagaggaagtggagagcccatggctgaaggatttcccttgcatccttcccacagcaaccccaagttgttctctcacccatttgctgctctccttacccagtgtggcttgacgtctgggacagtggcaggtgggcagagggaccacagtattctgtcctgtctgcaggggtgcaggctgccgccaccgtgcccatcctcctgtacaacctggaggatggcttgtcagaccatcccctggaccaggggccccgctgccctgcccggcggccctgcagccctgcctcggctccagctcccacatcgccaaagaagcccaagatacaggcacctggggaaacgtttcccactgactggagccccccgcccgtggaattcctcaacccgagggtgctgcaggccagtcgggaggccccggcccagaggtgggtgggtgtggtgggcccccagggcctgaggagactggctggtgagctgcccgaggagttggagcaggaacacctggacttggacccgaagaggggcctggccttgccagagaagctgttctggaacacgtcaggcctgagccagcaggctgcggccccagaggtgagcctgtgtccacccttggcctcttctccttggctacccatctttagccacccttttacagtcaccccaggccaccctctcctgagccacgccccagctgctcttcctcggacac

SEQ ID NO: 24065 - DNA, 2300 bp, Homo sapien
cccatgcccagatttgctgacactcccaacttcactgtcactccaagtgcaccagcagcctgccctgtggctgctgtggaaattgcctaagacataaaacaatatacagccacacagtggagtgaaatgcagagaaaaaccacacagaaatgatcactgggagatggcatacttgagagtgctgagaaataatggcaaatacatcaagagtaataaaagatgttggtctataagatcaagacaaaaatcactgaaaaaataatgaaacttattcaggataaatgccatgcattatcctaaatgctggtgtaaccattcaggataaactacaactatacatattatataactatacatattttataattattatattatataacagatagtgtaaccactcaggataaactacaactatacatattatagttaaaacgctgaaccagacaaagagaaaatctcaattgtatcaagaaaaaatgggctcattataccagaaaaacaataatagaataattggctaactgttcacaagactgatagaggctagaagacagcgggattacatatttaaatgctgggttcgggggactcagcaaagggttcaatatccagttaaaacatgtttcaaaaataaaggtaaagtaaaaacatttctttactaaaaaatgaagagaaatgattacttgcagagatatgttctataaaacattcaagaggaaattcttcaaaatcacaggaaatcacagcagatcgtagcttgaacgcacagcgagaaaagaagacttcaaaaataataaagaaacaagaaagaagcaagaaacagcctaacaaaagtgttcacttctatttatatgagattgtagcacagggaaaaccaaattattataatgaatatctgaataccagttaccttgattgggatgggggagcagttgatgcctgggaaggtgcacaagggatgaatctggagaatttgaaatattctagagattcatctggatggcgaacatacgtaaaacttagttgcatatttaacatttccatcctttgtgagtgttttatatcaattaaaaaacgtaagaagccaatcctgcatgcttaatccaatatgtattaaaaaataagaatcatcatatgtttacggaatcttaaccttgctaaggagaagtgagaaatgcacctgggaaattctaagaaacaagaaatctaagagagaagacaaagagaaaagggaatttatcctactcatgcagcacagattttatctctattggtttctctctaaacagagacaatctttaagtcattttgccctcaagagaggctcccagcatccccttggctctttccaccccactgcacccatcaggggatttgcatattgtcccctagggaggaccttccattgtgagtctgagataaaagctcagctctaaccttgccttgactgatcaggactcctcagtgcaccttctcgcaatgaggctccctgctcagctcctggggctgctaatgctctgggtccctggtaaggacagcagggagatgagggaggagaatggggtgggagggtgagctctgggggcccaatgcctcccatgtgtgttcagtccacgtgttagatgtgcaggtcttgttctgcagcatgaggcatatgatgtactgatctctgagagggaggaagattttagaaggaaggatatgtgccctgaagaaacgcaagtcttagaaagaggatgatggtatgggagaccactttgtgccttgcatctgttgagttctttttgaaattggatattcttgaaattgcaaagaaattatacaggctgaaataataaatggaaaattatgagcataacgcataatatttgtacataactttgcccttttctgtcatcattccaggatctagtggggacattctgttgacccagactccactgtccctgtccatcacccccggagagccggcctccatctcctgcaggtctagtcggagcctcctgcatagtaatggaaacacctatttacattgatagctgcagaagctaggccagcctccacagtgtctaatctacacggtttccaaccggttttctggggtcccagacaggttcagtggcagtgggtcaggcattgatttcacactgaaaatcagcccggtggaggctgaggatgttggggtttatattactgcatgcaagctacacactggccccccacagtgctacatcctggaacagaaacctctctgctgggattgcccagctgcccacatgtgctgcttgtctggggag

SEQ ID NO: 24066 - DNA, 2300 bp, Homo sapien
aaattagccaggactggtggcgggcacctgtaatcccagctactagggaagctgagacaagagaatcacttgaacacaggaggcagaggttgtagtgagccaagaacatgccacatccctccagcccaggcaacagagcgactccaaaaaaaaaaaaaaaaaaaaaaagaaattatccacagagctcaggtcctgttttgagtccaaggctccacttaaagacaaacactattctcttgttttgttctgaatccaagtctggccactattccttaccacatggtgccttccctgaatggttccttgctcttccaacaaaggcagtttgtattgtacagccttctatgcccaaaaatgttgaggcagctgagccccagactcttggtcctcacttggagattcaatctgccttgttcagttaaagactcattagacttaggtcaccactgttgtggcccgccagtttgactagaaaacagagttttgacttctctgccctgctatcttacacaagcaccaactgtgccactgtcaaaaggctgttcgagccaaagtgcacacactcagacactccacatgctaacataacagtaactgctgccgctgaatgccaactattaagtgctctacctacaatgtctgatttaattctttttttttttttttttttttgagatggagtctcgctctgtcgcccaggctggagtgcagtggcgcaatcttggctcactgcaagctctgcctcccgggttcatgccattctcctgcctcagcctccccagcagctgggactacaggcgcatgccgccacgcccggctaatttttgtatttttagtagagacggtgtttcactgagttagccaggatggtctcgatctcctgaccttgtgatccgcccacctcggcctcccaaattgttggtattacaggagtgagccacggcgcccggcctgatttaattcttgacgcttgtggaaggtaggtactgttagtcccattttacagatgaaacagttaaggcttaaagcggttaagggatttgcccaaggttacacagtcttaaagctaggaggggagggagctgggatgtgaatccaagtccaggtgacattgaagtccttggttcagaagcctgtaatgcaagcaagaaaatctagcttcagccccatcttcctaccaaggacattttaacccagaatgttgtggtgagaagtggggaccttccataggaaatcctccaaaggccctaaagattgtagtgagaagtagggacctcccacaggagatcctccagaggccctgcaaacagccatgcgtggggaaactacaggcgctctctggctattgcctcagggacgaggctggttaccagctctccaagagaactccaggccccattgactgttcccttcccacatgacacacacatgcaggttcattccaaccttacagcaatcccctcaggtaaagcgccctcactttacagaagaggacactgagactcaaagggatgacgtcaggtgcccaaggtactagtcagaaagtggccctggggcttctgcaacaaccactatgtcacacagtccgagctcaatccaactctgcaagagtccataagcaaaggggcggcgacgtgaggtggaaacagtagcctgaaacgtgggtgtgcacgtcggatcccatcccaccgtccactcgcctggaaacccccagtttccccatatgcccagcttcgtcccctgcaattagtgagggctcacatgggtccgccccatccgtgtggtcggaaacggccgggaacctggttctagttctgccctccgcgggagacctgcgccagggacacccttctggcctaacccagccaggcctggtctacctggcggcggcggcggcggcagccggtcctcctgcgctgagttagggctcgcggggcgggaggtcaagggcagcgggcgcctgagcactggcaccagtcaccgcatccagccggggaactacagcagcggcgaagtcactgccgctcggtgcgcactccagcgagaagcgggcgcgtcctgtgacgtcacaggcaaccacccctagcagggcaccaatcccggagggcgggcccagtgcggggcgggcggcgccgggggctcttcaggctcagggcataggcaggcggcggccgcgttttctggagacggtcgctctcggagggaccctgcaattgcccgagaccgagagtgggcgctgcctgaaagtttgtccctgggcgcttcgctggcctcatccggtctcggccttgttctgggcc

SEQ ID NO: 24067 - DNA, 2300 bp, Homo sapien
gagggattccttaatcttcactatttctaggagcaaagggctaaggtgcaactcaatactgtcaatagttaggattgaaatggctaggtcatatggtaggagtatgtttaactctcttcatacactgccaaatgattttcaattgtagtgatactattttataatcccataagcagtgtacaagaatcccaggtcctccacattctttcgaatacttggtataatcagtcttctttgtccattctagtaggtgtgagacggtgtcacactgtgcttgtaatttgcatatccttaattattaatgatgttgagcatcttttcatgtctttcaattttctatctgtatatcttctttggtgaagtgtctgtttaaatattttgtccatttaaaaaattgaattgtttgattttatctattgattttaagtgctctttctatattctggatacaagtcttttatcaaatatagcctctgaagatcttttctttcaggctgtaacttagcttttcagaaagtctttgggagctatggcttaatgaaacacttacgccaggttctcctcagcacatccccctgatcacagccacccccataggctccatttctttttttttttttttttttttttgagacagagtctcgctctgttccccagtggtgtgatctgggctcactgcaagctctgcctcccgggttcaggccattctcctgcctcagcctcccgaatagctgggactacaggcgcccgccaacacgcccggctaattttttgtatatttagtggagacggcgtttcataatgttggccgggatggtctcgatctcctgatctgattcgcccaccttggcctcccaaagtgctgggattacaggtgtgagccaccgcacccggccataggttccatttctatatcagtggtgactttctgcaagctaggctgaagtcccaagctccagacccacgtctccaactgcccaccgttcaatgccctttggatgtcccatgcaaattggagctcactatcatctccccagacccgctgctcctccagaagccctgtctccatgaacggccctgcacctaccgggctagagacccaggagccggccttgtacctgcttccttctcacttccacctcctgtcatccagagctgtcagttcttcttcctgaacatctctggacactcaccttctccgccaagcaccgcaccaccattgttctcacccgcaccacccacccagatacctttccttagacgggtggccagagaaaaacttctcaaatagaagtcgggccatggcacgccactgaggaccttccagcggtctcctgtgcacttaaacgaggtccagactcctttgtgggacaagtaaagctcttgatgatctggtccttgagtaatgtgggggcctcttgcccagagcccctcacactcttcaaagccggcagctgaagagctgagcagtagctgtctgtggagttcagccaccgctccccgcacgcctgccctctgcaggggatggagcaccgtttccccacttccccacctgcgcccagcagtgcaggtgaaggcctggctgcggagagtggctgggaaacgctgagctttggggtcaggaatgccagctccactactcaccgcctgtgtcaccctgggaaaacagctctggccccaggttctccataagtaaaacagggtcactcatccctcccctccttaacgacatatgtcagaatcagaagccacaaatcattctctcccacccagcacgctgccttggtctcctagaccactttccccaacaatgggaaaggcgccaggcccagaacaaggccgagaccggatgaggccagcgaagcgcccagggacaaactttcaggcagcgcccactctcggtctcgggcaattgcagggtccctccgagagcgaccgtctccagaaaacgcggccgccgcctgcctatgccctgagcctgaagagcccccggcgccgcccgccccgcactgggcccgccctccgggattggtgccctgctaggggtggttgcctgtgacgtcacaggacgcgcccgcttctcgctggagtgcgcaccgagcggcagtgacttcgccgctgctgtagttccccggctggatgcggtgactggtgccagtgctcaggcgcccgctgcccttgacctcccgccccgcgagccctaactcagcgcaggaggaccggctgccgccgccgccgccgccaggtagaccaggcctggctgggttaggccagaagggtgtccctggcgcaggtctccc

SEQ ID NO: 24068 - DNA, 2300 bp, Homo sapien
ccagcactttgggaggccgaggccagtggatcacaaggtcaggagtcgagaccagcctggtcaagatggtgaaaccctgtttctactaaaatagaaaaattagccgggtgcggtggtgggcacctgtcatcccagctaattgggaggctgaggcagaagaatcacttgaacctgggaggcagaggttgcagcgagccaagtttgagccactgaactctagcctgggcgacagagcaagactccgtctaaaaaaaaaaaaaaaaagaaagaaatgggaggcactgagtttctggctcagtttgctgatgccagaaatacagagatgactgatcagtaaaatccactaaaaagtgtgtgacaggtttctttttccttatatttttcttttttaaatacaaaagtaataccagcccactgaaaatttgaaaagtatatggcattaaaaagagaaaaataacatctgataatccaacaagataaaccctctaaaatttttctctttttaaatgaatatagttaagcttgaaatagaattttaaatttatcttgatgttttactcaacaacgtagaagcatcttttatgtcattattttaagtcacaagcacttttagtgatgatgattaaaagaaccatttgttttttccttactgttccctgtttttagatttttggctagtgtctaatttttccctgttataaataatgctgagatgaacagaatatgtagatttctaataatttgcaaatgaacagcatatgaaaaacatgagcaaaaattttgcagttataattactcaacacgttttaaataaattacttttattttgagcgttcattcttaaatatgttataggaagtaagtaagaagcattccttactccttagaattttgtttataaattagtgatgaattggaaagggtagcttgcccctggaattctctgataagcacaggtgatgaggaaaatggaaaaatccaagaattcctttgtctttccttaatagtcagctttaagtgcagtgcaggcgtgccctctagcggccaaataaaaaataaagaaatacgggaaaccttcagcattgtaacaatcgcacgtccccatctagtggctaacgtgtgtaaatgcagcttttctaatcacaatagcgaatgttacttgatttatatttgtctcatgaggtgaagaactgggaggaatcttagagatcacgtatttcaacttcctcacggagtggcatgcaggcagcagccttgggaaccccgattgcccctcctcacacctgcccatcacaggactcgggcgacagggtggtgaagtcaggctgtggccccagcggcgccacgaggccgaaaacaggcgctcagcctcatccccgtggctgcagagtgccaagcgtcaggtcctgcgctctgggcgcgggtcaggagcagctggcaagggcagcgcagcctgtggggcccttgggcgcggccggccgcagctccgggaagccacgtcagcccacgggcgctgcagctgcagccgccaccagcacatggagcaggggtccccgaggattgggaatccccgaccaggcctgcgcctccagccgcgcggaccccggggccagcctggccgcggcaagtcaggcagtctgcggcaggagcgccgggcatgggcttccgccgggggtgcaggaggcgcgcaccctccggccggatgggggcgcactcagggcccaggaggccatcccacgggagccccgccagcccccgccggagcccgagctgcagtgccgcctacaagtggtgcgctggctgcagctgtggcaaccccggatcccgtcctcccgcctcgcacccatcagcgcggaccccgggggcgacgcagtggcgaagtggggctgtgggcccagcggtggcaccaggcggagaagcaccactcaaccccatccctgggctgcagagggcccagcgcgggggactccgagcgtcgggagcctgtggaagagaagagcgcgcgggcgacagttaaacaggccctggggcagggcgcgcctcgcgctccagggagccccgccctcccgcggcacctccgcagcaaccgccgcctgcactgggcgcgcgagagctgctagggcggtttctctgcctcgggcctgttgggcagggccggctaaggtgcgcgtgctcgctggttctaacccttctgttgggcgtttctgctgagaggcgggaggcgctgagagtctgtgcggaggtccgtggacagactgctttgctcgttgttgctcttcggaggcggcgatccccgaagg

SEQ ID NO: 24069 - DNA, 2300 bp, Homo sapien
ctacctcttggatgaaatagctatttaatgaaacttctttagagaataacgtgatactcccaaaaagactattttagaaacaaaaatgatgttgaattctaattaactcctaaaatagtcattttcaatgaatattgcagtgatttctgaatgaaaaactgattaatatctaatgcttgtagcagttttactttgaagaagtatgtcaaagttgataattgatgatatttttattgaggctaatatattatcctttggtgccatgagtggatgaagaaacttttggaagtctaaactagtggatacaagaaacttaggaaaattattacaccacatgggggtgagagataatgaatattatctactaggtatcagcaagcagatatccaaggtgatcaatttaggacacttccactgaagagatgtgaagtgtacgttccactgaaatgtcttcgtaattgtgtgccttctcagttattgggcaagttaaagagcatgatgaatgtttgtactataatggtgtaaatccttttgatttgttgcatgaaagacatgtgggatcctgtagcacctgctttgacattgattctcaggtgtatgagttgctcctctgattttagatcactttgtcctcatcacccggcatatcgacattgatattgacagggctttattttagttttcgacatatgacaaatcatagcatctttgaaattgtaaggatatatttcatggagcctgtattcccttttttcagtgtatttctgtcatgttctggtccccagacacaaagtagaagccgtcaaggcctacactaatacaggctgggggacagagtttgatgctaacactgtatgaatgtatggataactttatcatatttacatatgagtgattatgtatcccttttgcttttcagtgtcttctccgaaacaaccagcattgaaggtaattaagctctcatttatattttgaactattaactgtatagtatatgaaatatactttatttattgactgttttgtttcaaattctattcaggctatctgtgacaaggaagattctgttccgaatatggccacggaaaaaaaggatgaacaaatatctgggacaggtaattttgcaaacacatttaatatgatgttcggtcagggtagaagagaacttctcttcaccaaataaaacagcggggggttcgtcaagccttcatgttctgcttcagtattcctgagattattcatttgtaataagttctcgggtgaccctgatgctgtggtccttggccatgatggaagtactaagattatagatgtctgtactttgaaattgggaaaaagaaccatctgacagcaattcaacacataacaggctcaggggacagcatcattttgctttaattctacagcatgtttccatcaagagggaaaagagaaagagatgaagtaatagatattagaggcgtcagattgtattgtgataaacagagggaaaagtgatcctaataccacaaaaacactgtagaatgagaactagcaagagcagtgatgtagcaattattttcctcaaggaatagggattgtgagtcaggaaggagggaaaagtagttatttatgtaatttgggatttctgctgaggaaacctcagtgaactcacttcaatacatttggaacatttgcataaaagaagatttgattttggctgctccaggaactactagaagcaggaaactatgctagaattgggataaaccacagtgactcattactcctctttaggagtaatttactattaggcatcagagatacatgttttgttgatttcagttataaaactgagataaacgaatatgaatacattggcttcaaagttcaaggagctaagtcttggataaaatagctattgaatgaaacttctttagagaatagcatgatactccaaagaagactttttagaaacaaaaaatatgttgaattctaattaactcctaaagtggtcctttcaatgaatatttgattgatttctgaatgtaaaacttattaatatctaatgcttgtagcagttttactttgtagaaatatgtcaacattggtaattgatgatatttttattgaggctaatatattatcctttggtgccatgagtggatgaagaaactttcagaaggctaaacgagtggatacaagaaacttaggcaaattattacaccacaggggtgtgagaaataatgaatattctctactaggtttcagcaaacataatccaagctgatcaatttaggacacttccactgaagagacgt

SEQ ID NO: 24070 - DNA, 2300 bp, Homo sapien
gtcctgagaacatgtgcccgaggtggtcggggtgcagcttggttttatacgttttagagaagcatgagacagcaatcaaatacatgtaagaaatacattggtttggttcagaaaggcaggccaactcaaagctggggcttccaggctgtaggtaaatttaaacattttctggttgacaattgcttgagtttatttgaagacctgggattaatggaaagaaatgttcaggttaagataaatgattgtggggaccaagttttactgtgcagaggaatctctcagcagacttcagagagagcagattgtaaaatgtttcttatcggacccaaaagggtgcctgggtctcagctgaatatcccctggatctgcatagaaaggaaggaaaacaaaggggaaagggggttctctatagaatgtggatttttcccacaagagactttgcagggcaatttcaaggcatggcaaggaaatatattttggattaaatattttcttccttgtctcgtaaggttatgccagagtcagattgaaaagcaagtcacaatatacagggtcaaataaaacccatctgatgagaatccatggtttgtagggcacgactccctggaccccttaggtaggaatttgggcaagataaaaaattagagcttagtcctcactgataagataaattctaagataagtatatttacagatttgccatacagcaagaaaaaaagaaaagaagaaatgttgaagaggtgcaccaaaaagttagggaaaagttaagaataacagaagagcaatataggatagaagctgatgtgacaaaaccaattaaaccggctctcaaatcagcagaggtggaattgaagacaggaggaaataattcaaatcaggtaaattaatgtttggtaaaacttcatatttctactcttattaatattacttataccatctctttcatttaacgtatattatttaggcctgaacaatccccaaattttatttcatcttaaaaatgaatcatggcatttatagctataattatttataataaaccttgaaatattttattttagttcaaaggccttttgaaaacaatgctattctacaatatatacttaatgatattgtaagtattttgttcctagtgacatagttcagcatatttcccctatttcatgttaattacatttcaaatgttatggaaaaggaataaaagttatcacaatagcaaataatgtcatgattttctaagaagagttttatagatctaattttcttgacttttggtgtcttgaaataaaagattatttttgtatgtatatatctacctcacagaagttactgatttggtggaagagcactaggaatagagtcagaaaagctgggaaaaatcctgcagcttgcttatatttttaaccttttgctatagaattataactaaatgagttcattgatttgtgcacgtaaaagtgcttagtataatgcctagctttatcatttatcaataaatgtcattcttaaaactgaccataacaatattagaaaagtagaatatctatacaatattttagaaaaagggaacttaaagaatttggaaaatgtcattcatctgtccaaatatctgccaagctaaggctctcactatagggagaggtatagtttagatgttagagtgtaaacccaattttttaatgtggtcatagttattaattctttatgccttgcaatttgttgtaattcagtaaaagcctttttttatcctgaaatttaaaaaaattatctagtggcttcttttttgctttcatggattcactgtcttcaaataaacttttgaactttggggaatttatgctgtatgaggtttgaggttttgacttaacttcttttttcccagttagatatccagttatggcaacctctcattgtataaatgtacgggttattatttaatttcagaagcaatcacaatatgttatcctattggatactagttacaagtttgctttgttttacttaggtttctgaaactgatgaaaaagaagacctgctgcatgaaaaccgcttgatgcaagatgaaattgccaggctcaggctggaaaaagacacaataaaaaaccaaaacctggaaaagaaatacttaaaagactttgaaattgtgaaaagaaagcatgaagaccttcaaaaggctctaaaacggaatggggaaacattagcaaaaacgatagcctgttatagtggacagcttgctgctctgacagatgaaaacacaacgctccgttccaaactggagaagcaaagagagagcaggcaaa

SEQ ID NO: 24071 - DNA, 2300 bp, Homo sapien
gggcacgactccctggaccccttaggtaggaatttgggcaagataaaaaattagagcttagtcctcactgataagataaattctaagataagtatatttacagatttgccatacagcaagaaaaaaagaaaagaagaaatgttgaagaggtgcaccaaaaagttagggaaaagttaagaataacagaagagcaatataggatagaagctgatgtgacaaaaccaattaaaccggctctcaaatcagcagaggtggaattgaagacaggaggaaataattcaaatcaggtaaattaatgtttggtaaaacttcatatttctactcttattaatattacttataccatctctttcatttaacgtatattatttaggcctgaacaatccccaaattttatttcatcttaaaaatgaatcatggcatttatagctataattatttataataaaccttgaaatattttattttagttcaaaggccttttgaaaacaatgctattctacaatatatacttaatgatattgtaagtattttgttcctagtgacatagttcagcatatttcccctatttcatgttaattacatttcaaatgttatggaaaaggaataaaagttatcacaatagcaaataatgtcatgattttctaagaagagttttatagatctaattttcttgacttttggtgtcttgaaataaaagattatttttgtatgtatatatctacctcacagaagttactgatttggtggaagagcactaggaatagagtcagaaaagctgggaaaaatcctgcagcttgcttatatttttaaccttttgctatagaattataactaaatgagttcattgatttgtgcacgtaaaagtgcttagtataatgcctagctttatcatttatcaataaatgtcattcttaaaactgaccataacaatattagaaaagtagaatatctatacaatattttagaaaaagggaacttaaagaatttggaaaatgtcattcatctgtccaaatatctgccaagctaaggctctcactatagggagaggtatagtttagatgttagagtgtaaacccaattttttaatgtggtcatagttattaattctttatgccttgcaatttgttgtaattcagtaaaagcctttttttatcctgaaatttaaaaaaattatctagtggcttcttttttgctttcatggattcactgtcttcaaataaacttttgaactttggggaatttatgctgtatgaggtttgaggttttgacttaacttcttttttcccagttagatatccagttatggcaacctctcattgtataaatgtacgggttattatttaatttcagaagcaatcacaatatgttatcctattggatactagttacaagtttgctttgttttacttaggtttctgaaactgatgaaaaagaagacctgctgcatgaaaaccgcttgatgcaagatgaaattgccaggctcaggctggaaaaagacacaataaaaaaccaaaacctggaaaagaaatacttaaaagactttgaaattgtgaaaagaaagcatgaagaccttcaaaaggctctaaaacggaatggggaaacattagcaaaaacgatagcctgttatagtggacagcttgctgctctgacagatgaaaacacaacgctccgttccaaactggagaagcaaagagagagcaggcaaagactggaaacagaaatgcaatcataccattgtagactgaatgctgctcgatgtgatcatgatcaaagtcactcatcaaaaagagaccaagagcttgctttccagggcacagtagataaatgtcgtcacttacaggaaaatttgaattctcatgttctgattctttctctgcaactttctaaagctgagagtaagtccagagtcctcaaaactgagctccattacacaggagaggctctgaaagaaaaggctttggtttttgaacacgtgcaaagtgagctaaagcaaaaacagagtcaaatgaaggacattgaaaaaatgtacaaaagtggatacaatacaatggaaaaatgcatagaaaaacaggaaagattttgtcaactaaaaaaacaaaatatgttgcttcaacagcaactggatgatgctcgcaacaaagctgacaatcaagaaaaagcaatacttaatattcaagccagatgtgatgctagagtacaaaaccttcaagctgagtgcagaaagcaccgtcttttactagaagaagacaataaaatgttggtcaatgaactgaatcattcgaaagaaaaagaatgcc

SEQ ID NO: 24072 - DNA, 2300 bp, Homo sapien
gggggagctctctcacccagggaagcagtgagtgaatgtgtgaccctggaaacccatgctttttccatggatctttgcaatccttgggtcgggagttctcatgaacccactttaccagggccttcagtctgacagagctacgtggaatcttggcacagcagccactcaggcacacatggagacctgggagccttaggtacctgggctttcctgcaaaagtagctgcaactgtggcaaagtgggaggtgagaccctcatacatatccctagggaagaggctgaattcagggagctgagcagcaacagcctgcaggccccacttccacagcacctcacaggataagagccactggcttggaattccagccagccaccagcaacactgttgagcctccctgagacagagctcctgagagaaggggtaggccaccatctttgctgtttgggcaacttagctgctccagccttcgggatttggagagtctcagcggaccagggacagagggatccattagcacagcacagtgctactctaccaaaatatggccggactactgctttaagaaggtccccaatcccattcctcctcactgggcaggacctcccaaccagggcctctagctacccactctggtattctcaggctgacagagatttgaattctccctgagatggagtgccctgagggaggcgtgggccgccatatttgatgttttggcaacttagccattccagcctttgggctttaaggagtcccagctgacttagggcggatatggccccccagcacagcacagctgctgtacaaaagcatagccagactgcttctttaagtaggtcccggattcattcctcctcactgtttgggacttcccaactggggcctccaaccacccccactggtgttctcctgctgacagtgatttcaattttttctgggctggagctccctgatggaggggcaggccaccatctttgctgtttttgcaacttagccacttcaaccttcagtctttggagtgtccaaggagaccagggggtgatgtggaccctcagcataccacagctgctctataaaaatgaggccagactgcgtttttaagcactttcccaatgccattcctcctcactgggcaaaacctccaaactggggtctccagccacctcctacaggtgtgtttgggccagcaacaagttcattcatacctccctagggcaaagcttccaaagggagcggtaggctgccatctttgctgtttcacaggcttcactgatgataactccaggtactggaaaatctgaggctactagagactggagcgggccctgggcatactgcagcagccctatggaaaagtggccagactgttacctgggttcccattcctatatcttctcactaggcaagtcttgcaggcctggacctctacctaaccccccctaccagaactgttgagccagtagcaactcagccactccctggagagagcctccaggggcaactgaaagcctctctgccactgcttctgcagtggaactgtccttgctaccctcagactgatgaaggagctaacacccttatctacaccttcaacaagctttaattgaccaaagcccatctctcatgggttctacacactccccactgctcatgacagggaacccctggattggcccccacagcacgaattctccatcctgattgctgattgcagtaaacagttgctgtattctccaggggtggtggaactctgaggagacaaacaaaagacccttggctacaaccactactaatgtcccttcctcttctgcctcaaagttaggaaagaaatataaacactgagattgccccagagctgcagtgggcagcctaggagtgccaagccatgacctacagccagcactcaagggggagagaagcacattttcagatcattgagagggaacatggctgcaactgtaaggaaacataggggagccacatgaccaagcaagagtctaccaactgaccagtaagcccaagtgccacctactggatcacatcccaaagcttcagcatcaaaaataccttactaatatactcccctctgaaaccagaaatgagaagtcagcttcaaataaagaccctgcacaaagcctcagcctggtgaaaacatccgaaaataagtctacggactgtactcaatctacactgcaattaaaggaaaacccataggtggaaatgagaagaaaccaatgcaagaactccagtaactcaaatggcctctgtgtcatatgtccttctaacaaccacaccagtt

SEQ ID NO: 24073 - DNA, 2300 bp, Homo sapien
cgactagaagcagctgcagtttgaggctcccactgagaagaactaaaagagtgtgcaaatcctgcagcagcaactgacatatccaggttctatgatcaggactgactaggtggttgccgtgacccatagagaacaaggaaagatgggctggtggattggcccacctgggagccacatggggcaaggggagccctcaccctcagccagccaagggaggcagtgagtgagcatgctacccagcctgggaaactgctttttccatggatctttgcaatccacagatcagaagatcccactcatgagaccacaccacgagggccttgggtgccaaccacagagccatgcagattctcaacagccactcagctggagtctgcctaaaactaccgagttcccaagttggggaggggtggtcatcatcactgtggctgcctgctgcctaaaccctctgagttccctgggggagggggagcaatcatcactgtggttgctggctgcctaagacaactgagcttcccaagagaggggcagtcatcatcactgcagctgcctgctgcctgaggaaactgagctccctaagaagggacagcagccatcactgtggctgctagctgcctaagacactgaactcctggggaggaagggcggcagccatttctacagatccaggctgctgtttttcctttgctgatgccaggaagactggacggcttggtcccaagaggtattccccacagcgcagcatactggctgtggcagatcatggccagactgcctctttaggctgaccctgacccatccctcctcactgggtggggcctccctgcaggaactccagcaactcaagccagggaattagggagagaactctgatctctctaggtctgagtccctagtgggaggggtggctggctgttgtctccacaaaccggaagacttgttctttccccctgctcactctgaggattccaggcagcccagatgagtgggattttccccggcacagcatacccccttcccaaagggacaatcaaagtgcttcattaagcaagtcctggatcctgtgcccctcaactgggtgaaacaccccagtgggtcaccagacaccttatacaggagcatttctactggcatcaggtgggtgcccctcaaggacagagatcccagaggaaggagtggggtcccatctttgctgttctccagcaccctctggtgacatcttcaggtgtgggagggacccagataaatagggcttgaagtgaatccccagcaaaccacagcagccctacagaagaggtacctgactgtcgaaagaaaaacagaaagcaacaacaacatcaaccaaaaagtccccacgaaaacctcatctaaaggtcagcagcctcaaagatcaaaatgagacaaactcatgaagatgagaaaggaatgaaaaacccctaacaactcaaaaggccagagtgacttgtttactccaaatgatcacaacacctctacagcaagggcacagtcctgggtggaggttgagatggatgaattgacagaagtaggcttcagaaggtgggtagtagcaaacttcactgagctaaaggagtacgctctaacccaacatattggaacgaatcccagaacttaaagattggttctctaaaataagacagacaaaaataaaaaagaataaaacggaaggaagaaaacctccaataagtatggggttatatatagaggccaattctacaaatcactggcatccctgaaagggaggtggagaaatcaatgcattgggttagaacatgctcatttagctctgtgaaatttgttattacccaccttctgaaccctacttctgtcagcaaagaagctaagaaccatgttaaaagattacagaagatgctaactagaataaccagtttagagaggaacataaatgaccagagccagctgtaaagcacataaggggaactttgtgatgcaaacacaagtatcaacagctgaattgatcaagcagaaaaaagaatatcagagcttgaagactgtcttgccaaaataaggcaggcagagaagattagagaaaaaagaatgaaaaggaatgaacaaaacctcaaagaactgtggaactatgtaaaagaccaaacctatgactgattggactacctgaaagagacaaggagaatggagccacgttgggaaaacacacttcaagatatcatccagaagaacttccccaacctagcaagacaggccaacattcaaattcaggaaatccagagaaccccagtaagatactccacaagaagatcaac

SEQ ID NO: 24074 - DNA, 2300 bp, Homo sapien
gtgacatcttcaggtgtgggagggacccagataaatagggcttgaagtgaatccccagcaaaccacagcagccctacagaagaggtacctgactgtcgaaagaaaaacagaaagcaacaacaacatcaaccaaaaagtccccacgaaaacctcatctaaaggtcagcagcctcaaagatcaaaatgagacaaactcatgaagatgagaaaggaatgaaaaacccctaacaactcaaaaggccagagtgacttgtttactccaaatgatcacaacacctctacagcaagggcacagtcctgggtggaggttgagatggatgaattgacagaagtaggcttcagaaggtgggtagtagcaaacttcactgagctaaaggagtacgctctaacccaacatattggaacgaatcccagaacttaaagattggttctctaaaataagacagacaaaaataaaaaagaataaaacggaaggaagaaaacctccaataagtatggggttatatatagaggccaattctacaaatcactggcatccctgaaagggaggtggagaaatcaatgcattgggttagaacatgctcatttagctctgtgaaatttgttattacccaccttctgaaccctacttctgtcagcaaagaagctaagaaccatgttaaaagattacagaagatgctaactagaataaccagtttagagaggaacataaatgaccagagccagctgtaaagcacataaggggaactttgtgatgcaaacacaagtatcaacagctgaattgatcaagcagaaaaaagaatatcagagcttgaagactgtcttgccaaaataaggcaggcagagaagattagagaaaaaagaatgaaaaggaatgaacaaaacctcaaagaactgtggaactatgtaaaagaccaaacctatgactgattggactacctgaaagagacaaggagaatggagccacgttgggaaaacacacttcaagatatcatccagaagaacttccccaacctagcaagacaggccaacattcaaattcaggaaatccagagaaccccagtaagatactccacaagaagatcaaccctcaagacacatagtcatcagattctccaagatcaaaatgaaggaaaaaatgttaaaggcagacagagacaaagggcaggtcacctacaacgggaagcccatctgactaagagtgggcctctcagcagaaaccccacaagccaggagacagttgggtccaatggtcaacattcttagagaaaagaatttctaacctagaatttcatatctggccaaactaaccttcataagtgaaggagaaatccttttcagacaagcaaatgctgagggaatttatcaccaccaggcctgccttgcaagacctcctgaaggaagtgctaaagatggaaaggaaaaactggtaccagccactgcaaaaatgtactgaagtacaaagaccaatgacactatgaagaaactgcatcaactagtgagcaaaataaccagcaagcatcatggtgacaggatcaaattcacacataaccatattaaccttaagtgtcaatgggctaaatgtaccaattaaaagacacagaccagcaaattggatataaagagtcaagattcaggtgtgctgtattcagggttcctatctcatgtgcaaagacacacataggctcaaagcgatggaggaaaatttaccaagcaaatggaaagcagaaaaaagcaggggttgcaatcttagtttctgacaaaacagactttgaatcaacaaagataaaaaaagacaaagaagaacatcacaatgataaaggaatcaattcaacaagaagagctaactatcctaaatatgtatgcacccaatacaggagaacccagattcacaaaacaagttcttagagacctacaaagagactcaggctaccacacaacaatagtgggagacattaacaccccattgtcaatattggatcatctaggcagaaaattgaccagaaaggacttgaacacagctctggatcaagtgaatctcatagatatctacagaactctccaacacgaaacaacagactatatattattcttagtggcatatgacactctaaaattgatcacaaaattagaattaaaacactcctcagcaaatgcaaaataactgaaatcataacaatctctcagaccacagtgcaatcaaattagaactcaagattaagaaactcactcaaaaccacacaactacatggatattgaacaacgtgctcctgagtgacttctgggtaaataataaaatt

SEQ ID NO: 24075 - DNA, 2300 bp, Homo sapien
cagaatctacaaggaacttaaacaaatttacaagaaaataacaaccccatcaaaacatgggcaaaggtcacgaacagacattctgaaaagaagacatttatgcgtccgacaaacatatgaaaaaaaaagctcaacactagtgtttattagagaaatgcaaatcaaaaccacaatgagataccatctcatgccagtcagaatggcaattattaaaaagtcaagaaacaacagatgctagagaggctgtggagaaacaggaacacttttacactgttggtgggaatgtaaactagttcaaccattgtggaagacagtgtggcaattcctggaggatctagaagcagaaataccatttgacccagcaatcccattactaggtttatatccaaagaaatataaatcattctgttttaaagatacatgcacacttatgtttattgcagcactattcacaatagcaaagacatggaatcagcccaaatgtccatcaatgatagactggataaagaaaatgtgatacatatacaccatggaatactatgcagccataaaaaggaatgagatcatgtcttttgcagggacatggatgaagctggaagccataaacttcagctaattaacacaggaacaggaaaccaaacaccacatgttctcataagtgggaaccgaacaatgagaacacatggacacagggaggggcagaacacacaccggagcctgttgggaaggtagggggaaggagagcatcacgataaatagctaatgcacgtggggcttaatacctaggtgataggttgataggtgcagcaaaccaccatggcacatgtttaactatgtaacaaacctgcacatcctgtacatgtatcctggaacttaaaataaaatagaaaagacaaagaaggatattacataatggcaaaggcttcaattcaacgagaagacctaactatcctaaatatatattcatccaatgcaggagcacccagattcataagtaaagttcttagagacctacaaagtatgtttcacagtaatagtgggagatttccacactccaatgacagtattagacagatgattgaggcaaaaaaatgaacaaagatattcaggacctgaactcaacattggatcaaatggatctgatagacctttacagaactctgcactcaaaaacaacagaatatgcattcctcacatcatcatatgccacatactctaaaatcaaccacataattggacataaagcaatcctcagcaaatgcaaaacaactgaaatcataccaaatacatactgagatcacagtgcagtaaaaatagaagactaagaaaattgctgaaaatcatgcaattacatggaaatcaatcaacatgctcctgaatgactttttaataaataatgaaattaaggcagaaatcaagaagctctttgaaaataatgagaacaaagttacaacatactagagcctctggacacagctaagacaatgttaggagggaaatttatagcactaaatcccacatcaaaaagttaggaagaactcaaattaataacctaacatcacaactgaaagaactagagaagcaagacaaaaccccaaagctagaggaagacaagaaataactgaaaatctgagctgaactgaaagaaaccgagacatgaaaaaaagaaattcaaaagatctatgaattccgggtaggtttcttgaaaatattaataagaaagtctgctagcagactaatacagaggatgattgaaagaaacacaattagaaatgacaaagggaatgttaccactgaccccacagaaatagaaacagccatcagaaactactgcaaacacttctatgcatacaaactagaaaacttcaaagagatggataaattcatggagaaatacaccctcccacaactgagccaggaagaaattgatttgctgtaaacagaccaataacaagctccgaaattgaatcagtaataaataacctaccaaccaaaaaaagcccagaacatgatggattcccagtcatattctactagaaatacaaagaagagctggtaccatttttacaggaactatttgaaaatattgaggaggaggaactcctccccaactcattctatgaggccaacatcatcttgataccaaaatctggcagacacacacacacacacacacacacacacacacacacacacacacacacacactcttcaggccaataccctcgatgaacatcaatgcaaaaatcctcaacaaaatactggcaaaccaaatccagcagcacatcaaaaagttaatc

SEQ ID NO: 24076 - DNA, 2300 bp, Homo sapien
cagaatctacaaggaacttaaacaaatttacaagaaaataacaaccccatcaaaacatgggcaaaggccacgaacagacattctgaaaagaagacatttatgcgtccgacaaacatatgaaaaaaaaagctcaacactagtgtttattagagaaatgcaaatcaaaaccacaatgagataccatctcatgccagtcagaatggcaattattaaaaagtcaagaaacaacagatgctagagaggctgtggagaaacaggaacacttttacactgttggtgggaatgtaaactagttcaaccattgtggaagacagtgtggcaattcctggaggatctagaagcagaaataccatttgacccagcaatcccattactaggtttatatccaaagaaatataaatcattctgttttaaagatacatgcacacttatgtttattgcagcactattcacaatagcaaagacatggaatcagcccaaatgtccatcaatgatagactggataaagaaaatgtgatacatatacaccatggaatactatgcagccataaaaaggaatgagatcatgtcttttgcagggacatggatgaagctggaagccataaacttcagctaattaacacaggaacaggaaaccaaacaccacatgttctcataagtgggaaccgaacaatgagaacacatggacacagggaggggcagaacacacaccggagcctgttgggaaggtagggggaaggagagcatcacgataaatagctaatgcacgtggggcttaatacctaggtgataggttgataggtgcagcaaaccaccatggcacatgtttaactatgtaacaaacctgcacatcctgtacatgtatcctggaacttaaaataaaatagaaaagacaaagaaggatattacataatggcaaaggcttcaattcaacgagaagacctaactatcctaaatatatattcatccaatgcaggagcacccagattcataagtaaagttcttagagacctacaaagtatgtttcacagtaatagtgggagatttccacactccaatgacagtattagacagatgattgaggcaaaaaaatgaacaaagatattcaggacctgaactcaacattggatcaaatggatctgatagacctttacagaactctgcactcaaaaacaacagaatatgcattcctcacatcatcatatgccacatactctaaaatcaaccacataattggacataaagcaatcctcagcaaatgcaaaacaactgaaatcataccaaatacatactgagatcacagtgcagtaaaaatagaagactaagaaaattgctgaaaatcatgcaattacatggaaatcaatcaacatgctcctgaatgactttttaataaataatgaaattaaggcagaaatcaagaagctctttgaaaataatgagaacaaagttacaacatactagagcctctggacacagctaagacaatgttaggagggaaatttatagcactaaatcccacatcaaaaagttaggaagaactcaaattaataacctaacatcacaactgaaagaactagagaagcaagacaaaaccccaaagctagaggaagacaagaaataactgaaaatctgagctgaactgaaagaaaccgagacatgaaaaaaagaaattcaaaagatctatgaattccgggtaggtttcttgaaaatattaataagaaagtctgctagcagactaatacagaggatgattgaaagaaacacaattagaaatgacaaagggaatgttaccactgaccccacagaaatagaaacagccatcagaaactactgcaaacacttctatgcatacaaactagaaaacttcaaagagatggataaattcatggagaaatacaccctcccacaactgagccaggaagaaattgatttgctgtaaacagaccaataacaagctccgaaattgaatcagtaataaataacctaccaaccaaaaaaagcccagaacatgatggattcccagtcatattctactagaaatacaaagaagagctggtaccatttttacaggaactatttgaaaatattgaggaggaggaactcctccccaactcattctatgaggccaacatcatcttgataccaaaatctggcagatacacacacacacacacacacacacacacacacacaatcttcaggccaataccctcgatgaacatcaatgcaaaaatcctcaacaaaatactggcaaaccaaatccagcagcacatcaaaaagttaatccatcatgatcaagt

SEQ ID NO: 24077 - DNA, 2300 bp, Homo sapien
cgactagaagcagctgcagtttgaggctcccactgagaagaactaaaagagtgtgcaaatcctgcaccagcaactgacatatccaggttctatgatcaggactgactaggtggttgccgtgacccatagagaacaaggaaagatgggctggtggattggcccacctgggagccacatggggcaaggggagccgtcaccctcagccagccaagggaggcagtgagtgagcatgctacccagcctgggaaactgctttttccatggatctttgcaatccacagatcagaagatcccactcatgagaccacaccacgagggccttgggtgccaaccacagagccatgcagattctcaacagccactcagctggagtctgcctaaaactaccgagttcccaagttggggaggggtggtcatcatcactgtggctgcctgctgcctaaaccctctgagttccctgggggagggggagcaatcatcactgtggttgctggctgcctaagacaactgagcttcccaagagaggggcagtcatcatcactgcagctgcctgctgcctgaggaaactgagctccctaagaagggacagcagccatcactgtggctgctagctgcctaagacactgaactcctggggaggaagggcggcagccatttctacagatccaggctgctgtttttcctttgctgatgccaggaagactggacggcttggtcccaagaggtattccccacagcgcagcatactggctgtggcagatcatggccagactgcctctttaggctgaccctgacccatccctcctcactgggtggggcctccctgcaggaactccagcaactcaagccagggaattagggagagaactctgatctctctaggtctgagtccctagtgggaggggtggctggctgttgtctccacaaaccggaagacttgttctttccccctgctcactctgaggattccaggcagcccagatgagtgggattttccccggcacagcatacccccttcccaaagggacaatcaaagtgcttcattaagcaagtcctggatcctgtgcccctcaactgggtgaaacaccccagtgggtcaccagacaccttatacaggagcatttctactggcatcaggtgggtgcccctcaaggacagagatcccagaggaaggagtggggtcccatctttgctgttctccagcaccctctggtgacatcttcaggtgtgggagggacccagataaatagggcttgaagtgaatccccagcaaaccacagcagccctacagaagaggtacctgactgtcgaaagaaaaacagaaagcaacaacaacatcaaccaaaaagtccccacgaaaacctcatctaaaggtcagcagcctcaaagatcaaaatgagacaaactcatgaagatgagaaaggaatgaaaaacccctaacaactcaaaaggccagagtgacttgtttactccaaatgatcacaacacctctacagcaagggcacagtcctgggtggaggttgagatggatgaattgacagaagtaggcttcagaaggtgggtagtagcaaacttcactgagctaaaggagtacgctctaacccaacatattggaacgaatcccagaacttaaagattggttctctaaaataagacagacaaaaataaaaaagaataaaacggaaggaagaaaacctccaataagtatggggttatatatagaggccaattctacaaatcactggcatccctgaaagggaggtggagaaatcaatgcattgggttagaacatgctcatttagctctgtgaaatttgttattacccaccttctgaaccctacttctgtcagcaaagaagctaagaaccatgttaaaagattacagaagatgctaactagaataaccagtttagagaggaacataaatgaccagagccagctgtaaagcacataaggggaactttgtgatgcaaacacaagtatcaacagctgaattgatcaagcagaaaaaagaatatcagagcttgaagactgtcttgccaaaataaggcaggcagagaagattagagaaaaaagaatgaaaaggaatgaacaaaacctcaaagaactgtggaactatgtaaaagaccaaacctatgactgattggactacctgaaagagacaaggagaatggagccacgttgggaaaacacacttcaagatatcatccagaagaacttccccaacctagcaagacaggccaacattcaaattcaggaaatccagagaaccccagtaagatactccacaagaagatcaac

SEQ ID NO: 24078 - DNA, 2300 bp, Homo sapien
gggcacgactccctggaccccttaggtaggaatttgggcaagataaaaaattagagcttagtcctcactgataagataaattctaagataagtatatttacagatttgccatacagcaagaaaaaaagaaaagaagaaatgttgaagagttgcaccaaaaagttagggaaaagttaagaataacagaagagcaatataggatagaagctgatgtgacaaaaccaattaaaccggctctcaaatcagcagaggtggaattgaagacaggaggaaataattcaaatcaggtaaattaatgtttggtaaaacttcatatttctactcttattaatattacttataccatctctttcatttaacatatattatttaggcctgaacaatccccaaattttatttcatcttaaaaatgaatcatggcatttatagctataattatttataataaatcttgaaatattttattttagttcaaaggccttttgaaaacaatgctattctacaatatatacttaatgatattgtaagtattttgttcctagtgacatagttcagcatatttcccctatttcatgttaattacatttcaaatgttatggaaaaggaataaaagttatcacaatagcaaataatgtcatgattttctaagaagagttttatagatctaattttcttgacttttggtgtcttgaaataaaagattatttttgtatgtatatatctacctcacagaagttactgatttggtggaagagcactaggaatagagtcagaaaagctgggaaaaatcctgcagcttgcttatatttttaaccttttgctatagaattataactaaatgagttcattgatttgtgcacgtaaaagtgcttagtataatgcctagctttatcatttatcaataaatgtcattcttaaaactgaccataacaatattagaaaagtagaatatctatacaatattttagaaaaagggaacttaaagaatttggaaaatgtcattcatctgtccaaatatctgccaagctaaggctctcactatagggagaggtatagtttagatgttagagtgtaaacccaattttttaatgtggtcatagttattaattctttatgccttgcaatttgttgtaattcagtaaaagcctttttttatcctgaaatttaaaaaaattatctagtggcttcttttttgctttcatggattcactgtcttcaaataaacttttgaactttggggaatttatgctgtatgaggtttgaggttttgacttaacttcttttttcccagttagatatccagttatggcaacctctcattgtataaatgtacgggttattatttaatttcagaagcaatcacaatatgttatcctattggatactagttacaagtttgctttgttttacttaggtttctgaaactgatgaaaaagaagacctgctgcatgaaaaccgcttgatgcaagatgaaattgccaggctcaggctggaaaaagacacaataaaaaaccaaaacctggaaaagaaatacttaaaagactttgaaattgtgaaaagaaagcatgaagaccttcaaaaggctctaaaacggaatggggaaacattagcaaaaacgatagcctgttatagtggacagcttgctgctctgacagatgaaaacacaacgctccgttccaaactggagaagcaaagagagagcaggcaaagactggaaacagaaatgcaatcataccgttgtagactgaatgctgctcgatgtgatcatgatcaaagtcactcatcaaaaagagaccaagagcttgctttccagggcacagtagataaatgtcgtcacttacaggaaaatttgaattctcatgttctgattctttctctgcaactttctaaagctgagagtaagtccagagtcctcaaaactgagctccattacacaggagaggctctgaaagaaaaggctttggtttttgaacacgtgcaaagtgagctaaagcaaaaacagagtcaaatgaaggacattgaaaaaatgtacaaaagtggatacaatacaatggaaaaatgcatagaaaaacaggaaagattttgtcaactaaaaaaacaaaatatgttgcttcaacagcaactggatgatgctcgcaacaaagctgacaatcaagaaaaagcaatacttaatattcaagccagatgtgatgctagagtacaaaaccttcaagctgagtgcagaaagcaccgtcttttactagaagaagacaataaaatgttggtcaatgaactgaatcattcgaaagaaaaagaatgcc

SEQ ID NO: 24079 - DNA, 2300 bp, Homo sapien
gtcctgagaacatgtgcccgaagtggtcggggtgcagcttggttttatacattttagagaagcatgagacagcaatcaaatacatgtaagaaatacattgatttggttcagaaaggcaggccaactcaaagctggggcttccaggctgtaggtaaatttaaacattttctggttgacaattgcttgagtttatttgaagacctgggattaatggaaagaaatgttcaggttaagataaatgattgtggggaccaagttttactgtgcagaggaatctctcagcagacttcagagagagcagattgtaaaatgtttcttatcggacccaaaagggtgcctggctctcagctgaatatcccctggatctgcatagaaaggaaggaaaacaaaggggaaagggggttctctatagaatgtggatttttcccacaagagactttgcagggcaatttcaaggcatggcaaggaaatatattttggattaaatattttcttccttgtctcgtaaggttatgccagagtcagattgaaaagcaagtcacaatatacagggtcaaataaaacccatctgatgagaatccatggtttgtagggcacgactccctggaccccttaggtaggaatttgggcaagataaaaaattagagcttagtcctcactgataagataaattctaagataagtatatttacagatttgccatacagcaagaaaaaaagaaaagaagaaatgttgaagagttgcaccaaaaagttagggaaaagttaagaataacagaagagcaatataggatagaagctgatgtgacaaaaccaattaaaccggctctcaaatcagcagaggtggaattgaagacaggaggaaataattcaaatcaggtaaattaatgtttggtaaaacttcatatttctactcttattaatattacttataccatctctttcatttaacatatattatttaggcctgaacaatccccaaattttatttcatcttaaaaatgaatcatggcatttatagctataattatttataataaatcttgaaatattttattttagttcaaaggccttttgaaaacaatgctattctacaatatatacttaatgatattgtaagtattttgttcctagtgacatagttcagcatatttcccctatttcatgttaattacatttcaaatgttatggaaaaggaataaaagttatcacaatagcaaataatgtcatgattttctaagaagagttttatagatctaattttcttgacttttggtgtcttgaaataaaagattatttttgtatgtatatatctacctcacagaagttactgatttggtggaagagcactaggaatagagtcagaaaagctgggaaaaatcctgcagcttgcttatatttttaaccttttgctatagaattataactaaatgagttcattgatttgtgcacgtaaaagtgcttagtataatgcctagctttatcatttatcaataaatgtcattcttaaaactgaccataacaatattagaaaagtagaatatctatacaatattttagaaaaagggaacttaaagaatttggaaaatgtcattcatctgtccaaatatctgccaagctaaggctctcactatagggagaggtatagtttagatgttagagtgtaaacccaattttttaatgtggtcatagttattaattctttatgccttgcaatttgttgtaattcagtaaaagcctttttttatcctgaaatttaaaaaaattatctagtggcttcttttttgctttcatggattcactgtcttcaaataaacttttgaactttggggaatttatgctgtatgaggtttgaggttttgacttaacttcttttttcccagttagatatccagttatggcaacctctcattgtataaatgtacgggttattatttaatttcagaagcaatcacaatatgttatcctattggatactagttacaagtttgctttgttttacttaggtttctgaaactgatgaaaaagaagacctgctgcatgaaaaccgcttgatgcaagatgaaattgccaggctcaggctggaaaaagacacaataaaaaaccaaaacctggaaaagaaatacttaaaagactttgaaattgtgaaaagaaagcatgaagaccttcaaaaggctctaaaacggaatggggaaacattagcaaaaacgatagcctgttatagtggacagcttgctgctctgacagatgaaaacacaacgctccgttccaaactggagaagcaaagagagagcaggcaaa

SEQ ID NO: 24080 - DNA, 2300 bp, Homo sapien
cctcttggatgaaatagctatttcatgaaacttctttcgagaataacatggtcctcccaaaaagtctattttagaaacaaaaatgatgttgaattctaactaactcctaaaattataattttcaatgaatattgcagtgatttctgaatgaaaaactgattaatatctaatgcttgtagcagttttactttgaagaaatatgtcatagttgataattgatgatatctttattgaggctaatatattatcctttggtgccaagagtggatgaagaaattttcagaagtctaaactagtggatacaagaaacttaggcaaattattgcaccacgtgcgtgtgagagataatgaatgttatctactaggtatcagcaagcagatatccaaggtgatcaatttaggacacttccactgaagggatgtgaagtgtacgttcaactgaaatgtcgtcgtaattctgtgccttctcagttatcgggcaaattaaagagcatgatgaatgtttgtagtataatggtgtaaatccttttgatttcttacatgaaagacatgtgggatcatgtagcacctgctttgacattgattctcacgtgtatgagttgctcctctgattttagatcactttgtcctcatcactcggcatatcgacattgatattgacagggctttattttagttttcgacatatgacaaatcataccatgtttgaaattgtaaggatatatttcatggagcctgtattcccttttttcagtgtatttctgtcatgttcttgtccccagacacaaagtagaagccatcaaagcctacactattacaggcaggaggacagaggttgatgctaacactgtatgaatgtatggataactttatcatatttatgtatgagtgattatgtatcccttttgcttttcagtgtcttctcataaacaaccatccttgaaggtaattaaactctcttttgtattttgaactattaactgtatagtctatgaaatatactttatttattgactgttctgtttcaaattccattcaggctacaagtgacaaggaagattctgttccgaatatggccacagaaacaaaggatgaacaaatatctgggacaggtaattttgcaaacacatttaatatgatgttcgttcaagatagaagagatcttctcttcaccaaataaagcagcggggggttcgtcaaatcttcatgttctgatttagtattcctgagattattcatttgtaataagttctcgggtgaccctgatgctgtggtccttgtccatgctgaaagtactaagattttagatgtctgtactttgaaattgggaaaaagaaccatctgacagcaattcaacacataacaggctcaggggacagcatcattttgctttaattctacagcatgtttccatcaagaggggaaagagaaagagatgaaataatagatattagaggtgtcagattgtattgggataaacagagggaaaagtgatcctaataccacaaaaacactgtagaatgacaagtaacaagaccagtgatgtagcaattattttcctcaaggaatagggattgtgagtcaggaaggagagaaaagaagaagttatttatgtaatttgggatttctgctgaggaaacctcagtgaactcacttcaatacatttggaacatttgcataaaagaagacttgattttggcagctccaggcactactggaagcaggaaactatgctagaattgggataaaccacagtgactcattactcctctttaggagtaatttactattaggcatcagagatacatgttttgttgattttagttataaaactgagataaatgaatatgaatacattggcttcaaagttcaaggagctaagtcttggataaaatagctattgaatgaaacttctttagagaatagcatgatactccaaaaaagactttttagaaacaaaaattatgttgaattctaattaactcctaaagtggtcctttcaatgaatatttgattgatttctgaatgttaaacttattaatatctaatgcttgtagcagttttactttgtagaagtacgtcaacattggtaattgatgatatttttattgaggctaatatattatcctttggtgccatgagtggatgaagaaactttcagaaggctaaatgagtggatacaagaaacttaggcaaattattacaccacaggggtgtgagaaataatgaatattagctactaggtttcagcaaacataatccaagctgatcaatttaggacacttccactgaagagacgt

SEQ ID NO: 24081 - DNA, 2300 bp, Homo sapien
gcggatacagcttgatgctaacaccgcatgaatgtatggaaaatgtatcatatttacatatgagtgattatgtatcccttttgcttttcagtgtcttctcagaaacaacaagccttgaaggtaattgaactctcatttatgttgtgaactagtaaatctatagtctatgaaacatacttcatttatttatttatttattattttctttcaaattccattcaggctacaactgacgaggaaggttctgtttctaatatagccacagaaataaaggatggagaaaaatctgggacaggtaattttgcaaaacacattcaatgtcatgttcaatccagatagaaacgaacttctctacccctaataaatcagcgcagggcgggtggggggctcgctgaagctgcacattctgatccagcaggtctgagagtcttcatttgtaataaattattgggtgacgctaatgctgctggcttggaacgtgatcttcgcagtaagattatacacttccccacattgaaattgggaagaagaaatattggagagaggttcaagacataaggggctctggggagcagcatagttttgctttaattctacagcatggtttcactaagggtggaaggagaaagagaggaagtatagattttacagacgtcacatcgtactgcgaagaaaagacagaaaactgatagtaataacccataaacactgtagaatgagaactaaggagacccctgatgtagcaattattttcccaaggacgagggattgtcaggcaggaaggagggaagagaagttatttatataatttagggttttctgctgaggaaatctgagtgaactcacttcacatgcatttggaatatgtccttaaaaaatattagattttggcagctccaggaactattggaagcaggaaacaatgctagaattgggataaagcacactgactcattactcctttttgttactattaggcatcagagatacatgttttgttgattttagttatagaaatgagataaacttgaatatgaatacattggcttccttgttgaaggagctacctcttggataaaatagctatttcacgaaacatctttacagactaacatgatactcccaagaaggctattttagaaacaaaaattatgttgaattctaactaactcctaaaatggtcattttcaatgaatattgcagtgatttctgaatgaaaaagtgattaatatctaatgcttgtagcagatttatttgtagaagtatgtcaaaattgataatagatgatatttttattgaggctagtatattatcctttggtgtcacgactggatgaagaaattttcagagggataaactagtggatacaagatacttaggcaaattattacaccacatgggtgtgagagataatgaatattatctactaggtatcagcaaccagatatccaaggtgattaatttaggacattaccagtgaagagatgtgaagtgtacgttcaactgaagtgtcatcataattgtgtgctttcttagatattgggcaagttaaagagcatgatgcatgtttgtattataatggtgtaaatccttttgatttgttgcatgaaagacatgtgggatcatgtagcacctgctttgacattcattctcaggtgtatgagtttctcctctgattttagatcacatttgtcctcatcactcggcatatggacattgatgttgacaacctttgattttagttttcgacgtatgagaaatcataccatgtttgaaattgcaggggtatatttcacggagcctgtgtttccttttctcagtgtatttctgtcatgttctaatccccagacacaaagtagaagccatcaaaacctacgctaatacaggcaggaggacagaggttgatacaaacactgcatgaatgtatggataactttgtcatagttacatatgagtgattatgtatcccttttgcttttcagtgtcttctcagaaaaaaccagccttgaaggtaatgaaactctcatttatattgtgagctagtaaacgtatagcctatgaaacataccttatttattattttgtttcaaattccattcaggccacaagtgatgagaaagattctttttcgaatataaccagagaaaaaaaggatggagaaatatctaggacaggtaattttgcgaaacacatttaatgtcatgttcagtccagataagaagttctcttccccgaataaatcagtggggggctggtcgaagctgcacattctgactcagcaggcctgagattcttcattt

SEQ ID NO: 24082 - DNA, 2300 bp, Homo sapien
tacaaaaattagccgggtgtggtggcgggcacctgtaatcccagctatttgggaggctgaggcagaagaatcacttgaacctgggaggcagaggttgcagcgagccaagtttgagccactgcactctagcctgggcgacagagcaagactccgtctaaaaaaaaaaaaaaaaaagaaatgggaggcactgagtttctggctcagtttgtgatgccagaaatacagagatgactgatcagtaaaatccactagaaagtgtgtgacaggtttctttttccttatatttttcttttttaaatacaaaagtaatagcagcccactgaaaatttgaaaagtatatggcattaaaaagagaaaaataacatctgataatccaacaagataaactctctaaaatttcttttctctttttaaatgaatatagttaagcttgaaatagaattttaaatttatcctgatgttttactcaacagcggagaagcatcttttatgtcattattttaagtcacaaccacttttagtgatgatgattaaagaaccatttgctttttccttactgttccctgtttttagatttttggctagtgtctaatttttccctgttataaataatgctgagatgaacagaatatgtagatttctaataatttgcaaatgaacagcatatgaaaaacatgggcaaaaattttgcagttataattactcaacacaagttttaaataaattacttttattttgagcgttcattcttacatatgttataggaagtaagaagcattccttactccttagaattttgtttataaattagtgatgaattggaaagggtagcttgcccctggaattctctgataagcacaggtgatgaggaaaatggagaaatccaagaattcttttgtctttccttaaaagtagtcaactttaagtgcagtgcaggcgtgccctctagcggccaaataaaaaataaataggccttcagccctgtaacaatcgcacgtccccatctagtggctaacgtctgtaaatgcagcttttctaatcacaatagcgaatgttacttgatttatatttgtcttaggtgaagaactgggaggactcttagagatcacgtatttcaacttcctcacggagtggcatgcaggcagcagcagccttgggaaccccgattgcccctcctcacacctgcccatcacaggacttgggcgacggggtggtgaagtcaggctgtggccccagcggcgccacgaggccgaaaaccggcgctcagcctcatcccggtggctgcggagtgccaagcgccaggtcctgcgctctgggcgtgggtcaggagcagctggcaagggcagcgcagcctatggggcctttgggcgcggccggccgcagctccgggaagccacgtcagcccacgggcgctgcagctgcagccgccaccagcacatggagcaggggtccccgaggattgggaatccccgaccaggcctgcgcctccagccgcgcggaccccggggccagcctggccgcggcaagtcaggcagtctgcggcaggagcgccgggcatgggcttcggccgggggtgcaggaggcgcgcaccctccggccggatggcggcgcactcagggctcaggaggccatcccacgggagccccgccagcccccgccggagcccgagctgcagtgccgcctgcaagtggtgcgctggctgcagctgtggcaaccccggataccgtcctcccgcctcgcacccatcagcgcggaccccgggggcgacgcagtggcgatgtcgggctgtgggcccagcggtggcactaggcggagaagcaccactcaaccccatccctgggctgcagagggcccagcgcggggggctccgagcgtcgggagcctgtggaagagaagagcgcgcgggcgacagttaaacaggccctggggcagggcgcgcctcgcgctccagggagccccgccctcccgcggcacctccgcagcaaccgccgcctgcaccgggcgcgcgagagctgctagggcggtttctctgcctcgggcctgttgggcagggccggctaaggtgcgcgtgctcgctggttctaacccttctgttgggcgtttctgcggagaggcgggaggcgctgagagtctgcgcggaggtccgtgcacagactgctttgcctgttgttgctcttcggaggcggcgatccccgaaggcgagctgaaatacggctgcaggctacaatttgcagccgacgattaaggaagacgacgagcgggagaggtggcccaccctcatggagcgcttgtgctcggat

SEQ ID NO: 24083 - DNA, 2300 bp, Homo sapien
tattttgacaactgaaaattatcctataaaaataagtttattgtgctggcaaagacaatgatagagcagaggtggcagactgttccccaagccaactgtttccaaaggagacctgagggactgggtgtgagttgacagtggtgggagctggaagcagcaagggatgcggggacatctggggagcctggacctgaccttggagctcactcacacaatctaaataatcccagagtgaggctgaggttttcctgagttggatgagggcctgcgaaaatttcctattattaggcaagcctactatgagagtgagaagcctaaactcaatttccattttatagcctggagtaaaccacttctggtcaggcagcagggaatcataacatatcagagctgaatacctcactggtttgctgaggggcaagttagtaggtgttcctcagaaaggattttgtggtcaattaagacagggaaactctggcttaaactgcaggtaaattaaataagaggtctttactgcaagcctaatcagagcctttattatgctagtgtccatctccaaaagggtggtcatcaaatgcaggccctccctgtcttgaccaagtcctttttcttgagatcatgtcttgagacttggatgccatgcaatacactttgggaaatactaacctagttgaacgacagttttactgatgtagaaatggcggcccaaaggataaaaagtagctgaactagctggtggggctactttccagaccaatgcttttttctcctgcctaagaccttaaccacagttgcaaattaactacagatcctcagaattttcgcccaattcaacttggaggggttgcagtggaggtgagggagaagggagtaacagtgaagccattcaaagcaaaaaccacctttaaagaaattttggccttagaatacagggtttttttttttttttttttaattggtggagggggcacccaggaagaccagacgtgctcctgtgaagcaacgctccaccacgtccttttgaaaataccgtagcctgcatgagacaggcgggagcacctaagccttcaactctccccatgttgcctccaattgacctcactgggccaggaaaagccctataaactggttttgtatactctatccaagtagtaaatttactaaaattactggatcctactatataccagacctctgcaaggcattgaagattcaatgatgagcattaattcccactctaaggggatttttctatctggtagggaaactcagataccgcatgcagctagcctgtcacagggctatactgactaaagctcaccctaagaaatttgcacatcttagcctatgggcaacgggaagccatggacggaatatgttttccgtttcaaacaaggaactccagtcacagcaggctctaactccatttcctattatcaactccccttcctgctcctcctcccttagtagcctcgaaaaagagtggccacttccttcacatcaccagggccttggtcctggtagggggtcccgcccccggccctgtcctcctccccaggccgggacctccgcgcctcccacacacagtacaactctaacacgaaactgggccaggactgcaggtaggtcccgtccaatgcgacacgctcgcgacggcccacgcactgccagaaccagccctgccactaaccagcctagtaaggaacgcagtgatctttaggagcccacttctaaattcaaatcatttggggttcagtaagtctcttcacagacggggacctaatagcttccattagcagcctccacgtttgctgaacacgactacggggccagacccacaggaactccaatgtggttcagccgctcaactccagggaccaaaaagactttcccacctcccagcgttattaaaggcaaccccgcccccaagcctcagccactacgcggtgcagaaagaggcagagctgggcatgcgcaatttccgcccccgccacagtcttgggagtgggcgggctcgagggctgggaggaagccgaaagctgaccgagaggagaaagaagcccgcccccggaagtccctcctgtctctgcagcttgttcccggaagttttgctgctagtcgcggacgcaatggcttcaaggttacttcgcggagctggaacgctggccgcgcaggccctgagggctcgcggccccagtggcgcggccgcgatgcgctccatggcatctggaggtactcgggtctccgggcgtgccagggaccagagtgttgccctcccagggtggtcccagggcggcaaa

SEQ ID NO: 24084 - DNA, 2300 bp, Homo sapien
gtaccctctgggcgactatggttggatttcggtttttctggacacaagctctgccatgctccctgcccaccttgctgacgttatccgtcctaacagtgtcgggcggccgaagcacatgcgggtgatggctggagccctggagggggacctcttcatcggaccaaaagcagaggtaacaccgaggagcctgcctttccctgggggtggggtcctcagttgcaggaacatggcatgtgttcttgggcctctgctggtgacctcccgggtacctcctccaggctccagctgggaagtgctgtgcaggggcacctccccctgagatggggcagcagttcctcttctagggagcatgggtagagctcatcgtgtcctgtcttttagaagctatttggaagctacagaaccaagaactgatcaaaaagtgatataagagtcagaatcacacacacttcacgtctgctctaatgagggccatggggccgcctctcacagtgaagccggagtgtcccaccaaggggctgcatggcctgatcagaccctcaggagagcatgtgtgggtgtggggagagcagcaagctgagcttggccaagggcagtttaggcgcctgaggagcattgtgtcgggtgccggggcgtggggcatgcgtggttctgggcccagaaaggggaggcctgagctggaggtgcagagggtgggggtctcgcagatggggtccgtaggagccgaggtggtgagaggagctaagtggtgctaggtgagaaggggcatggctggggggacatcgaagggcaggtggaggcagcatgtcagtgcaaacaggggactggtgaggaccggccaaagggctggggggagaggcgtaggtcagggggcacaggtggcccaggaggggccgtgttgggcggctgcaaggtgccggcgctggccagaggggagctggcagagtgtgaggagaatgtgggggatgtgccggcagtgagaatggggaagaagagagcctgcagattgcggggcacactgccaccctctctgatccccccagctgaagctagctgggctctaagagcctaagaagctggtgggcaggtgagcccatgctgagttcaggacccgccacagaccctgggacacccagtgagcaggggtggttctggtcagggcaggtgaggttctggtcagggcaggtgagggtcagcttccaggagggcggaaagcagccgctgagcaagggccgggtgccacacctcccttcccaccccaccaggagcaccgggggctgctgaccatccgctaccccatggagcacggcgtggtgcgagactggaacgacatggaacgcatctggcagtacgtctactccaaggatcagctgcagaccttctcggaggaggtgtggcggctgcccctcctgcatgctctgcattctcctggccatgcccctctcctctgcgtccctcctcgccgggctcccacatttcccttctacatttctagagggcctgctgcctttccgtgtgtgtctgggtgcgcatacgtacccagtggctgctaggcagaatcttccaaagagagccggatctccggaagagtaactgccagcagataaagggatggggccctcaggaggggtaggaggctgagctgcctgtgcgccagcgggtgtggttctctggaaagagccttttagggccttgcaagttgcctcctctgatgcctacaactgtcccgtccctcgcagcatcctgtgctcctcacggaggccccgctcaacccgagtaagaaccgggagaaggcggcagaggtgttctttgagaccttcaacgtgccggccctgttcatctccatgcaggctgtgctcagtctgtgagtgctccctaagcctggcctccctgagtcctgtcctccctgtgccgtcctgcttgccatgaccagggtctgacttccctggaaaaacagccccttgatgactgttcctctagggagtccctcgtgtcctctcttcagactagataatgcagatgtgccagggttcctcccctgggtgaggaggtccccgtgcctcagtggctgaggtgaggggatgctgacctggtgacaggtacgcaacaggacgcacgacaggagtggttctagactcaggggacggggtcactcatgctgtgcccatctatgagggctttgccatgcctcactccatcatgcgggtggacattgccggccgcgacgtctcccgctacctccgactcctgctgcgcaaggaaggggttgacttccatacctcggctgagtttgaggttgt

SEQ ID NO: 24085 - DNA, 2300 bp, Homo sapien
gatttaagatagttatagttacaggactcgatggctcacacctgtaatcccagcactttgggagtccaaagtgggtggactgcttgagctcaggagttcgagaccagcctgggcaacatagcaaaacccggtctctactaaaaatacaaaaaaattacctgggcgtgatggtgcacacctgtggtcccagctacttggaaggctgaggcaggaggatagcttgagcctgggaggtggaggttgcagtgagctgatatcaggcaactgcactccagcttgggcaacaaggtgagaccctgtctcaaaaaaacaaaacaaaacaaaatatatatatatatatatatatatatatatatatatagagagagagagagagagagagagagagagagagagagagagagagtcatgctttgatgtatttatgcattaaaatgccaaggataactttctttaaatcaaaaagcactaaattttgttatgctgtcagcccaccctcatgtagacatagcttagtttttacatagataagacccctctataagaagagtttaatataaagagggtgtgttccccctcttgctttctgaggatggcctactctgtaactgagtagctttcaataaacaatcgcttctcactgcactctgcaacttgccttgaatttcttctgggcaagatccaataaccctcccttggggtctggatcgggaccccttttccagcaacaatattgtttcttgaactcggtggttatgcaagtgtgtccacattttaatcattcattgaaatgtacatgtacacttgtgatttctgcacacccgcttcaattttacaaattttatgctcacaacccattgggagaggtatatatacagggaaataactatggatccgtttggtaaacaaatgtagaactcaactatcctgcactcttgaagcagctgactccagtgccgcagggggctacctgcatgccaattccacacccaataatcttgggcaggttaccaaagtgtgaagaccctgactgaaaaatgggagtaataatacaactacctgatattgttgcaaggatttaatataacttatgtaaagtgggcagaagtgctccgcaggcacagagcaggtgctcaataaatgccaggaccaaaataccacgaaactgtaatttttataaggaaaaggatcttttcttcagtgctcaacgaggaaatattatggggccgtgcgcaatagctgacgcctgtaatcccaacgctttggaaagactaagcgggaggatcgcttaagctcaggagttcgaggctagcccggggaacatagcgagatcccttctctacaaaaaaaattttttttaattagctagcgttgcgcggtggccgtatggtggccaatgaggtttatccgaagcgcgattattgctaattgaaaacttttcgcaataccccaccgtgacgacttgcaatatagtcgacatcggcaatttttaacagtctctacggagactatttcagtaaaaataaataaatatggtgcgcgcctgtagtcccccctactggctggcgcgggaggatcgcttgagcccaagatttccagcctgagcgacagagcaagacaccttacctagaaaaaaagaaaaaataaatattttgggtgaaatatccagggccggcctccttggagagggcgctctcacgaaggagcgtggcccgaggtgctgggacgcgggaaagacgtctttctggaccggtgctgggacgcgggaaagacgtcttcctggaccggtgaatttccagctccacagactccggccgcgcgcacaccagcccagctccactttctgccgcccgcgtcccctttaagacggagccatgacatcatcccagacactgcgcagcctaccttggcaacgccgcgaccacttttttccggacgacctcaattggctggccagcctccggaggccccgcccccttcgcgcagccagccccgggcacctgctgtcaatcgggccaggtgggagcgatgattggccgccgggcccgccctccagaaagccccgcggggctcgcgtaggctgcaggctcggggagggagggcagcggcgccgcgtcgggagccgccgccgtcccggtcctcccgcccgcccgcccatccggtgcctcctgcagcccgcctgctgggcagggccggcgcggcccggccatggagtcctacgacatcatcgccaaccagcctgtggtcatcgacaacgtgaggcccggcagccagggggagggcgggcgccccgcccccgg

SEQ ID NO: 24086 - DNA, 2300 bp, Homo sapien
atgatctcgatctcctgaccttgtgatctgcctgcctcggcctcccaaaatgctgggattacaggtgtgagccaccgtgcctggccccaaagatgattgtcttataaaagcctatgtaacccttttcattttttctttaaaaaatgtcttcctttacctcctggaacacatccatacttattcccattgtaatgcccgttcctgaataaacatcattgtttttttagagagggagagagagtccattggtgagagagtctcaccaatctcctgtccccagggcacttccacccctgggtatttgtactgatcaaccaggttacgctttcagcatttgcaaactcaggatggagattttagaccctcttcaacctccaggtttcctctttgcaaaggccagcagcagaagcaaaagagatggagcccgggttagcatttatttttctatttaccagtcatttggaatttggacattttctgtcctgtggttgtggtgagggtgtgggttttgtgttgttttatatattctttgttattttttattctagtttttgtttttgttttggaaggtattttagagaaataagatttctgtggttaccatgacctgctgttacagattacatggtaccctctcttcatatgttgaagtcctagccaccccgccgaacctcagaatgtgactgtatttggagatagggtctttacagaggaaatcaagttaaaatgaagtcattagggcaggccctaatccgatatgatcctgtgttcttagaagaggaaatgtggactcaggtgtgtatggagggaagatgtcttgcaagcccaaggagaagatggccatctgagcccacgtcctggaacagagacttccctcacagcctcagaaagaaccagccctgctgacgtcttgatctcagacctccagcctccagaactgggagacgattcagtcagcatctacacaacacagggttgaactgtgcgggtccacttctatgcagattattttcttttttcttttttgagacagagtctcgcccggttgctcaggctgaagtgtagtggtgtgatcttggcttactgcagcttccacctcccaggtgcaagtgattctcctgcctcagcttcccaagtagctgggactatgggtactcgccaccacacctggctaatttttgtatttttagtagagatggggtttcaccatgttggtcaggctggtcttgaactcctgaccccaagtgatctgcctgccttggcctcccagattgctgggattacaggtgtgagccaccgtgcccggccctatataactctttgtgcaagtttttacccctaaaagatatctgccatctcagccatggaacagacactgtaagaacatgaaggctcaagggcagggctggctacataatttgtgggacccattacaaaatgaacatggagaaaaaactagaaaaaagtgtagtacaaggtactataatagatttttcctttgaaaacagtttaatacttataaaatgtaatagagggaaatagtgacacgtgagtaacaaaatgggcgtatcaattggtctatgctatttttggtgttataattttacctaatataataagcagcaacactttgttagtgagacgggctttcaccatgttggccaggctggtctggaactcctgacctcaggtgatccgcctgcctcagccttccaaagtgctgggattacaggtgtgagcctctgcgcccggctgtgatgtcttgattgatcataggatttttctggctattctagctacttccaattcgcttcagccaatttagttgaagttttatcacttgtgacttcagagtcctggttaatatcctgttgccctcaggacatgcaggatggaggaaggcaccagggagccgagggaagtgagcagagaggcagtcacttcagggccaccagcatagcccccgtcactgtccacagacacaggcccttccccttctcatggttgagcaggctccacctcacttccgtgtatgacttcatagaccgttaggttccgtggtaccctggagtccacagctgctgaatctgaagggccatcagaagactggcttctccatgatggtttatggactaaggcaaagatgagcagagccatggccctcttctttgttctctgctggatccaaggtatattgctgtggcagctggagagaaacatgggcctcacttcaagcctaagtggggcagaggagggcgttccctcccacagtgtggggaacacagatgctttacctactc

SEQ ID NO: 24087 - DNA, 2300 bp, Homo sapien
ggctgcaatcccacctggccacttggcatctcttaacctctctgggctttacttaccttatctggaaaataggttgaatggcttattaattgtgatgtgcgtacagcaatgtctggcacataatcagtgcgactctcattattgtagtatgaatgtgatttgatgctgtaatttctcctctcttcagggtgccggtgtctttttctctcaatactccaagaaatgagcgtccagcatggatgtgaagggatgcttgctgcacctggagtttcaagatgccgctggggaaaagggaggctgctagcaaacaccattttggagggggctgtatgaaggagaaaagtagcctagagccggaactcagattttctaaaggggattcaggcggccagaggatagtagagggccagaaaggaggtccccaaggaggcttcggggtagggtgtgaggggatcctcaggcagactggggagctgagcctgttgtaaccgagcgagttacagagaaacgccgcactttgagacgaattcaggggtcctttattagctggcgactgagagacagctagtgctcaaaattctctcagccccaaagaaggggcttgattttcttttatactttggtttagaaaggacaggtgggggtctaaaacaatcttacagaagtaaagcaggcaaaaagttaaaaggataaatggttacgggaaagcaaacagttccaggtgcaggggcttaaaatctatcacaaggtgatagacacggggctttgggcgttatcaaccggacacaaacgccggggctctgggtgctattaaccgggcgaattcctgggaactgcggatatagcttgccacagtatcttatcagttaattgcattcttggatgtgctgggagtcagcttgcacaaattaagtccttgaggaagcggggtgggtaaggggctgcaaatgaaagagccaagatggagtctgtctggctctcttagctaagggagagtcaattcaggttaaaacaaggtagggtatcacaagcccacttaacaagggcagcaggaccccaagaagaaaagctttaggagtctccacagtgggcccagggcagttccacacaggtctctgaggccccacagacaggagagctgtgacgactcccttagtgcccaagaaagcaaggaggtggtgggcaaggggctcccagaggccttggggcactagaggggagatggagccgagggagtggctctgcaggcccctctctgagagagtgcatgaggtgtggccccaggcccaagggtagggggtgcacagggtgagggaagggaggagaggaagaggaggaggaggtggtggccacagcgggatggcactcagccaggttcagcttcgtgggaaaggtcccaggtgggccgggctagcactggggatgccctggctctgtgtctcggttgggtggctgactcctcctggaacgcatccctgacatcctccaggctggcttggggatactctggggacacacagtgcccaggcttccggcctcccagccctggctccctgtggactcagctgcccccaacaagcctgcgagccactggagagcaagggcaggctgtccttgccatccagatgcctggcacagaaggggttctcaccttcggggtatgggctgactcagtgggtttctcctccctccagctctaacctgcctgtggaataaacaaatcactcctctgggttgtctagctggtgcaggccccagggcgacgcccctttgaggggaaaatgggggcattccagtttccatgagccctgggactcccctccttcccaccactgctgcctaccctccggttccaggtatgcaggcttcctcccttctgacggttcctgctgctggagtcgtccttcctgaaaccctgcctttgcttagcctcattcccatctctcagtcccatcctgcagctgggcaggcagtgctgggccccggaaatgccctctgcctccctggagcacgtggcctgtgattttccttgagcacagcactttgtgactttgatgtaaacatcaaacacagccccctttcctgtcttcgcatccaggaaataggttagtttcagacaagcctgcttgccggagctcagcagacaccaggccttccgggcaggcctggcccaccgtgggcctcagagctgctgctggggcattcaggtaagcggctgtcctcgggccttctgcctgtgtcctgccaccagggccaccccagggggctctgggagacctggcagaggatgaacccccccc

SEQ ID NO: 24088 - DNA, 2300 bp, Homo sapien
atgagccgttgcactcggcctcacatattttgaatgtttgtgctttttgttggtgatttcagtggttgacatggcccccaaccatagtgctgaaatgctatctagcattcctaagggcaagaatgctgtatgtgccttatggagaaaacatgtcagataagcttatagttatagtgctgttggctaagagttcaatgttagtgaatcaaccatgtctattaaataaggtgcctttaaacagaaactcacaaaaaaacaaggttatgtcttgatcagttgatgaaaatgtaaacagtttcctaggaacctaactctgtatttcccctaggagggatagttctatattgctaattcagtgttttcgttgactttatagaactgcagagaatgacagaaatcaactgtgtctatctggctgtctatccttttatccatccctctcgctctgttcgtccatcggtcagtgttatttttgggatgctctcaaattagattacagtcctcagttcccatcactcctaaacatttctgcaagcagatcgttacctagggttcaatattttatgtttcttttttaattgagggagggcaaatacaatggaatgaacacatcttaagtgtacattctcttagttttcggaaaatcagacacttgcataacccaagccctgtgaatatacaggacgtcaccatcaccccagaaagttgagggcaggcaattttaagttatctgccttaccagatatccatctgtctaaatagccttaattcctcctcccctcaatcacacgttttgtttaatagctgtatcagagttcactttgagattaaaccctaatgcatttaaccagtcccctagggatggatattccaattagcgtatgctctgtagaaacttgccaaggaaggcagagggcagggcgaggggtgcctgctaaggccgaggggaaagggtcagcggaagggacaagggaggctgaggggtagggcccttgggtgagcaaagctgggtgcggcctcagggcctctgcgcatgcagtcctctctgcctgatgcgctgtcccgcgcgctttttgaaaagttggctcctcctccttcagctctcccttcaaatgctagctccttggagaaggtgaccatcctagctagagccacctcttctctctcttaatgtcactccacttatttcctttgtaatgctgacctcaatctgtaattattatttttgtttctttctcagtttatctcacggctctccctccttagagtgttgccttcgggaggacggggtgggaccgcgcctgcctcaagcgtgcatatccccagcaccgggcctgaaacacaataattcagcacgtggttgggacatgaagagatgggtacaggtgtgggtgcttggggaccagttggcgtgcttgggcgtccacataatgtctctggaaagtcagatgggggtttgggacttctcgatctgtgcccagcaggctgcggcttctctccaggttgactctggcacagagcaggctctgcccccttggcgagctcagtctgcggcactgatgccctccacttggcgtctctcgcgccgtctttgggcccaacgcaccaggttcaggaaggccctgacgtgcctccgaccctctgtgaacccgcaggtttcgggaggcccaggggcgatgccagaccccgcggcgcacctgcccttcttctacggcagcatctcgcgtgccgaggccgaggagcacctgaagctggcgggcatggcggacgggctcttcctgctgcgccagtgcctgcgctcgctgggcggctatgtgctgtcgctcgtgcacgatgtgcgcttccaccactttcccatcgagcgccagctcaacggcacctacgccattgccggcggcaaagcgcactgtggaccggcagagctctgcgagttctactcgcgcgaccccgacgggctgccctgcaacctgcgcaagccgtgcaaccggccgtcgggcctcgagccgcagccgggggtcttcgactgcctgcgagacgccatggtgcgtgactacgtgcgccagacgtggaagctggaggtgagagcgcagcctggggcgcggggtctggaggggcgtggccgaagaggggcagtcgagggttttggggggataggagggaggaaaaggtcgtcttccccattcagtcccctttggaagctggagaggtggggcactggttggggaagaacctgaaaggaggcctcagaggcaggggctccgtggtggcggtcgccttccgcaggctgagcgatgctatgg

SEQ ID NO: 24089 - DNA, 2300 bp, Homo sapien
aagcttgtcatggagctgcgcctacctgtgtgggtctgtgtggaaaaggctttctctccccaggagaatggtgctaggtctacctgttgaaggctctgggtctgttgtagaaggccaagtgccccccatggttggctgactgtatggccgagtgtacccccaatgagtgcctgtggatgactatctctctgtggatggcaagtgtctggccgtggatggccaactgttcagccatgggggaccaggtgttccccagtggatgggtgtcccctcctccgtggctgggtgtccaccgtggggggtcaggtattccccgtgaatggccatctgttggctcttggagaacagtgcattttcctgggaacacagccatggcccctccaccgccctctgccacttggcccatcatcagcagatctggaggtgatgggggcctggcctggcttccccagtccctgcagcttctctgcaaggctctgaggtgtggagcccatagggtgtgttgcgggggaaccggggcacagcaggaggcccccaggtggctctaggggttacatcccctcccttcccctgccaggctgaggccgcggaaggagcagggcacatacgccctgtccctcatctatgggaagacggtgtaccactacctcatcagccaagacaaggcgggcaagtactgcattcccgagggcaccaagtttgacacgctctggcaggtaggctgcccgtgcaacttgttctgggagatgccgtgctcagatggggtgccgggctctggggaggagaggagcctctctgctagctgcctgctccctgcagctggtggagtatctgaagctgaaggcggacgggctcatctactgcctgaaggaggcctgccccaacagcagtgccagcaacgcctcaggtgacggcagcaggcgggcgggcggtgggcgggggcggcaggagacctggcccccagccctcactgtcccttctgctcccccaggggctgctgctcccacactcccagcccacccatccacgttgactcatgtgagttgggggcacctggagtgtggccttggggatggagctggggagtggctgtgggggaggctgggatggaggctggggtgcctgtggagcggaagaagctctctctccactgtctctgggagtcctcagtggatataggtctcatgagaggggctggacgtccccagctcaggccttgctgaccctgtggcctttagcctcagagacgaatcgacaccctcaactcagatggatacacccctgagccaggtgagcgggcagaggtggggacgcgggttggggctcatgctgagccgagatcagggtcgctgtcagggctgtggggtttcacggggggcgctgtgggccgggccaggctgtggcagttggcttggttaacacctgtgcacacatgtgcccacacccatcacacctgcctgtgcacatgtacgtcccagtgtgtactgacgtgcagggagcacacttggccttgcctgaggctccccagacacacgtttgttgagtacctactatgtgtcagtcacgttccgaggtcactgtgtgtatgagccaccgaaccctcctgacatgccttatgaagtggctatggtgattaacctcactttacagatgagagagggaggggtctgtctatggggatgtgaggcagtggtagaggcgggatgtgaacccacgatgggccccagagctcacattcctaaaatggtctgctgcgggtgctcctgtttctcatgggtgggcccagacctgaacatgtgtatgcacagagaagacacatagttacatgtgcacctagaggctcgcttttggaggcctcgtaaatgtggctgtgtgctgcatacgcagacagggacgggcccggccataggcgtacacgtacgaatgcacacacatgcacaccccagctggcacagtaacggtgccacgtggataccaatgcacacgcccctagagtccaccctcatgtggcttcatggggcacccacagctgtggccaggagtgtatgccagtgtgtgcgtgtggatgtgcaggaacacgcatgggcacccacctgcttgtgcatgctccagggacggcacccttgtctggggcaggtgcttgtgggggctgaggctgccttgctccccacacccctgcccctgacctgggagtgtaccgctgtgtgtgcccagcacgcataacgtccccagacaaaccgcggccgatgcccatggacacgagcgtgtatgagagcccctacagcgacccagaggagctc

SEQ ID NO: 24090 - DNA, 2300 bp, Homo sapien
ctgccctggtctctttcatagtgatcttttgttttcttacctttctccagaaagccctctatctctgtctgattaagcagtctgaggccccagagcatgtgacatgaggctgagcgatgctctgtgagctgccccgctgcagagaagcccactcagggctcagtcctgccagccccacacctccccgagacagggcactgctgatgaggaatgagttctctctttgcttctttttcaagtgaccctaaaataaaacagccaaatggaagcaaacacaagttgacaaaggcagcctcgctcccgggcaagaacggcaaccccacttttgctgcagtcacggctggctacgacaagagcccaggtcagtgcctttgcttcagagacctgccacgccaggcgccaggcctggtggaatgacctctgtcctaatgtgccttccattgattgaacgtccattgttacaggtgggaatggctttgctaaagtttcttcaaacaaaacaggtttctccagcagccttggcatttcacacgctcctgttgacagcgatggctcagacaggtacggtagaccaccactaaccgctagaaagacggaaggcttctcaagtcgggttagcacctttttatccataaatgggtttcagggcatttttcccctaatttacaaggaggcatttgtcagaagtggtcaagtgcctctaagaaatcatgtctgctgggtggaagcagaaagccggctgcggtgccttccccagggggtccagatagagaaagggggcacccatgcctgtctcagccaggcagacacacgttacacctgttctcactctcctccatctcctggtctgtggtaagatgtgatctgatcattaaaaatagaagagcgaaagtgacttgggaggggggaaatctggagcaaatactagccaatttatagtaaatcactggccacgcctctttcttgagcaggcttgtttatcatgcagggggtgtggtggcctgcagcagtcaccttggttgacttttccagataagcaacaatagagccccaatttacctactttgcactaataggaaatgagttctagatttgaaatagtttttaaataaatcttccagtaccaaaaagcaaacagaaggaaaaaatgtctgtttctctgcaaaacacttgctttgaacctggctgtgagctagtgatagggcatccggagctctggggctccctccgactcaacccttgtggtaagcagccattgttcagctcttccttttgtctgtttttaatatttgagtacccccagttgaagcagtgtctcctgtttgtgaagctgtgcactatggatccgtttgcactaaccaccatacatttttgtgtgttgcgttttcctcttgtaacatttagctcgggtttgtggagtcccgtcagcaacccaagcagccctgacttcactcccctcaattcgttctccgcctttggaaactcttttaatctaactggtggtgagtgtttaacactagatgtgtaactaataagcctgtggacagaggaagggagaggaggtgtggttttgtgtgctggagaacacagcacagcagcactgtggaagaggccccgcaggaagctccctgggaagggtcccctcccctcttcctccctcatccacaccagcagcccagaggggcagtggaccaggctcgacacggtgtgcgcacaccagttggtgtgagttccatggcgggtattgaagggcttcacagaagggttctggtctgaaatgggacccctgagtgtgccaggggtcctcttcttgctgtccagaactagaggtcaccatggaagcttcccattagctatcatgtgagagtggggaaagtttgcatttggatgtcattggtggcatatcagctcgtgcactatgcgtttgagttctggaggacactcctgcccctacttcctctgggctgtggtgggctggtgaagtgggtgtggtggctccaggagcagtggttggaggtatgccattgagtgaagccccatatgctatagtgatcatggcaaaaccaaatatggacttgatgactgttgctttatttccagaagttttcagcaaactcggattatctcgatcgtgcaatcaggcctcacagaggagctggaacgagtttaatagtggcccttcatacctttgggagtcgccagcgacagatcccagtccttcctggccagccagttccggctccccgacccacacagccacagtgagtacttggggctggggctggggcctggacctggcc

SEQ ID NO: 24091 - DNA, 2300 bp, Homo sapien
ggcagggccatgctggaggcttgacctagccaagacatgggaaaccttgagccctgagccctgggggtaggggagaagcagcttgtgctacagggtgtgaccagggaagcaagaggcagcaggcagagcggctgcaatgtggcagtgaggggacgggagaagtggagccgggggtactcagggtacgcggaaatctcacaaggcaggaggggccagccaggtagcgagctggccaggcctgggctggggatcgtgccctgtggtgatgggaattcacaggtccaagctctcccccaccttcttcctcttgcagtagctacagcagcaccaagttgcacacaatagatgtgcaaaatgatacatttttctgataaaaggtatacatatttccgtttactgagtagagaatgttattttatgactgaaattttttgttttaatttcagagatggggtcaggctggagtgcaatggtgtgattatagctcactgcagcctcaaactcctggctcaagcctcccacctcagcctcccaaagtgctgaggttacaggtccgagccactgtgcccagcctgttttagatttttaaaacagctgtatagacattactttaaagggcacaggaatatactaggagcttaatagggatcagagctgcacatcccagtcacgccaatggagaggctttactgaacttggggattcagcccggaacactgcacctcccacagctgtaaacctgcgtgtaggcacaaggattttccaggtccccaggcagcggcctcagctgtccacccctggaggatgtggaagaccctcctcccctacctgaggtgggagaagtgaagacattgactgtccgccacacaacacagcagggaccgggcacgctcttgctcccctcaaatccccgagtgcagagagatgtggctgctttctctttaaaacctgttaaacagaacacatctaagagctttcgtttgttttctttgtagaagggcttgagttatgcatagtcttagagaacattcaaagtgatttggaagagcgctaatcaaaacaccacactaacgagcccgtttgtttttaatttccagctactgatagtctttataaactttctctgcaaaccctcaacgcagacattttcttaaaacaacgccagacctcaccgacacctgcttccccgtctcccccagctgccccctgcccctttgtggcccggggcagctacagcagcatcgtcaacagcagctccagcaggtaggcctgctgcttcctttccggttctcagcttgaaatgtgcctaaaacccgatgtcacaccctttaaatggaaacacttagcggccacaggccactgtctggtgttacttctgatggctgccagcttgtgtggacccttttacctggggtccacccccgcttcctgctgctgtgcccagctccaacagtaacccggttcccattctaatccattcattcttaccacctgtggaccgagaaatgcaccatttaactcactagagtgatattctcagtgagccaatgaacatttactaagccttacatgaagacctaaaggggattcctgtgagttgggagtatgggtttatgtgacactaattttggcctttggacaatttggcttaggacttagaagggcaggacctggtccaagaccgttgtgctgggtgaggtgctgcagtaggggatgtgtgcacccgggagggcagcctcctgaccacacagacaggatgcaggaagcatgctgttctccgaggcacggagcctcactcgtgtccgcctgccacagtgtaccgcaagcctgacagtcacggatggcactctcaccgtgtgcctcgccgtggcgtgggtttctgtgcatcgcgtcaccggccagcctagggtcaggtcctccccgccgttgcccaagaggcagtaaccactgaggctgggggagccaccccgcttctgggccttgccacaggagcacctcgccgtgtcctggcagggaaggagactccctgaggccccgccctttccggtgtcggtggctgccctctgcatttcctgccgagtggctctctagcattcttcacaaaagtgtgatcgaagcctctgccagtccctaaattgtgatccctgccctggtctctttcatagtgatcttttgttttcttacctttctccagaaagccctctatctctgtctgattaagcagtctgaggccccagagcatgtgacatgaggctgagcgatgctctgtgagctgccccgctgcagagaagcccactcag

SEQ ID NO: 24092 - DNA, 2300 bp, Homo sapien
tttacatatttatatcacacatcctttagaggaaacgggttggagagttgaaactaaaattcttcttagtaaaagaaaaatcaaattccaggcatttcttctaatacacataattattgcctccatataaaacctccatgtgagatggcattctataaaaattcatgagcaggccgggcacggtggctcacacctgtattcccagcactttgggaggccgaggcgggcagatcacctgaggtcaggaattcaagaccagccttgccaacatggtgaaaccccgtctctactaaaaatacaaaaaattagccggatgtggtgatgcatccctataatcccagctactggggaggctgaggttgcagtgagctgagatcgccccattgcactccagcctgggcaataagagcgaaactttgtctcaggaaaaaaaagaaagaaagagaaaaactgatgtgcaaacttttatccataaaactgtgggttttttgttttttttttttttttttttttgagacagagtctcgctctgttgcccaggctggagtgcagtggcacgatctcggctcactgcaagctccgcctcccgggttcatgccattctcctgcctcagcctcccgactagctgggactacaggcgcccgccaccacggccggctaattttttgtatttttagtagagacggggtttcaccatgttagccaggatggtgtcgatctcctgacctcgtgatccacccgcctcggcctcccaaagtgctgggattataggcatgagctaccgtgcccagccaaaactgtgggttttgtctgttaaaagttgtcacagacaacttggttttctattacatcatattgtactttaccaagaaactctgcctttaacatcgaattttgttgcttgtctactaacaaatgaatcctgattttccaattttttttacccctgcagtgcactgtttcttttggtcattggaacagcctatttggaagctcaaggaatatgggagccatttcgaaggcggctatcctttgaggcctcgaacccgcccttcgatgtgggaaggccatttgatctcaggagaatcgttggtatttcatctgaaggaaagtatgttcacatgctggcaataaattccctagtgtacatagatttggctgataaaattacaataaaaaataagtttcttttcatctttgctcaggagaaaaaaaatcttaattctgattacttaataacaccctgtatggaactctgagtgacttagagctcatgctggatactgtgtttttattatattggtaagggttaaaatacttttagttagatcactgatggtaaattataaatgttcagatagaacagatgttagagagttgtagaaatttccctatttcttgctattttttccctagtgtagtttatatttatggtggctgtactgatgaagttgaagtttttttttaatattagattttgtaggttgctatttactgatctgcagttggtccctttttcagcttgaacacactcagctgtgaccccggtcacagtagggggttctgtggagcaggcggttcatcatcccgacccagtgccgggagtcataagcagtgtggcccatcggtccacccacacagcagtcacagcaatagaaactcagctgacgtggaaaacgtcagagccaaaaacagttcaagtacctctagtaggacttctgctcaagcagcttcttcacagtctgctaacaaaacaagcccccttgtcttagattcgaacacagtgactcaaggtcatacagcgggcagaaagtccaaaggggcaaagcagagccagcacggcagccagcaccatgcccacagcccgctggagcagcaccctcagcctcctctgccaccgccagtgcctcagccccaggagccgcagcctgaaaggctgtctcccgcccccctcgcacacccttcccacccagaacgtgccagcagcgcgaggcacagttccgaggactcggacatcaccagtctcatagaagccatggacaaagacttcgaccaccatgactccccagccctagaagtgtttacagagcagcctccatcgccattgccaaaaagcaaaggtaatcatctcccactgccggagatccgtgatgtgtgagggaaaagccagtgcgtgcttaaggagctattaagattatagttgtggtaaacaactaattcagtaggttcctctggctcagatttatctccagtgttggacttcaacttttccataaaaatgcaattagaggtatctgtc

SEQ ID NO: 24093 - DNA, 2300 bp, Homo sapien
actttacaaagttgttgcagaggaattcctgatgacaggtttgcaaactaaaacaaccactttggaaaactatatgcattatctattaaaatggaagatacacatactctatgacagtggtccccaacatttctggcaccagggactggtttcatggaagacaatttttccatggatggggggttagcgggatggtttcagaataatactgttccacctgaaatcatcaggcactagttagattctcctaaggcacgcgcacaacctagatctctcatgtgcagttcacaatagggtttgcactcctatgagaatctaatgccaccactgatctgacaggaggctgagctcaggaggtaatgttcacttcttcacccaccacctgctgtgcagccctgttcctaacaggccacagaccggtactggtccatggcatgggggttggggatccctactctatgacccaacaactgcattctaatccctcagaaaaaaatcatttgaacacatatattatgttcaccaagagacagcattattcttaacagcaaaaaacaagaagcaaccaaaatacacataaacagcagaaataatacataaattggggcatatccatacaatgcaacactattcagcaatgaaactgaagtaactacagttacactcaacacataatgctgtgaatcttagaaacataatgctgagaaaaaggagccagaaaaaaaaaatacaaactgtatgaacttcaaaaaatatgtgaccctgtagtatttagagatatacactcagatgttaaaattacagggaaaggcaattattataaaattctggaaaatggctaactttatgggtagtaactaggagagagcttgaggggaaactttggagggtaatggcctgtttttagtttttaatctgggtggtggttacacaggtatttgccttgcattccctccccaaatttaagcatctatatgtaaattatatctcacaataaacactttaaagaaaaaaaataaatgaatcaaaatcgtatactctttgcaagaaggctcaatataggttctctaattaagtggttagaattccatttataaaacatggcttttgccaggcacagtggctcacacctgtaatcccagcattttgggaggccaaagcaggtggatcacttggggtcaggagttcgagaccaacctggccaacatggtgaaactctgtctctactaaaactacaaaagttagctgggtgttgtggcacacgcctgtaatcctggtggctgaggcaagagaactgctggaacccaggaggcagaggctgcaatgagctgagattgctcactgcactccagcctgggtgacagagcgagactccatctcaaaaaaagtaaataaataaaaataaaataaaacaggactttaagttttaaaagacaaaattctgccaggcatagtggctcaggtctataatcctagcattttgggaggctgagatgggaggactgcttgagcccaggagtttgagaccagcctgggcaacatagtgagaacctacctctataaaaaatgaataattagccagatgtggtggcatgtgcctgtagtccccgctacttgagaggctgagggaggagggtcacttgagcctgggaggttgagacaacagtgagccatgattgtgccactggcctccagcatgggtaacagagcaagacactgtctttttttttaaaaaaaaaaaaaaaaaaaaaaaaagacaaaattctgtttgtgttttcaactcacaaacattctagagcttgctttccaaaattttaaaattctatttattattctggcaggatagtgaaaaaaatacagagctagcttttttcctgacctttatcttcatataaaaaagttagattaggccgggcgcagtggcctaatccccgcacttggggaggctgaggcgggtggatcacgaggtcaggagattgagaccatcctggctaacacggtgaaaccccgtctctactaaaaatacaaaaaattagtcgggcttggtagcgggtgcctgtagtcccagctactcaagaggctgaggcaggagaatggcgtgaacccaggaggcagagcttgcagtgagccgagactgcgccaccgcgctccagcctgggtgacagagcgagaccccatctcaaaaaaaaaaaagttagattagaggccgagcatggtgactcacatctgtaatcccagcactttgggagaccaaggcgagaagatggcttgaggctaggaattcaaggccagcctgggca

SEQ ID NO: 24094 - DNA, 2300 bp, Homo sapien
gagctgctgagcctcaggctaaccaggggatgtggctgattgctgtgtaagagaacctcagcacttcatggttggaaaggcttgtttgtcctgaatctggccatgggggaagggctgctgacttgcagagctagcacgttggaggctaagcaaaagcgctcagttacatatccttgggtttgatctcttccgtgagtcaaaagccttccagaaatctcttgcctcagacattttaaacgccaacttaagagataattattcctatttcattacatcaaaataaaatttgactactcaattttaaggctaatattcaaaaaagtaaaattgcttatgattaattttttgagacggagttttgctcttgtcgagggtatagtgcagtggcgctatcttggctcactgcaacctccacctgccgggttcaagcgtttttcctgcctccggagtagctgggattacaggcatgcactaccacgcccggctaatttttatattttttagtagagacgggttttcaccatgttggccaggctggtctcgaactcctgacctcaggtgatccgcccaccttggcctaccaaagtgctgggattacaggcgtgagccactgcgccctgccctaaaattgctttttaaaatcattaggctaaggtcatatttaaatatatattaatttatgaataaatttaagtgcttgcttgacacaggggactacttcatagagtagattctggagttccttttgtctttctgaaaccttattttcctatctagcttgttctgagacgtactgtgggcagacttggccttacacatatatcgactcactcaacaaatacagctaaggaaagtaaaatgtctctgggctacaagctgggaggaagttactaagatgagtaaagaaggaccccctccaagagcttaaattaagtcttggagacaacagccatgcgcaccaagaagctcaacctaagatgaaaagggcatctaagaggcgcgagatggctcgtgaaggtaacagacgtcttaagaatttttccgggcccagcacagtggctcacgcctgtgatcccagcactctggaaggccgaggaaggcggactgcttgagcccaggagttcgagacctgctcggccaacatagtgagacagcgtttcttaaaagaaaaagaaaaattggcgtggcgtggtggcgggtgcctgtagtcccagaccgcaccactgcactccagcctgggcggcagaaccagaccctgtctcaaaaataaataaataattaaaaaataaagaaaagaaaaaaaagaattcttcctcgagagaggaagccggctactggatattctaaagagcagtctgtttgcccctgccttctccatccagagtcaccgacgctttctgcacacgaggtgttccgcgccaatgtgggcacaagccaaggcaagaggactccatcaagctcctcctgggtaccatgatttggaagacccaaggatgagttcagcgggccaccatcctcaaggaagcaccatcaagaactgagtcaggcccggggtattctcgacgtcaaagcggtcgagaggtgggggtgccaccaggaagagtcactggaacggaccttccgcgctcgtctcgcggtctgtatgcgcactcacacccctggaaggctctaccactgtaggacagagcacggaggattgcccaggcgccggagaagaggttagcgccccgcaactccgcccctgccccgcccacgcaacgcggcggctgcgcggcgaggccgccccgtctccacgtgattgccgacaccgcctccgcgaagcagaagccgccatcataagtcctggcagctggacctgggcctgcctccctccttctcctgcgccaggtagcggtaacgggctggggttgttctgtcctggttctgtctggccgtgaagccgcaggcctccgagagcgggacgaggaggtggggcccagggggctccggggcggacagactgaccgccggacagcccaggtgtcggcacagcgtgggcggtgcccagagccgcgccccgcccctcgcaggccagcgctcagggctcgcgggccgtgcccgtttccagtatggccgcccgccgcgcctgacccgcggcctctccgctccgactgcttgtaggcgatgcccaggcaaagaccgtgactgacactctcgctcacacgcacgcacggacccaggcccacgctcggagatcgagccccgggctcgcaaccgttgtcgctcccggcgccgcggccagagcccggaccacggcttcc

SEQ ID NO: 24095 - DNA, 2300 bp, Homo sapien
aaggcttgtacatggttgccaagagtgtggtactggcaagcaatgctttgagactgtacaggtagagagaagttattagggccgcagcatccatgggagggctttggggagagagagaagagctagagctgaccctgaagggacggtgattcccaaactgtggtaatctgggtggcctgagtaaagtcatctgtgctcagaggcagggaccaggtgggtctctctgggatgggggtttgtgttggaggcaatgagcaaaagtctgaaagtataatttgagcccttaatggtaaagtccagaagtttgacatcaaagatggcagtgatttgatcaatgtcgcttactgaggtttaaggaaagatacaaattatctgtaaaaatgtaaactcaaaacaaatttgtcaaaagttcagtatagtagtgtatcaccactgtgctaaaggttttcttatttcaaataactcaataaaaatgaggcaaaccattctgtaactagctaaactgaagtccataccaactatttaatgcttcaaaataaccttaaacttctactcacttatcattctacaatttaagtaagtaatgtttcacattttcaacagaatgtatgcttatagacacataaacacgaaagatagggacagatcatcttggtgacttgcacgtatgtggcaagtgtcctagggaaaggagcaggcatggggtgaaggtgggaacaagagtgcctggcgtgaccatgtgaggcagggcatttggctatgtgttgctgtgtgctctgtctcacccccgtgacccaagaatattagtgtggcagggtgtggacagcaaggattaatgggtcattggcaaacatgggcgaggctggtgttttactcccttctgaacagtcttcagtactatcaagcttttgcttgttttttggtggtgtggatggcaggtttcatttgcagggccaaatatatataaactaataactgccaggaatgatttgtgatatggaatgaaatctttcagtactttttaaatgatagaggcattaaaagaatgcaggagaaataaattcctgtggatgaagcagactttttttggggggacagaattactcagttctaacattaactatgttttattagttctttgaaaaacctgcaaatgatctggtcagttctataattttaaaatctaaaatcgtttactatcccaataccctaaaaacaatacttactgtggggtcttttattaagactttaaagatacttttcataagcacaattttatttcctggtgactggaaaaataggaaaatatttagagccttttgcttaattgataaggtaacactgaaacaaaggttaaaaacaaagctgaatggagaaaataatgcctatagaaatattcatgtcaaacaggtaagaatattcttggcaactgcagcccctgcctccacaattgcaaaattgcagctccctgtcccttctgtctgtctcagctccgcccacgtccagtggctgagctacaacgaactgccccacctcttttaaagcgtctttctctgaactgtgcaaggaagagagcatcgcctgacagtggtgaggtgaaaattaaaactacacaggggtcaatgctctgctgaaaagtatgaaaagaagttcgtttgtagcgtttcccgcagtctcctcgcctctcctcggcctctggcgccttcctcccctgtctgctcgcaccctatatttctaccccagctcatcagtgtatttgtttgttaattcattcattctttcattcatattctccgctgttgttaattttcccattgacagtaggcgcaaggggcaacgccactcgccctgtccctctagcgtggcctctgtttgggggtctggggtggaggtcgtcccggcccgggtggttccggacgccggctttccgcacctggctcggtgacggcctcggcgccccgccctcttggccacggtccgcagccatcgccccagtgagggcgcggtctgtgggcggggccggctccaggagccgcgctgtgattggccgtgtccaggcaaccgcggagacgccgtcgtcaacagaccgcgctcggaaccagaggcgcgggtcacagagacctagaacagctggaatccttcgcccccggcgcgcagccttcgcccgccggaatcgctgccttatccaccagcgggatgcttacctcgcccgccctctcgggtcaggcgggcccgggaggatgggagggtggctgctgagcgggagccgccacgtcttccacccgacatattgcctagta

SEQ ID NO: 24096 - DNA, 2300 bp, Homo sapien
gcgcagtcgctgtgtttgggtgtagcatgtttgctctggcttacttctgtgggctttcgttccagtggcagtctcgttccctgagccatcttgtgctgctggggcccctcaattcctgtttggtgctgtctgcaggggtggaaggcatgtccctgggctgcctgctgttgctgggtgaccttctgggatggggagcagaccacagattaaaaatacaggaaatataagcccttagcctagtaagtactcaatagttgttgttttatgattaacattactcccatcgttttcctggcccctctcctcctatgggctttacagttatggaattacttgctgaatcctgaacaagaaaggagtctggagcgtgcagcatccttctgtggtttcctgcctatcctactcatcctttaagagtcttccctgctgtctcccctagaagatgtatttagcaactcactcagctagagtaagatgcatcctacgctgggcatgaacttttacagcttttggcacagtgttaggtcgtcatattctaggcatccaacaccatcctatgaacccccttcaaggcacagaattttgtctggttttgtaggttatgtctcagatctatcaaaatgtctggcacgtggtacttatgtgcttactaagtatctattgaaatgaaagggagtaaagctgatgaaggagccttaggtgagagcagctggatgggtcaggtcatggggttccccatcatggctgagtctgagaaagtcttaatgggagagtgcccatggtatatggtgaggcctgagatgccttgggtggggtgggggctggatgtgttctggatctttgtcattccttaggctgtcagtctctgctcccttcttatcctgattcttgggatgggggcagagtctgttcacctgtggaagttgaagggtctggcctcgctttagctagggtgtgggtaatgtgacccaggcaccgtcagtcagaataacctcctaggctttgacttgagagattgtgactccagatggcaggtccagcagagacaaacttggcagtagtggcagatgcacaccgatgcagctcctggggtggcagtggcagtgagctctggtccatctcttgtcaatactcccagtgccagcgaggaaagccacagcatccagcgctctgcagtggaactgcagcggggcccccaccaggcagccctgcagcaggattgggggtctcgttcctgatgagaggtcccaacccaggttatcctgtccattggtgatgctgtgagccatcccaatgtcctttatcataaattccttcctgtttgaatcaaccacagttggttttcttgcttacaactgaagctggagtgatacaacggaactgagatgagggggatgttgaaggaggcttttggacagttcaaagtcctgtatctctactgatggtcccttggtaaggatcatttttgcatattaaggagagtacattccataaattaatatgtatctaaaaatccattcctttctatattgatgaagtattcaagagattttctaagtgtttactacgatttgagagattgctaaaaacagaacttgtcaggtaatgttagatatgcccacatgtacattgttagattgctaaggataccacactcacgtttaccaaatattgggtatcatgaataaatcctggtttgaaaccattatgatgccacagtgtatttaggctgcatgtttaagctctgttgacagacgagtgagcagtaactgagttagcatctcatgtagaaacacaaaaaaataaaattgcattaagagctctgtcaagacaggaaatccacagtcctgacttctagcagtccttggactgcccggaaagagacttttaggcataccctgcgatatgtttcttggaatcactggggttaaactattatctcaatgtaattatttatctttcatctcataggtactttttcttcttttttggaagcagaaaataaatacttgtttgtgaattcttttttgggattcaagtgtgtccttggtgtctcttttttccgtagattggaagctccacaaacaccctgagtgccctgaaaactgcttttgctgataaagaaacacaggcaatctaccttctgaccgatgggagacctgatcaggtacttaccagagctgggaacaaagagggcctcactgatgctctgaaagcaaatgctggaaatgggtctgggggaccttttcagctgccaccaaaaatctgtggacatatacttccttggcttagggactcag

SEQ ID NO: 24097 - DNA, 2300 bp, Homo sapien
atgtaattttttttttcttgagatggagtcttgctctgttgcccaggctggagtgcaatggtgtgatctctgttcactgcaacctctgtctcccgggttcaagcaattctcctgcctcagcctcccgagtagctgtgattacaggcacgcaccaccatgcctgactaatttttttgtatttttagtagagatggggtttcaccatattggccaagctggtcttgaactcttgaccttgtgatccacctgcctcgctcttccaaagtgctgggattacaggcaagagccaccatgtaatttacacttagtaacatactctcatgggtttatgaatgatcttactgacatgcgatttggccagctgttttgtggccctgctttcattttgttctatggagcctgcaggtgtttcagtttgaaaggcagacatttaagttttggcacttggccatttgcacaactgtaatatctataaagctgttgcacctacattcaaagattccctgtgtgggatttacacagctattacatttccattacacacatccaatcagaacctctccttggccaatctggtaggaagctctgggatatttactggaagaactgatttagttgaaaaacagtgaagttggagaattcagtcagagttgaacaatagataatcaccagtttcacactagtttctcaatttcaaaatgttttgtgattgcttttaaacacagctagaatgttgtcaggtggaattcgacctgttctactttaacaatcaatagctgtgggcacagttctgtattctgtgttcttaatttagcatatgttatgaacatttttccttacaatagccattttgggatgaattttagtgattacactaacattcagtaatataaattactacagtttaattattcctcccaattgggggcagtttacttggaattttgaagaatcctcattttcctgtatctctttgctatcccttagaacagttaacagtaaaaacaaaaaacatcaaaaaacgttgctaaatggtatttcaatttcaatttcaattcttttatcatttgtgaatagttttcttatgtaagctaaatatatctcttaagctgtttttcacattattcatatgtttaggaaacacctcttaaatagcacagttacatttcatcccatgtctcaactaccaagaattcaaatttggtggaatccaaacaattatgttttataatacgataaacttaaaaaaagttttgaatctcagccgttaatttatatatagttttagtgttttatttatttaataaatgattatttgggacatgttttgttctagaaactagtaatttcaaaggggaataaaggattataaagttttatgaagaggaaagacacacaacaaaactgcaattaaatacatttgtctataaaggaattgaataagaaattatgtagagtagtcagtgcctggcagagagtaaggataaatagtattatcactattgataatcactattgagtacagtggttgcttacagagtatttcatctcacagtggggagaattctaacagaatcagcccaaactggcctgttcatgcatcccagcaattccttctgccctttatggtcagtgactgtctctctgcaccctccatccccatctcgatcactacctctacctctctactagtcacaaccttgtcacatatggtgtaattattcatatcaatttgataaggcttctaggttaacctcaagagaattgaattaaagtaggtaataccttaagcctcccttaaatcaaatattatccagaagagtccctcgttagccagttatgcttgatttgcattataacagtaacaagtaaatatttcccaaggtgccaagaccaggtggttttattccctctcaaacagagctctcaatgtcttcattaacctcagctccctccccacttgctttcttacagaagccgggggtgccatgattctgccccccaagtccttatgagaatgccccttatgacctcatagtcacactaaatttgacatcataaagaaaacatttcctgtgatctccacgcagccaccatgttgtaaaaactaagatgtcagactcgaagtgtggggtatgactttatctttccctggatctgcatgtggagaggacggagagtgggtgcacacaagccaaatctgagctactatcacactgaagcacacaatggccacgaaaggcatgaggttgaaatccacaaaagagggaagtagaacactaagcagtgggtttttctta

SEQ ID NO: 24098 - DNA, 2300 bp, Homo sapien
acctcacagggaactcatgttccctgaatacatcctccctggtctagccagagtggcctgtacacacctgaccacattcctactgggctttagggtaaggcccaagctcctgggcacaacctgcaaagcctgttgtagcacctgccccactgcactgtcagatccttgagaacaggcttcgttttatttctctttatagctcctatgatcagccagaaactcactcattgttacataagtgaataaagtgtttaaaaatcaaaacaatgtttgatctattgagaaaaccagaatatttaaactcatagacttaaactatcaaacatcagagacaagtcaggaccctgctgagccgatggctgcccttttgtaactggcagagggttggccaaatgtgcatggccacaccaatggctcctgtctctgaccttcctttggatttggaattaactgagtcctggagtgagtccctgggctatttctagaaattgccatctttctccggagtggtctccactgacatctgacacacttaaacgatgtggctgctcaagagagcctgtgctaatctattttagagaaaccatcctcagaaatgcatcttccagtgaaagacttatccaaaaatcatggaactggccaatcacaccagccctgctctcacataggctttcttttcaatcacaggggcaccttccaatgtttgccaaagagaaaatgttcatgacctgatttctggcacaagtgtaactgcccaaggggttcaccttccccactgcctagacagagccaacttatcaagacaggggaattgcaacagagaaaaagtaattcacacagagctggctgtgcaggagaccagagttttattattactcaaatcactcttcccaaaactcagggatcagggtttttaaggataatttgttgggtagggggccagtgaatcggaagtgctgattggctggcttagggatgaaatcacagggagttgactctgttctcttatgctgagtcagttactgggtggaggccacagaactggttggtaggtcaaggtgtggccatccggttgttagaaatgtgaaaacctgaaaagacatctcaaaaggccgatcttaggctcacaatagtgacgttgcctttaacagtaactggggaagttgcgaatcttacgacctctggaataatggctgataatatttagaattccagcccctctcattctaacttggtggctgttgggcttttagttgttttacaaaaacagtttagctttgggaaagggctttaatttaaattataaattaaattccttcccaaggctagttcggcctacgcccaggaatgaataaggacaatttagaggttagaagcaagatggaattggttaggtcttatgtcgttcactgacataattttcttagttacaatttttcaagacgatttcacaaggattgtgccacattgacaggtggatctatctttcattggacaagctacttaacatctctgacgctcagtttattcatctttaaatgggaataaaaataataagtacctcacaaagttactgtaaggattaatgagatgaatcgtgtattgggtttagcattatattgtaaaggttttctgaatgtcacatatggtcctttttttacatgttgtcttaaagcaagatttgagggagcagtggaaataggtgccaaattataagataaaaataaggaaacaagaaaaccagggtcaagagggacactgcatcatctcaaagaatcatgagggcttcaccttccttatatcacataccaacttggcccttcatttatttattcattcactcattcagtacttaactctgagcatctcttcagcatggtagcataaacaaatgagtaaaagactttgtgccttatgctagaaagaagagcctggagatgtccaactaaaactcactgcagcaggaactacaagagacagcagagggtgtgcctgccagggcttgcaggggggccgcgtgcggtagcccttgcccttgatgagctgggtttgcagttactttcctgtcctgatgacgtgtctgctttgtgttcacattttagcaatcatctggggggctaaatgtgacaaaccgagaagatggccaagatcaacacccaatactcccacccctccaggacccacctcaaggtaaagacctcagaccgagatctcaatcgcgctgaaaatggcctcagcaggtaagatgggctaagatgggcttttcattttatgcctggctctggtcatttccacagctg

SEQ ID NO: 24099 - DNA, 2300 bp, Homo sapien
tgatgttatctaattcatttgccgcgaatgcaaataaatctggtctcaggatgtgccctcatgcaattagcaggaaccagactacgctaaaacgctgggccgactgcttggtgcctagagctccctgaggagctgctggtggcggcagaacacctccatccttgggattgcctccagatcttccaggcacacaggctgtgacagggcccccgcccagctgtcagctgccatcaccaccacccccatgccagcttctcgaatccaaggacctctgccacctcctcctgcaaccaacctaggtgcattggaacatgcatcctgcctttatagtatacagaatatgaagcgggcaagggaattgtagcttctggactgcagcagggtctctgacagggtcttttatgtgtacacaaatgagatgagagtgggtttcttatgagtataaggggagaattcaatcaggtggtttgaaaataaagagccatgcctatggtacagccatatggattacagcaatgtctctagtggcatgccacagggctcagtcctcagccatcctattaatttccttttcatctgtgccatatatgaaaatacagggcagcttcatggagtggatgacagcaagttttgaaatgggatggaataacattggaatctcggctgtaccacctggctatgggatctcggtgaagttgcttaacctttctgaactcccatttcctctcttacagggttgttgtgtggatgaaatgataaaatgtatgtggctggcatacagaaaagagccactgaatggcatgtggtttgtgtattttgtttgtgagtaggatggtgttgggaggaaaggtgagtgtgttctctgcataccaatgcttccaaaacatcgagttactcagatcagtgggaaggtccaatacttaattccaaaaaaaatcaattgcgcatacacaagccggggtcctctggctggcagcagcctgtgttacaggactgctttgggttttcgctgactgtagctggtgaccatcaaaaaccaccagaaacacacaaagcaataaagtcttcccagagtctgcccagtcaagcaagaccccaggaacttgctcacaggagaaggaccatgacaaggaagagacttgaccccaaggaggaattgctgggtgagctgggggttctggcctggaaacccagaagtcacacaggtcctggtcatggaaggtagaagacgaagctacctgactcccggtggttccagcagaaaacagcctcaatgtggggaggctgagagagggaagaatctgtgggcaggtggcgcagtcaagagacagcccaggcagaccggggcatgggagtgagctccctgttgctggaaaaggcagggaggaatctgtagaagaggagaagcaagcagcagcctggccaccgtgatgcaaggactctgacttctaatcaatcaccagggagagactgaagcttttccctggtattaattcttgcctccttgttaagaaggctaattgggttggaacaggtcatgtgatagaattaatttgtcttgcctgggctcctcaagactcatagactgaagtgcaaatccctagaggctaatgcctggctggcttttaatcaggctgatcaaacttcagccccaggaggtttaaaagaaaggaaaatattcccagacgcattcctagtcttattccaggcaattcaaccagactctgctggtgtgactggtggttgtatggagttacgggcacctgtcctttctggggtcacactttccacaatgggttgcacaaggggagtcaccacaccttacctctgccttgcaggagagagagcctagagtttggcaaaagggacgaggggaagtggagtctcatttgaaagcactgtacaaattatttgaactgcatgtggagagctaggccagttctgtgcaatattccagggcctccgtgttaaccagcgggttcccaggaagcctgccagacaagcccacaaacagctgcccaggcagtgtggctgcagcacacgcagtgggaagggaggctcagaaagacccctaaggagcgggtattcaatctagcctcagaagatgaaattcagtaggcgagaagtgttggaaccaaaatcctcgttctggagtcattttatggaagcagctgctttggcttgaaatggcaagccccgggacctctccccacccagtgctttgatgagggccaggccagcatgtactgccaccttcccgtcctttcacctagccctggacagtagctaccttccttgct

SEQ ID NO: 24100 - DNA, 2300 bp, Homo sapien
gcatgattcagttcccaagcttagcttttccctttggagtagtgagtttgggggtcccgagattttattttccttttacagtattaactaacacatggctcccttttctcttgataattttcattctacggtggaattagggcctcattctttgccacactgaaaatgtgattgatctttgaagattatccagaattacataacagtcaagtgacagatgttattggaagctgatcctcattcagtgttactgtactaaatgaatgaatactgaaattagactgatatctatttttaaatctttataaatttaatttttttttcttttttaaaagttagtgtttaacaactttcttagcttgattatgactgccaggcgtggtggctcacgcctgtaattccagcaccttgggaggccgaggcgggtggatcacctgaggtcaggagttcaagaccagcctgaccaacatggagaaaccctgtctctactaaaaatacaaatttagccagggtggtggcacatgcctgtaatcccagctacttgggaggctgaggcaggagaattgcttgaacctgggaggcagaggttgcggtgagccgagatcgcgccattgcattccagcctaggcaaaaagagcgaaactccatcccaaaaataaataaataaacagcatggccataaaatttattgtttgaacaggaatacatttgagagtgaaagagggccctattaataattttgctgcaaaaagatgtaaactggggctgttccaagcaaactaattggtcacagtaattaaaaaaaatgcaaaaatatttttgcatttctacaaatttgattttcttggctttaactttgtactgtggagtcaaggttctgtcaatatttctttccatttagctggagaaataataagagggaactgttttattactaagttacttttcagaagagaaataaaataaaaagtaaagaaataaaaatttaaaactaggacattttctttttcttttttcttttcttttcttttcttttttttttttttttttttagagatacagggtgttgctctgtctcccaggctgacactgcagcctcaaattcctctgctcaatcgatgctcctgcctcaggctccccaaaaaactcgttttatatttgtttatttttattccagactattgtctgtattttggtgacatgaggaggatcagacataattctaaatgagttcagagaattcttaatttccattcctaactggttaatctcttttgtttttgaagcaaattatatgtttaaatgctctgcctgagaagtattctggtttattgaattaaaatcattttaagaatttttttttcggataaaatgtgaagactcaaagataaggatacattcagtccagtatttgcccttgctcaaggagaaatgctgttttaaagtcaaagtgaaaattttcttccaaaacttctgattattgtttttgtctatggaaaaatagaaacttggggcaaagtgtaaggactgatgctgttgcaagtctgttagtgcacacttatgcacacaggccagaacaggtccggaaggacatacacttagaggttagcaattttcttttttttgcaagtctgtattttcaaagaattaagattttaattttttgcttgtctggttggaatgttcagtttcctaaacatctcctggggagtgagtacgtctgcacttcaggaagtgctcttgtccggagggcaaaaggttgggggcgcatccccgggtcgcggctcctccaggaaactttcccttggggatccgtcagggcctcagatgcctcagtggatgacagggtgaagatgccatcgctcagtcaagtccagaagttcaagaactccttgcaggtgaagcagtcacaggatagggtgggatcttgtgggaacctagcagtaggaattggcgcgagcagctcggtcaccggccctactgtctcagagggcggacccagctcgggctggtagtggggcgggggtcgcagggcgcgggccgggccctcagcgcgcatgcgcgacaagggggcggggccagggcggggctgcgcccggcgtctagagcggcggcggctggctagggctgcggcgcgcgtggagggttcgctgctggtttgccgccgggtcgggctccgtgggccggggcaggaggaccagcacctgaggccgggcccgcagcccgcgacttcacagccaggcggcggcgctgctgctgctgcggggctctggcgcgcagcccggcgggacagcggggcg

SEQ ID NO: 24101 - DNA, 2300 bp, Homo sapien
cccgcacccagatcatttccagagccccggaagccctctcaccctccccagtcagtacccaccccttcaggataccactctccatactctggatgccacagattcgtttggcctgtgcttgaacttcgtatgaatggatttgcctagaatggtcttaacttttccccttgacgttgtttctgagactcatcccattgtttcatctgttctactgttgacgaacatttaggttgtctcaggtatcttgctactgtgaatgttgctgttctaaaccttctctacaggcttttggtgagcataagtgtgcgtttctgttagcagctccccctctgagttgtatgccaggtcacagggtaggtgcatgttcaacttaagtagagacggccagttttccagcgcgggtgactatttacgctctaccagtagtatcacttccagttactccacgtcctcatcaacacttggtactgttggtcttttgtcatttttgctattccagtgcttgtgcagaggtatctcatgggttcagtttgcatttccctgatgactaatggggttgaagaacttctcctgtgtctgttggctttattatgatcattttgatagccagataatagtgtgtcttatggatgttccagaacattcttttcttacctatagctgggcatttggattgctttattattataagtaatgctgcaataagcatttttacccagtagtcttttccatgttctatactattggcaagagttttgttatcatttacaaattttgataattaatgccagatggctttctgaatgtttgaactactctaagatggagtaacaatataggagagtcctagacagcttcccccaggtcctccagcaatgtgtattctcattgaagaacaaacaaaactcttttggaggacgaatttaggtgaaggaaagcatatttagcattgcgttacttaatgagtttggtcactttttcaaaatgtttaccatgtgtgttcctcatttataaattcctaccttttgccacttgcattttggtgagttttttgttaatgtgtacaaccattactgtaaaaagcagatattagtactgtaagcactttcctgttttaccagtcacattgcacattgcttcacttgtgtgccttttgacgttaaccagcaaatcttccccttggtgatttttattgtggctcccccaccaggccactgccgtgtctgcagagatgcccagactgaaggtccctgggcacccctagtgggagggataggagcatagcctgtgagagaaactgagtcagccctgggctaagcactctgctcttgcggtcatctgattccccgaccctggtgctttgagagggatggctcatgagctgagccctgccctgtggcctgccaaacagcccctgtggtgctgggactgagtggggcctgggggcccagcagcagcagcattgtgggaactcagtggagtttgcagagccctctcctgttcacgcacatttggttttcattgcagccccatgagatgggtgcagcccatccatcctgaagggcagggccttaagagggccctgcagcttctcccagggcctacagtttgtgagtggggaaactggtctcacattctcatccccctaaaccacacccagctgctcacctggctctttaggacaggcccagactcccccagcagatcagccctgcaggggagaggaatatgtgctttctctttctcatttattttgggtttgagcaaaacttgtatttttgagccagaaggttggattggggtgtggagctcaaacaaacatggagtagctcttggcctccacgtttctaggcattgcagtctctcagaaacttcatgtttgaccagcttgttaagttttcgctttcttatttttagatgatggatttggacatgcttctatgaagaaatgccacatggtccgagagcaaacatgtccagtaagttgtttggtgaattaacccaaggacaggagcccaggtccttcaggcacagggtgtggacaccctttgagaagatcagggctgtctctggaaatatgaagacctctgagagagtgttttaaactaggcttattgctcagtctaattatcttaacttgtaaaggttggttctttctagagacagcaggagttgtagcatatagggttggaaaaacctgaaacaccttctcgctgcttaatctagttctgagagcagagtgtgagctctggagctctgagccatgtgaagcgtgtgactcagcctgtggcagtgtttta

SEQ ID NO: 24102 - DNA, 2300 bp, Homo sapien
ggaaaagcaaagtctgtaccagctgtcccaaccataatctctgcctacagcattctagccaaacagctccgctttctatactggagagaccatgttccattcatcagtatttgttccctgaactggagcctggcgctccgtacatgtttgctgtatcaaccgctgcagaaagccagcttggaattctctgtgctgctgctattgtcctccacttggagtttctttcctcagtcctactcagtgtactttcttcccttgactactcatcaacatggccttccgatgctgaacgtctggataaaatccagtctcctcactctgacacacatacaggccttcacacctggctgcaaccttcccctcaggccttctgtcgcattcccctatggcaggacactagctcctctgcgccctcccacatctccctgcctctgcacttgctgttctttcagattttccccacaaccacaacagttcccactcctttacttgataaactactactcaacttttaagactcagctcaaatgtcatctcagaagattccaaattctgaagcaaaatcagacgctctcccttgggctaacgcatttttctcctcaagatctagtcattaaacacatgtttaataaatgcttacagtcttatggcaggaatttagacccttagatgtctatttctcccatgacaccaagcttacatgggtagtgactgttactgattcatcttcgttatcaccagtgtcaggtaccatgcctgccacttaagaggcatttaccaggagctggctgaacggcagcaccagtgagtaaggggcagaagggacacagccctggacaggggagcctgaaaacaacggtacttcagtttcctcatttatataaggaagttgggcgagataatctcttaaatttataataactcaagttttactagacattgggaggcgagaatggctgactgctaaaatcagtgaaccaaacaaattgtgactcggtagaaacactggtacagtcttacagtggatgtccatttgggggtaatcttttctctgaaataacagcaactttctgaaactacatcccccaatgcaaagacaattgcacacaattgaatgccctctcgtcgggcctctgcaattggaaaaggcacttgtgctttacttgagctctaatccagaactcaggtccactgtgaacctcactacatgtttcagtgcattccaagagggtgctgaggagacctgtgtctgtagccggggagtgaaggaagagtgtaggggaagcaagatacgaaatcgtgaaaatatggagttgccttatttttacaacttaacatccaagaatgcagagaactgtaactcagaaacaaattcacatcaacacaagtcaaactgagcacacattgtcacaactgaacaggcaggagacactactggccagggcagtgtaccaggtttacgcaactctctggaatcattaattctacagattatcatttctaggcaggcaagaaacctggcttattctcctttatgtctccaaagcctagtagagtgctagcattcaataaaggcttcgtgaactgaaatgggttaacctttacaaaaacccgacagggtgcgtttatcgttatctccgatttaaccccacagggaactggggctccgacagctcagtggatctgcgcacgttcagtgagcccgagctgtgacctacgcccgggatggttaactccaaccgccgccgcgggcgacccgctgccctccgccgagccaggcctgcctgggacaggggtcgtcaccaccgggagcgcccggccgcgctacctggaccacacagtccgactgcagcagacacgcgcccaggtcctccttcaggcccgcgcacgcgccgccctgcggcttgtcctcataatacttaggcatgacggcgcttcccctccgatgcggacgcgactttctcccaccgcaacacttgcaaccgggtcgggagcgagcgaggccccagtctcaggggaccggaagccagcggcaacaacttccggcgggccgcggcggtagggccgaggactacgggggccgagaggtggcgcgtccgcggcggaagtcggttcccgtgacgcggcgcgccccaagggccggctccgttgagggaagggaagcccgcccggtggcggctggggtcggctgctgggaggaggtggtgggctggttcggacgtgggtcgaggctgtagcaggactccaggtgaggcctgaggaccactctgccctcccgcggcccgggctcgcgccggggg

SEQ ID NO: 24103 - DNA, 2300 bp, Homo sapien
actgagagagttgaagtttcctgaggtgggcccttgccaggctgattcaccacggtggcctcagtatttagaacgccagtgtagagaaggcactaacatagtttaagtccagttaaggtgcaaaacaccctataaacttcaatatcttacccacttcaacaccctacaggtaaatgagacccttgcattatggaattggagaacttcagtttctcaggttcccatcaatacctttacaattctcactgtggatttgcctgtgaaatgcaatttccagtttcatattcctattcacagtcagctgacatttgggtaccgattcaagtacttaaaaagatatggagtgaatcttgtcccctgcttttcaatgtcctagggtaacagtttactctggcatctgcttgggacctgtagaaccaagactacaactttctttcctgtgagattttttgaggcttcagtaaaaaggagaaatagtttccaatatttccagattctgacccacaacacatttataacaaaaaatctaatcagaaacactcagcgttcaattctatctcagataaacacacttaccacagagccagatacttaacaggaccaagaaagcagggtcatctctggcccactggtccttcgtctgttttcgataatgaaaatttctgtaaactctctgtggggatgtgaacaggtagagcatctgccaggcagcaaattcaaagtccatttgccgaaagcggaaaagccttctcagatatttgtagcgtttcgctccggctgtgtgtcttgccgcatccctggaattcaagactccgttcccctgcactaaggaattcactgaagtactcggtaacatcttcctagatggaagaaaaacatttcttttacacgtattctgaagaaacatttggctaccgacactcctcttctgagttatttggcagggaggtcactttccatgttcttcccaaccctagagaaaggccaggagtcaaaagcaaatgcagttagttctgaggcgggtcttggggcttgggaaccgcagactgcaacctcaggcaagggcaacagcccacccttctgaatcacctaataacacttatccaggggcagctaccattacagagacagggatgatgtgactgccccatgactccgaggatagtgatagagccaagattggaaatctgactcgaaattccgtgctcttaaccaccaagcttttaagaaaatgcctaagaaagcagtttcagccggttagaacagtgttactgaagaggtcaaataaatggcctattcacacagatccatcagcgcactgccagcaagcttctcggtcactagaatgagattaaaaaaccaagaaaaactccgatccctagtgttttacatccggaatagttcagcagagggagcggtagcgtcggagtccaatccaaccggtccgagctccggggaacgccggccactgcccggctgcccgtctcccctccacttcgcaggccccccagacgccggcagggtctggccgagcccagctgctccctccctgcccggggccgcgggtacggctgccagatttagcaaataaaaacacagaatacccagctccatttggatttcagacaggccacgaataaggttttagtatgcctacatcccacgcaacatttcggacatgcttatactaaatgctctttctttatctacgatgcaaatgtaactgggcgtcctttcattttagccgcaactctatcgccggccgaggggccggacgccgacatggtcactgccaggccgcagcgacgtcaggccgcaagctgtcgggattaaatggcccccggcgcgagcccgggccgcgggagggcagagtggtcctcaggcctcacctggagtcctgctacagcctcgacccacgtccgaaccagcccaccacctcctcccagcagccgaccccagccgccaccgggcgggcttcccttccctcaacggagccggcccttggggcgcgccgcgtcacgggaaccgacttccgccgcggacgcgccacctctcggcccccgtagtcctcggccctaccgccgcggcccgccggaagttgttgccgctggcttccggtcccctgagactggggcctcgctcgctcccgacccggttgcaagtgttgcggtgggagaaagtcgcgtccgcatcggaggggaagcgccgtcatgcctaagtattatgaggacaagccgcagggcggcgcgtgcgcgggcctgaaggaggacctgggcgcgtgtctgctgcagtcggactgt

SEQ ID NO: 24104 - DNA, 2300 bp, Homo sapien
tcttgtcacttttctgacgacattttttggttttaagatggatgttattcctgatagcaagaaaagtggtacacagcatgttaccttttatggttcttggtccttatttttataggagagcctgttttagcttgtcattatagtggagttttatattgaactgtgtagaggaggcattatttcttaattccttctaaatgtgcctttggaaagaatacacttgtattgagtccctgctcaaggtgaacaactgtgtgcgtatttaattaacaaatcaaaatttgttattgacttaacattcaaagcaatcagactgcgtgatggtacagattatattttggtaagatttaggtaaatcacaatttacaaaaaacctatagtttaaaacatggttgatataagaacaaatatatttttgttttttaatttgtagtgagaaaaattatagctctgcctaattaagtaaattgtgaagtttttaaatatgcacttcttcatgaaaaatataaaagctgaatgaaagtagaaagaagggggaaagaaattacctgtgccctgtcaaaagacatctactagaaatattttggtgtattcctttcctgccttaactcagtgatattttatgtttgcttatctcggtgtatccaacaagtattgatttttattttgaaggaaaatttgagaatggtgttgcagaaggaatggtggatccaagtctcaatcccatttcagcctttcgactttcagttattcagaattctgctgtttgggccattcttaatgaggtaagcatatatcaaatcagtgaaacaacttagaaactacatttttattatgtttttattttgtatttaaggcctttttggaattgagaattaacagctttatcataccttttatgattttgtatttcagattcatattaaaaaagccaccaactgatcatctgagaaaccaacacattttttcctgtgaatttgttaattaaagatagttaagcatgtatcttttttttatttctacttgaacactacctcttgtgaagtctactgtagataagacgattgtcatttccacttggaaagtgaatctcccataataattgtatttgtttgaaactaagctgtcctcagattttaacttgactcaaacatttttcaattatgacagcctgttaatatgacttgtactattttggtattatactaatacataagagttgtacatattgttacattctttaaatttgagaaaaactaatgttacatacattttatgaagggggtacttttgaggttcacttattttactattatagaccctcttttatagattatcagggattatatatataaatatataaatatacataaaaatgttatggaattaatttattagaaacacttaagaagtacatatttttgtgcagtagatttttgaatcgatactttttttgaaaaccagtttccttgcttttttaagttctttctatatttttctttggaaatgcaaacattacaaaccaatgccatttttcaaatgcactgccatttaagattgattatagatggatttcttaattgaagtacttttataatcacagtgactgaacaaaatattttcaaagacatttgtcattccttaaagccaagattttaaagactaatgtccttcctgagggttactttactatactgtgtatggtgtatagccacagaaagtcagtctgataaattttcaatgtgtaagtgtgatgcattcaacccagattattgtagacttaacttattatatttcctctgatatgtaaaatgacaaactcttctttcctttttaatctttgtctttaatccatgaattaggtgcattatctgctgttgattcttttatatctgcactcattttatgacgtcagacaaaatgttttctaggtgttgctattgtatgagtcataattggtataattttaaagaaaattgtaatattgttttttggtgaaatatattattagtagtatattttccaaaatgattttattgtagtatgaactgataagtgagtcccgtgtccaagagactgtatttattactcttaaacacgctattccaaatgatattactactataaacaaagaatattaccggtctcagcaatcagtgatctttataaaagtacttttaaaaaatgatgaattatcaccaggcgctgtggctcacgcctgtaatcccagcactttgggaggccgaggcgggcggatcacgaggtcaggagatcaagaccatcctggctaacacggtgaa

SEQ ID NO: 24105 - DNA, 2300 bp, Homo sapien
tcatgttggccaggctggccttgaactcctgacctcgggtaatctgcctgcctcagcctcccaaagtgctaggattacaggcatgagccaccacacctggccactgtgaagattttaattctaaactgtagacgtgggcatgtttgatgttaacttgtcttaactgtagaaggtgaataagttcaatcttagagaacaatgataacttctgcatgagaatatttttagatctctttgtgttcaggtagtaaaagaggttaggtgcttctagaatattatgtggaaggtagagctgctgtctgagggttaacaggcatagtttggtggagggttgtggtgaggtattagccaaaagctacaggaagtggagatttgtttaaagttgtataaacatacactttgaaaatttccatgaattttgcaacttactccttagtagatcagtgtgtgttatataatttatttttttaatttacacttacagttgggtataattctgcagttttacctgatacttggagtatccctggaacttctcttcatattgccaggtgcaggaggcctcatttgagagggaaagtgtagcagctaagagcttggactttggagacaaacaaattcgagttctttctctggattcatttccttgtgtgtagaacagggttaataatgcctgcctcataggaacgattttgtgaagatttaaaccatgtggtggatcaggcacataggaaacatttcataagttgtagtggctgtcattattagtactatgcccctgtgatctttctttactagggggaatttctagtagtgttcagtgttaagaagcagtggtggtggcaatttctgaattgcctgcaaatggctgcttgaatcggttgtgctcttccccagagagaattttcccttggaactgctggccatttttcgaggtatattaactcccccactacagtgtcagtatattaccaggtgcatcctgtggcacctcctgaggctaccaggaatctgttcacatcttggagggcctggcgtgcctccagggattgagactgaccatgcatagagtggactggaaccagtagctggctggttttgttgttgttcaattaaccaaaaaagtttggtttttagtacagttgacattttttgagaacctattatatgctgaatgctgtgcttaagtacttctaagacttcatttctttcccttttcccaacagctttgttcgatcagtggtgatttcccagatttcttgatttaaagcaatgcagagtgatagagcctaaggtgtacagtatcctggctggattgctgcattttctaaatgcttaaatagttccagtttacaccctgggagtgggttagtcactggaaaaacgacatttattttatgacagtgataaacagcagttataactgtaaccttttaataatttatgacaatatgtgaaagaggacacaggacagattgttacctcattttgtgaatgaaaccttgagacctagataagtggcatgccccaaatcatgtaagtaatgacagagctgggtcaagggtccaggtcttttgacccttatatattgtattctgtcaattttcttattaaaaaaatttcctattattgtgcaataggaaaactggagagagtgaagattatgttactcaggaaccattgtgtgatcattagagttctcatcttggaatctgtgagctccacttttccctttaaaatcagtcaccataactttctttttacagacaaaacaaaaccaatgaggagggaatatagtttgaagctgttttgtatttttttccaggaggagaaggaccatataattccagtatgttaaatgagtagtttcgatgtagggataatctttatagatgcaatttagccctgccaaaagtctgtttataatgatgaatagtaaatgaagaaacttacattttgcattaccgaatgagcttgactttctcttttcccctgaataggaagggaaaaggccgaggcatcagcgtgtgaagaccgcaaagacgatcccgagtacagttgtgaacagcattgctgctaggctcctcctgcagatcatctgaaatgaacctctcttattgatttttattggcctagagccaggagtactgcattcagttgactttcagggtaaaaagaaaacagtcctggttgttgtcatcataaacatatggaccagtgtgatggtgaaatgagatgaggctccgcaatggaactgtagccactgctttagcatttatcacttccttccttactttgtc

SEQ ID NO: 24106 - DNA, 2300 bp, Homo sapien
agtttgcttgtctgtcattaagagcactgtaatagcaaagcctagaatcatctattcctaggagatattttaggcaggatatatccaacaatgtattaaaagctttaccttggaatggtctcagtctttacctctgtttacatctggtcatgaatcaaattgccagcttgctacttggcaatggctttgtcatagaatacaggaaacctggctttcaggtccccaatgtattcgtccgttttcatgctgctgataaagacatacccaagactgggcaacggacaaaagaggttcaatggagttacagttccacatggcaggggaggcctcacaatcatggtggaaggcaaggaggagcaagtcacttcttacatggatggtggcaggcaaagagagtttgtgcagcaaaactcccttttttaaaaccatcagatttcgtgagacttattcactatcacgagaacagcatgggaaagaccctcccccatgattcaattacctcccaccaggttcctcccaccacacaggaattgtgggatttacaattcaagatgatatttgggtggggacacagccaaaccggaagtagagagaaaacacactcaaagtagagggaagagctgtcattggatatcatggctgtgatcccccaagttgtgtccacagtgctgggcagtggacagatcttttggtatggttcccctaaactagtaagagactatgggagcagggatgttacgtgtctcttcctgaagttttaaattagccgtcatggagaaacctcaacatgggaaggctgataactccatgcatgttctagctgattattaattattcttatcttgagataaaaataatggaatttatcggaggtggggaggggaccctgttctgattgatgcctcttaagagttttcgattattgaaattactgttttctgaaaagaatctacttattactttgggagtttggcaggaacaaggctgcctccttgatctttggcccctcaattcccttacaggttactcggtaggattgctgtaaggattattgcggcaataaagttaacacatcccttgtttttgaaccattaccagctgtgtgaccttgggcaagccctttcacctctcagctagtttcctcttatgaaaaatggggaataaatttaaaacatgagatatgcaataaacgatctaacacccatgcctgctatacggttgcctgctatacagttaagtattcaaaagaggacgtacccaggggtagttactgttagcacaagtcctatggatactatgaaaaacagggacagaccacccaggctttctacaaacgagtcagttttttgcctttgaagttaacctctaaccttgtgaaacggcgacagataaggacatggggttcaagaaaacggggcatagtggaaaatcaggggcattagcacccaacgatgtgcgttgaaaccctagttgtttttctccttcccagttgctgaaatcagcccttctggccgattcgcggggttctcaccgggaagttggggctgtcgcgaccgtccgcggggcctcgggagctcctgtggggctgggcccgggacctgtccccggggaggccgcccagtttgggcggcccggagcggggcgcgccgctgggaaggggccgggtcgaggcaggcaggcgcctgggagctggggcagccccgggtggtcgggtcgcgcgccgaggcgcaggccgagggctcgcccgggcctttgttggccgccggagcggtccctgcacgcgccgggaggatctcagccagatgtggcagcggggcggcggggagcaggccggcgcccagagctgggacccgagaccgcggctccgctccggacctcgccgtgacaccgatgagccgggccagcctcccgaacgctccgcaggctgcgtggcggcgcccctaagtgacagtcgcgcgggccactggtggggcgcggggcgcggggcgcggggcccgcggggccggccaatggctggcggggtcggggcggcccggcggggcggggcggggcgggcgctccagcggcgggggcggagccggcggggcgggcggggcggcccgcagcggcggcggcagcggcggcggcggctacagcagctccgccggcagccgcgggagcacggcgacgccagcggcgggtgaggggctcgcggcggcagcggcggcgcgcgggggcgggagggggcgcggggcggctgcgcggagggcgcgggagttgggggcggcgccggcggccgggctggcggccccgggctgcgg

SEQ ID NO: 24107 - DNA, 2300 bp, Homo sapien
agaaacactatgtggggtctatgtttcttttgcacttttgacaaatccttacttgaacattttagtcttttcttaacctggcttcaaggcttgatccaaaaggcattaaggaggggaagagcctccttgactgccagccacttggcagggccctgggaaccagagctctcacaggaagatgaaagtcccaggggtaggggaggggcacagtttctttccacatttttaaagcatgaaggtgcttgctctaccaggctccagataattttccattttcccaacctattcacaaaattccccaccagtttctattttgagtgttgacaccatgttctcggccttaactaatcaccaggaacctcggtttttgtcttctgaaaacctccaggaacttcaaaagccacccacagaatacaaataaagccagaggtttaagatattctggaaacgaaattcttaggtagaaaggcagtttatggagtccataaatatttagtagttacagcggcaaaaactaacatgattttgaagagcaaggagcagaggctcaaggtgggagaggagagaggggagtatagtttttgcagttgttcagtttagtttgaggattttgaaaaaaacaaacacacagacacccaacaaactcgttgtctctgattgtcatgagtcacccattcattgtgaatgcaggttattaatttgggggggggttataaggctgaatcactatttttgttctttttatacagggaacttaaagcacttaaccatcaaaagaggcttttacgtgaatagcttgtggccaagggataacattaaaaattcaaaaaggaaacttcgtttgatatgcccaagtaaatgggaaactgtcttgggcctcgtttcgctcgattcttctatctgggattttgagccccttgaaagccacaggtggagagagctccttccggggtccaggccctctcggcctccgacagccgagcagctcggcttttccaggcctccagtgtgcgcggcgctagccgtcggacccagcgtcccgcggagtagcgcggattccgcgtgatcccctccaaacaatgcggacctcgccgctcattctggcgtccggtgacacccgagactccccgtctgacgttagtatcatctcttccagcctgggttgaaggcgtcccctgaggactcgtcgcagcctgggctccctgctgggacgcgactcccgcgcctctcgcctgcctggccctgggcgtgcaccgccggggaagaggccgggacggggtcgccgggctgtgccatccgcagaccaaagccgcggctcgggctccggaggagattcgctgggcgaccacccaaggcagctccctccgtgcgcggtctccctaaatggaccagccctgtctttacaagaaaaaggattttaaaaaaagaagaaagaaagaaaataaagaaaggcgagcgcagctgagacggcatcagctgcctttcttcccacactcgccggtgtcacacccatgaatcacctccagacggggcggcagcttccctaattagcctggagacgctcaggacccacagggttataaaacaacaacaataacaaacttttacttttattcaaatgcacacttccttccctcggcgcccacgcccgccgcaggccactgacttagagggcggatccggaggtcacctggagtcccgggtccctctcaccgacgcgcgcgggtgccctgggccagtcccggactgacttgccaccacctccgggtctccggtgccccccggccctcccggagccccgacagcgccgctgcgcggacaggccgaggcgggtcgggagcggcgcgggcttgggagggagcgctgggcagccgggcccgcaccccgattgccctccccgcaccccgatcgccctcccgcctcccgcggggcgtccaaggcccaggccggcgcctgcgccccccgccccgaggtctcggccccactccgccgggccagctgcggaggcggcgttgggagctgtgcgccgcgggggaggtgcgcgcggcggccggcgaggggagctgagcggcgtccgcccccgccgagccgagcggagccgagcgaagccggcgcgcctgcagctgggagctgggagctgggagcgcgccgggcgcagggccgggccggccgcgggagggtagtgtcagcgcccgcgtccagctcttcggccgcagacccgggctgtctggaggccgcgcggccacctgctgcgtcgccccggctttgggctggggctagacgcgcaccgcggcgggagc

SEQ ID NO: 24108 - DNA, 2300 bp, Homo sapien
ttgtacacattggtgggaagaattgagggcggggaaggagaatataaaggggcagcagaagaatggtctcgttgtaatggaacagttctatatcttgaggtggtagttacagagatctgcacatgtgagaaaaatcatatagaacaccatgcacatggtgtatctgggtatgatatactatgttgtttatgacacaactatcagcggaaactgagtaaagggcgtatgagacttctctgtactacatttgcttcctgtgaatcttatttaaaaataaaaatttttaacaaaactaattgagtacctataatactggaaattttacttgagctcttatataatgtctaatgacaattctgcaaattctaggcattctgtccctttaacagaagaaactcaagagactctcatttattttttttcttaagtcaggtgcatcttctaggatcaagaaaatatggtaaattccccaattacataactggtaaagaactacaacaggatttaaacctaactctgccgaagtccagagcccatatcctttgtgttactccagactgcctcttctaaagtacttttgtcttggaattgagtaaaagtaaagttcatgagagaagggaggggagtgttcatttatattactaataatttgttttatttgcttacttaataatttgaggattatatgtgagatacgtaataaatgatgcagaaacaagtgatgtgttgatacagaaatgagacaatacagtcttttaagttgtttagaatctagtagaagggacagggaaataaatgattttaatgcatcttataaaatattgagataaacttatataagaggctttatgggcacacatactggaaaggagaagcaccaagaacatctcctggtgcagtgggaagttaacagacatttttagtgtgctcttgttgctgagaaacatggcataggaaaagccacgaacaaagatgaaaaacacaacttgaagtttatctgtttcacgtcctgtagtttgtctgtttgttttaaaagaaagtagctgaaataataagggtagggtaaaataagtaaacagtgaaagcctgggatgacaataacgaacagatcattgtacctagtttctgtgcatgttgctagaggtgggctttggattaagctttaaaatttctagaggcaaaggcaaatagaaatattagttaaataattaatgattgttagggtaagaacaaaccaggtttccaaaaaaggcacgtattttcctgaaattgaagcctaagtagggttttccttgaggattctcataaggagggttctttgataacacttcaatttcaagtgtgtacatttcaataactcccctaaaagaagtttttaaatgaatttaatgagattgttttttatagtgtgtctggtggtgggaagttaggttggacagctaagtcgagttggatcataaatggcattttaaaatttcattctcagtgtcatgaggcaacataaggttataggaatgacctcaaatttgcattttcgaagaatttttgagagcagatgggagaaggccaaaagagaagagagtaggagacactggattaaaataatgactttaattatgcctcttggtgggctatttactgggtacaataaatggcattgtagcatatttaaaaataattcatgacttaggatatttttatgtagtgacaacttataaagtttttttgaagacaactttgtttttaatggtttggaagacgataactctatagctgtttgaaaagggcaacctcagggcaagaataatgctagaactaagaggtcaggtatttagcaatttcagatgctccttacagactgaaacttctgtgtgcgagtgtttttttttgttgctgttgtttttaatgcatcttttacagggtactaacacagtatcttagacacaataggtgctcaataaatatttgttaaatacacaatgagagacaagtactatggaaaagaatttgtaccatgactttacctcgtagttatttttgttattgcacttaacatgttgtctttgtatttcctcaagtaaacaaagagttccctgagggcaggtatctaacctatctttgtatttttggaatttaatatagttcctgacataatcattgttcaatgggtctaattttttttttcctttaaaggcatttggatacctttgtgatagaaaaggcccttttcttcatccattgatggtttgatagtgggctgggaaggaaagctgtgttcctccacattaggcagcaaatac

SEQ ID NO: 24109 - DNA, 2300 bp, Homo sapien
agagtattttatataataaaaataagtggataaatattttgggaaacaatcagcaaactaaatactgcgagcaacaataaagattaatcttaaaaaaaatgttgagtaaagaagcaagatgtaaatgaatacttagtacaattccattcgaagttcaaaaacaagccaaactgtaatgtgcatgttcacatacaatgatgtgaaacattaaggaaaatcaaggaagtggctatcttagaagtcaggagagtggctatctctggggagggaaagaaatatgtaatctgaaaaggtgataaatagtaatacctctaactgcctctgtgtatggaggacttcaaaaccaaatcgtcctaaacaaactagtctaagcaactcaaaaagaagacagaaaagatctcccagagaatctctacacctgattatattctgggctacaggcagtgatttttcttcagaaggtaaacagtacgcgagatattgtggaagctgccattaaataatgccaaagtttaggatttaaaattaatatttaattaatgtaccgtcctagttatttcccactaattaagactgaagagtttggctcattaatcaattaaaatacaaacaagaatctgtcttatcctggaagcagattcgaatgcgacatcctacttctataactaacctgtttttttctacttacaaacctattgttattctacttatgtccttacacgtaaacaaagtatacttgaaatgctgaacaccagtacagaaaattttaaacaaggaaatctcctaggatataaggtcctggaatggaagaaggaaaacgttgggacactataatctatgcaaactttcccgaagctgcgaaaaaaaaaaagtgaaaaaaaaccatatttctgtgagtttttaggtatcaagtccatgatcacctagttatccaatttaagtctcaaatagtttttcaacaaaagccagctttccctgcctttactgtgtataatttttactaaaattatctgagattttcatgcaaatgcctatgtaatctcagcctttcaccaccccaagtctagaaagaggctcagaaatgagcgatcgggagtcaggctgaactcccaaatctgtgacttccaaattcctcggctccaccagagcttccagagcgtttctaaactgaacagtctccccaacaaccaagcggagagctgcgggaggacgcgaagcagtgaccataggaactgggctcaaacctaacctcccaagaaacaggggcaactcgtgctgccgagcttccggccggcagctgtgcccgccgctgcccctcacagccgctcccgctgctagcgcccaactccgcccgccacggccccgcacccgccactcctgcccgcttgcagccgccttctcagagaccttccagtccagtagcagcactctccccaccccgcgcacctccgcagcttctacctggagctccgggtccctccccgggctcctcggcccgccgtcctgcccagagctcatccccgcgactgtcagctctcggcctcagcgggggatacaagaaccgcccactctccatcctccgcccctttctcctcccttcccacccccaaatcgtcctggccccgccccggcggatcggaggaaggacggagcccgcgggaaggaggagggggcggttagcgccagccagtgccgccgtggccccgccctcacgctctgtaccggagtggggctcgtcttccacctccccggcgccccagctttgcttccgtcccgctcgcccccaggcccggtgcgcacgcgtacctggctcgaccttccttctcgcggggtctacaagccgtgcgcgcgctcctacgcacggagcgacgcgtacgtctacctgcctgccttacagggcacctaggagggaccccttcctggcccatccgcgccgcgcaggcgcacgcccacgcagcgcctagacgcccgagccgagcgtcccgtctcctagtaaccagccgctagcccccttttccacgactcatttcttaatctctgcctgaggctgccgcacctggatggaacgcgcatgcgcaaggctgtctctcgcagccccgccttccctcagcttgaaacacctgctgcttcgcggcggtggctttgtgccacttttcccagggcttgggcatcattctggacccatgttcggtgaaccggttactctcagagctgctttcgggcgcagctcctgctgcagccagggcccgttttaagagaggcttccaggtccagccctcccgctgcagcctgcagggagc

SEQ ID NO: 24110 - DNA, 2300 bp, Homo sapien
gaatggcatgaacccgggaggcggaggttgcagtgagccgagatcgtgccactgcactccagcctgggcgacagagtgagactctgtctcaaaaaaaaaaaaaaaaaaaaaaaaaaggtttagttggggcagggtgggacactcactaccccttgggtttccacagagggaaggaaatttttactttctcaggttaggggagaaagtcaacagttcttgataggaaaaaaaaggaaaatcttttcaccctcttttggccttaaaatgatcatttccttatattctttccaaataatcttcagtaccgtctaggtggcatacataagtgcttaaacttttcttattctttctataagggaagtactttcctacttcctatattaataatctccccacccccgaagtcttcaactccagctgatagttttaaacttagaacattctttcctatttgtttttaataatgctagataatgtattcaaaataatcttagtatctgaagaggaaatgagattatacattattccctctaacataacttctcagtttgttattttgtgcatttaaaaaattacatttccgaggatatgtgctccttgtgtcctctaacctcttaatctaaaataacagggacacttaattttttttggtatctaattatacttacaaagtatatgatatctgaaaataaatgcgacaaaatatgagaccatgtaataacacgatgaaaagacattggaaaaacatggcatttatattaaatgtatttttatgactaaatttgttctacacaaaagttgtttatccctgccaatgatatcttgtggggggaaaaatgagtactcacctggcgaaaacaggaattgttagtctcctcaaacgagagcttactcttgaaatacacagcgttctaccatatcaaggtcatcagagaattgctgtaaaaacctagtgtctatgtcatctgcaggaaaaggagataaagtcaccattatcatccagaagctcttgagttatttaagaagggacatggtaggtattaagaaaaattaagaagacttttttcccccccattctgggctccaaaaaattggtagaagaatgcagcgctcattctttttcactaaaaagctcatttgtcactttaaggtgaggggatttggaaaaggactggcatgtggagaaggaatatcggtcaggaatctggactttgttgctagatctgccacttcctgattcagccctgatcgtgcagagctgaccaaggccgtggtccccaggctcccctgactccaggctgcccacgctcaccgggacaggccggctcgctccctgcaggctgcagcgggagggctggacctggaagcctctcttaaaacgggccctggctgcagcaggagctgcgcccgaaagcagctctgagagtaaccggttcaccgaacatgggtccagaatgatgcccaagccctgggaaaagtggcacaaagccaccgccgcgaagcagcaggtgtttcaagctgagggaaggcggggctgcgagagacagccttgcgcatgcgcgttccatccaggtgcggcagcctcaggcagagattaagaaatgagtcgtggaaaagggggctagcggctggttactaggagacgggacgctcggctcgggcgtctaggcgctgcgtgggcgtgcgcctgcgcggcgcggatgggccaggaaggggtccctcctaggtgccctgtaaggcaggcaggtagacgtacgcgtcgctccgtgcgtaggagcgcgcgcacggcttgtagaccccgcgagaaggaaggtcgagccaggtacgcgtgcgcaccgggcctgggggcgagcgggacggaagcaaagctggggcgccggggaggtggaagacgagccccactccggtacagagcgtgagggcggggccacggcggcactggctggcgctaaccgccccctcctccttcccgcgggctccgtccttcctccgatccgccggggcggggccaggacgatttgggggtgggaagggaggagaaaggggcggaggatggagagtgggcggttcttgtatcccccgctgaggccgagagctgacagtcgcggggatgagctctgggcaggacggcgggccgaggagcccggggagggacccggagctccaggtagaagctgcggaggtgcgcggggtggggagagtgctgctactggactggaaggtctctgagaaggcggctgcaagcgggcaggagtggcgggtgcggggccgtggcgggcggagttgggcgctagcagcgg

SEQ ID NO: 24111 - DNA, 2300 bp, Homo sapien
tggtgaaaccgcatctctacaaaaacatacaaaaattagctgggcatggtggcacatacctgtggtcccagctactcaaggggctaaggcaggagaactgcttcaacctgaaaggtggagggtgcagtgagctgagatcatgccaacgcactccagcctgggtacagggcaacagagtgagactctgtcttaaaaaaaaggaaaaaaaaaaaaagtctgggcgcagtggctcacacctgtaatcccagcactttgggaggctgaggcgggtggatcatgaggtcaggagatcaagaccatcctggctaacacagtgaaaccctgtctctactaaaaatacaaaaaacaaaaaacaaacaaaaaaaaagctgggcgtagtagtgggcgcctgtagtcctagctacttgggaggctgaggcaggagaatggcatgaacccgggaggcggaggttgcagtgagccgagatcgtgccactgcactccagcctgggcgacagagtgagactctgtctcaaaaaaaaaaaaaaaaaaaaaaaaaaggtttagttggggcagggtgggacactcactaccccttgggtttccacagagggaaggaaatttttactttctcaggttaggggagaaagtcaacagttcttgataggaaaaaaaaggaaaatcttttcaccctcttttggccttaaaatgatcatttccttatattctttccaaataatcttcagtaccgtctaggtggcatacataagtgcttaaacttttcttattctttctataagggaagtactttcctacttcctatattaataatctccccacccccgaagtcttcaactccagctgatagttttaaacttagaacattctttcctatttgtttttaataatgctagataatgtattcaaaataatcttagtatctgaagaggaaatgagattatacattattccctctaacataacttctcagtttgttattttgtgcatttaaaaaattacatttccgaggatatgtgctccttgtgtcctctaacctcttaatctaaaataacagggacacttaattttttttggtatctaattatacttacaaagtatatgatatctgaaaataaatgcgacaaaatatgagaccatgtaataacacgatgaaaagacattggaaaaacatggcatttatattaaatgtatttttatgactaaatttgttctacacaaaagttgtttatccctgccaatgatatcttgtggggggaaaaatgagtactcacctggcgaaaacaggaattgttagtctcctcaaacgagagcttactcttgaaatacacagcgttctaccatatcaaggtcatcagagaattgctgtaaaaacctagtgtctatgtcatctgcaggaaaaggagataaagtcaccattatcatccagaagctcttgagttatttaagaagggacatggtaggtattaagaaaaattaagaagacttttttcccccccattctgggctccaaaaaattggtagaagaatgcagcgctcattctttttcactaaaaagctcatttgtcactttaaggtgaggggatttggaaaaggactggcatgtggagaaggaatatcggtcaggaatctggactttgttgctagatctgccacttcctgattcagccctgatcgtgcagagctgaccaaggccgtggtccccaggctcccctgactccaggctgcccacgctcaccgggacaggccggctcgctccctgcaggctgcagcgggagggctggacctggaagcctctcttaaaacgggccctggctgcagcaggagctgcgcccgaaagcagctctgagagtaaccggttcaccgaacatgggtccagaatgatgcccaagccctgggaaaagtggcacaaagccaccgccgcgaagcagcaggtgtttcaagctgagggaaggcggggctgcgagagacagccttgcgcatgcgcgttccatccaggtgcggcagcctcaggcagagattaagaaatgagtcgtggaaaagggggctagcggctggttactaggagacgggacgctcggctcgggcgtctaggcgctgcgtgggcgtgcgcctgcgcggcgcggatgggccaggaaggggtccctcctaggtgccctgtaaggcaggcaggtagacgtacgcgtcgctccgtgcgtaggagcgcgcgcacggcttgtagaccccgcgagaaggaaggtcgagccaggtacgcgtgcgcaccgggcctgggggcgagcgggacggaagcaaagctggggcgc

SEQ ID NO: 24112 - DNA, 2300 bp, Homo sapien
tgagttcaggagcatggcttttagacttaccaggtttacaaggcagttgtatctatggaactaaaaaatataaattttgaagttgtatacagaaatggtacttagagccatagaatgaatgaaattgcttaaggaaaatgtagtgtgagataaagatctgaggaactccaacatttagggctgactagatcagggtagctggcaaaggggactgcggagttggcagtgaggctggaggaaaacctggcaaaagggactgaggagttgacagggtaatgtcaaagttgtccacaggaatctccaggttgaggtagtcaaatgaacacttagatgaatactgaaaagtccagtggatctagcaatatgaatgtcacccgtgaccttagcaaaagcacttttgctggaataatggggaaaagccattttggagtacgttgaaacaatgaatgggaagtgagaaagtagatactggatgtatagcagtttttccaagaagcttggctcagaagggtagcagacaggatgacaagtggaaagagaaatgaggtcactggaggattgttaaagagtacagcatgtttgagtgtcacttgaaaggttccagtggagaagctgaagaagtaggtaaaggtaagaataaccaagggacagaagtcctggagcagggaggagggaatgggattctttaaaacctcttcatcaagaaactaggaaaaaaaaccaaagttgtaccatctcagatttcagagaaagggaatttagaaggaagtaatataagcaaagagcaacaatattctgtgactgtttttaataataactaggaaaattcctagtgcagttaactctgaacaaaattcattcccacctgcataatacaagatagacttactcagagtgaccttggtaaaaggtgtgataataaagaaaggaggtgtcattatgtcttcattgtagctttatatgaagccctggtcatttaccgtatcagcatcagcaaactgaacactgaatgattcttactccaagaggcaagtcttagtggtttctattttaactgaaggagagattaatttctgtgcaaggttgaaaaaggtgaccacaaattctttgggcttctttcatcaagaggtgaagtccattaccccacgccttaactctgggctggctttgttgttgttttggccaatagaatatggctgaggcgctgcttccaagattaggcctgaattgagatgccctagcagccaggcagcacctgccagagcatgaataaggctatcttggaccgcccagcgtagccaacctgtgctgaatgaagccacatgaatatgcccaggagaaactagcagaagaatcacccaccttgcccacgttagagatataaaccactatttgaggcagtttgttatgcagcaaaacttagccgaaactattaccttgctaccttgactgctggtgtaatttcccatctcatggagtcacagagttttcttgccaactgcagtgagttggcaaatgggaatgatcagtagcctcagtgtgttttctgatccactccatcctgtattatcatctgcgaataccgtttttcctttaaatgcaatgtgtctttcaaagctgacttgaatttctcacctttcgagttacctgccatttggactcacttatttggaggagatatgtaaagacccagcgtaatacctgtatgctcaataaaaagtatttgctggtactccttcctgcccgtcgtgtgacctgactgctctgggcttctgggggctccccctaaactcgctccacgaaatgacccctccaacctggcacgcccgctctcctaccttcgcccagggctggccgttatctctgtgctgtcacgcggggaagtcccatctgaactggggccttatgaccttcggtacttttattcgaacgtagcctgcgtccctgcctggaacctggttcccgccctgaaggacccttacttagcactcctgcgggctgccgggaccccacggctccgcaggcggagagactaggcgcgatccctgcgcgcccctccttctcttgcgcttcagggggccggccctcagggggcggggcagcatcgcgcgcaaggcctgccggttgctcggggtcgtatgacgcacttttccagctcgagccctcacgaggccgtgggtacgaccggaagccgcaggtgggtgaagcggaaacgcttcaaaccgggatgttgcgggccgtagcgcgtgggcggccgtggggtcttgggcgcgcgcggtgtttctggcggtgggtcagga

SEQ ID NO: 24113 - DNA, 2300 bp, Homo sapien
atatgcataagccattcatgtttggcaaatatgaaatgttaactgttatgacagggttctccctttcccatctctattctgtgcttactgttcctatcatataccatgtattccctcaagtgaacaaagattcctaaccaagacacatcaaagtggcatttaccttgataaattaactatagtccaagatattgactttggtcaaaaatgtgatcttgttagggttccagaattgatccaattcatgtattgagccaatgcatgtattttaatagtgctaaaaatatctctcttcatccaggtattgtatatacagtgtgaataaaacacaacaaaggtattaattcaacaaagttttcatcaattacatgacagacattgttcttagcacttgggaatcatcagtgagtcaaatgaataaaggtgataaggagggctattaaaaaaagtagatggccgggcgaggtggttcacacctgtaatcccagcactttgggaggccaaggtggacagatcacctgaggtcaggagtttgagaccagcctggccaacatggtgaaaccccgtctctaccaaaaatacaaaaattacctgggcgtggtggcaggcgcctgtaatctcagctactcgggaggctgaggcaggagaatcgcttgaacccgggaggtggaggtttcagtgggccgagatgggctgggcaacagagcgagattcagtctattaaaaaaaaatgtagagctgataaagggaggattgtaactgtgtatgtgagaaaacttacattgcaattttaaatagggttgttaggctaagcctcattaaaaaggcatcatgtgagaaaagatgcaagaagctgttctaagcacctgaacacgtaaaccaataaacagacctcagtgaggatgtgacatttcagttgaaccccgaaagataagaaaaaatcacacagagtgagaaaaagtgaaaacaaagggatgtccaaaaatccctgactgccagcttattgatttacaaagagaactatagaccatctatcagatattcagatgagcctgtgcaattattcactgtaggtctggtgacaagccaactcttaagtttgcttggtgaatacataatcagaaaaggactgagttacatgatatgaacgtctgacggaatgggctctggggaagacacttccttaactcaggagagcccctgctcttaagccgggataccctctctcccctagagaaggcgtggattcatctggcacaggtgtgcccctctttttttattctatgctccagtagcggatcagaccccgactgagtaatgcacggtatttcaggatatttcacagtcgttgggatagtgtcaagcctttgaagttctggttaaattttgttccttcaaaatcactttgaatctttctactctcaccctttaatgactaattttttgaagtttttcctcggaagacttccttaccttccatgttcttgggacacttcgctacctctgcactgccaaacacggctccccatcactgaactgaaagcgaaaacagcacaatcccatctatctttctaggcaggcgcagcttcttcataagacctcgccaagaccctattattttgtcccctctctaatgatatacaacttactcagaatctcattacggtcgtgtgcatgttttacttcgcccttttggctcccagggggcgtgcacacagctagcgtccaacatgttttacgatatttaccctccctcctgtgttcgggatcaaccgttcctaacagtgaaattaggtcgtcccaagtgctgaggagaaagtgtgcacacaagaggcttcaacaccggcggaggcgacccgcaagtcctgacccaccgccagaaacaccgcgcgcgcccaagaccccacggccgcccacgcgctacggcccgcaacatcccggtttgaagcgtttccgcttcacccacctgcggcttccggtcgtacccacggcctcgtgagggctcgagctggaaaagtgcgtcatacgaccccgagcaaccggcaggccttgcgcgcgatgctgccccgccccctgagggccggccccctgaagcgcaagagaaggaggggcgcgcagggatcgcgcctagtctctccgcctgcggagccgtggggtcccggcagcccgcaggagtgctaagtaagggtccttcagggcgggaaccaggttccaggcagggacgcaggctacgttcgaataaaagtaccgaaggtcataaggccccagttcagatgggacttccccgcgtgacagcacag

SEQ ID NO: 24114 - DNA, 2300 bp, Homo sapien
acctttccaccctcacatgacctttaactgtttaaatcctcattgcgtttatctatagatatctctctcctggcacttattccctgtattagcgctatttgcattttggtcttaacccatctatgtgacatcattgtctctgtaacctctacgggatcagtgaagcaccctagagcagaactgtgattctcctgcttcagattcctagtgcagccaaaacttgagcagtgttccacctgaccaacacagtacaccatctctcttttgggattcagtataccagagtcgttggggccttgggctccgactgtgactctaccacctcctagtggcagaacttgaaagcgaacaatactttttatgctgtaaaacgagaataccatcaactcctacttgatagggcaattggtacggatgaaacgagatcatgcttttaatgttttctgcaatgcctggcactcagcactgaaacgtgatatctatgcttattgctgttgtcactgtcatcattatcatcaaataatgccccaggcaaggtagagtttacagttattttttcttttttttgagacggagtcttgttctattggcagactggagtgcagtggcgcgatctcggctcactgcaacctccgcctcccggattcaagcaattctcctgcctcagcctcccaagtggctgggactacaggtgcgtgccaccatgcccggctaatttttgtattttcagtagagacggggtttcaccatgttggccaggatggtctcgatctcttgacctcatgatccacctgcctcggcctcccaaaaaagtgctgggattacaggagtgagccaccgcgcccggccggtagagtttgtagttctgaccaaagcaccaaaccataaagggctcccctctgctgccccaaagcttctgtaacactttaattataagaagcttaaactagaaagaacagagggagcttagtccagaccgggagtgtcgggggttggggagcaggagctgatcttatcaatttaatacataaatattgagtgtctactgtgagccagggttgtgctgggtgttaaggaatatttgggtatttctcaacattgaataatacgaaaagtctcacttgtctcctccacaaccctgcgcatttctcacaccgaacctcatccgtttaagaaaaacttttcttcttctaccgctacataattttactttggcttgctttaaatgcaaatgtttaaacagaaaattaaaaataatcgtataataaacacccttattacccatcaccgaaatttttaaaattagcatttttgctcaaatagagcttcgatttttaagaaatttttgcttaaggaaaattaactaaagacatcatagcatctctttctaaaacactttggtctgcatctctaaaaattaaggaaagttttggaaaaaaaatcatattgcctaagaaaataattttaatgccccccaatctatattcaaacttttctaatagatccaaaaatgtcttttaaagttcgtacaaacccaggtcctatcaaagcttatatattacattgcgttatatcttatatctcttaagtcttttaaaatctagactagtagcctccccaccttttctaggtaacatcaatctattaaagatctaaaagaaagcggcccagttgtcctatagaatatcccaccttctgtatttaactgcttcttcgtggtgtggaaaaatcatttttaactctttcacttcaccccagacacagcaggaaccagctccttttcctcaggtcctccccgccttggctcattgctcacctttcagaacctgcaggagcagatcaatcccctcttggtaacacaccagagcctgcggataccgcgactccgaatctagttctactgcccgctttagcacagtggctgcagctgtgctctgcgggtcctgcctcagcccggacttcgccataattctggaagttctcctccgcctcaacccaggatgaagttgagcgggtctgctgcgcttccgggaagtggtcatgtgatacccaggcgcctgcgctctctttctagggactttcctgagtgggagggatttcgccggaacaaaaatgcctcagtttggaggtcgcgctcactgcgacggcaggctttgagtgtagcacttggtagttcttcctctgctctgcttcccttcggaggaaaatttcaggctgaaggtttagcgggtgccggtgagtggggaatgagtggcggagagtgcggcattcttcgcaaggtgtatccgggaaccctctgc

SEQ ID NO: 24115 - DNA, 2300 bp, Homo sapien
cctttgactgaccattccctctcctggaatgatcctgatatttacatggctaatttccttatctttttcaatttttgggtcaaatctcaccttttcaatgaggtcaacccagatcacatcatttaacattttcacccataccccaactgtcaacactcccaattcctcttcactgctttctatcgtgcttatcttctaacgtaacttaattatctgttaggttttgttgtttagtgcatgtacattcaatagcacgctaattccataggaaaagggtttttagattttgttgttttgggtctgttatattcatagaagtatcccaaacatctgtgtaaagcggtatctgccctatagcagacatataatatatttttgcagaataactgaagtttaaatatttacagacttctgaaggtgtgatagtcaaaagttacaagtttttagagacagagtctcgctatgtttctggtattgaactcagcctcaagcaatcctcaattttcccagtaattggagctaggtgtgtgtcaccacgtttgactcaaagaatacgtttattttatcttatttatttttttgagacggagtctcgctctgtcgcccaggctggagtgcagtggcacgatctgggttcactgcaagctccgcctcccgggttcacgccattctcctgcctcggcctccccagtagctgggactacaggcgcccgcccggacgcccggctaattttttgtatttttagtagagacggggtttcaccgtgttagccaggatggtctcgatctcctgacctcgtgatcctcccgcctcggcctccgaaagtgctgagattacaggcgtgagccaccacgcccggcaaggaatacgttttaataaagtaaaagttactgttaataattaggcacgtaactcctggaccctgaaacaattacgctgtcttctgtaaaacaggaaaatatcaggcatcacaggagaagtatgatcccatttctatttttttaaatgtctgtgaacgtgtgtaatcacagaaaaactctggaaggttgtcagaaaaacgttaacatacccctgggggtatgaaaaaaggcgtttttcctcccccttctcccccccagcgaccgatagttcttttgtctttttacaatgagcatgcatgcaacaggaatgttaaaaatcgatttctttttctaaaccgacaatgtatacaattattaaagggggaaaaacacttctgaaatgcaaaacatggaatcactcttgcagagataccagagatctctgaaagctggaagcgtgtctcttctctgaactcctagtgcctaacaagcagtaggcagccctcattactgcctcttggcaaaaagggcagaacaaacagcttttggtaggtctcgatcaaaatggtaacaaatcacagttttaataaaatggcaaatattctaactgccaactcttggatgtttgcattataaaatgaagcaatacaaagataaaggcaattttctgtcttcattaaaaaaaaaaaaaagcaaccttaatacccagtggcaaccctaagttatgaataaagcagcagcacagaaaatgctgcttgggttccctttcccaagctgtccagcctcggcggctccgttcttgagctccaagagtctgggcacaaaaagccgcgtggccctggatcctgcaaattgggaaacggggggatcctgcaggccaatggccttacgggagccaatgtgacgggatcaggggcagacccatttaggttgccgtaaccggccaattcagtacgcaatagggaaaatcaattaggatctgcagagggttcccggatacaccttgcgaagaatgccgcactctccgccactcattccccactcaccggcacccgctaaaccttcagcctgaaattttcctccgaagggaagcagagcagaggaagaactaccaagtgctacactcaaagcctgccgtcgcagtgagcgcgacctccaaactgaggcatttttgttccggcgaaatccctcccactcaggaaagtccctagaaagagagcgcaggcgcctgggtatcacatgaccacttcccggaagcgcagcagacccgctcaacttcatcctgggttgaggcggaggagaacttccagaattatggcgaagtccgggctgaggcaggacccgcagagcacagctgcagccactgtgctaaagcgggcagtagaactagattcggagtcgcggtatccgcaggctctggtgtgttaccaagaggggattgatctgctcctgcaggttct

SEQ ID NO: 24116 - DNA, 2300 bp, Homo sapien
caaacatttgacagatagtggtataaaaatctgtgagtggtgttatttttccagaccacggacaatgctttgtatccagattgatttggacctgttgcaatgattgctctgcagaggcatttgtccatcgtgctggcacttcgatacagtggaagagcatggattttggaatcttacaggcctagattcaaatcctggctctgtcacatgctaactgtgccatctttgacaagttacttagcttctctgagtcacagtttcctcatctctaaaataagggataatacctgcctcacagggccagtggaggattgagtcatataatatccataggaacctgactaatgttgggtgtcaaataaatgttcaattgttctctcacagcttgagtgaacagaacaatccacatcagtttgaaaacaattttggttgagttgcagaagcctggacattaaggacctcatacctagaaggactcgtagccccactaactgagagcagaaggataagtattcttcacattcaacagtgctttaaatgttttattaacaatgtcttcttccagtgcatgtagggagagccccagcctccacctactctcttttacctaacttatcattcgtaacttcttaatctccctttcttgagctttctcattgcacttagcctggaagcctcaggtaagtggctctactcaccctgcagtgaagtgggtcacgggcacaatgtcgctgggtcatagactatgggtttctaaggcctgcctcagggcagttagactcctgcaatatcccttattcaagagtggtcctgactgcagtgttgatggtggtggagcagaccctccatgggtcactttcctgagagtcaggtaggaatcatccattggctcagaacagccctgccactcttccagggatggaaggctagaggccatgccagagacgtctgttctacaagcaggaaggcaggcagggcagaagtgaatgccagtggactgtgcagacctcagcttggggagggcatgttctcctgggagtggaggtggttttattgccagggagctgggaagttgcctgtggttttgtcttcctgttccctgtacagctgccttccacctttcttcactcagtggatgtgggggaggactgtgtgcagtctgagaaactggacacgcttgtggaaggacccagaccagacttcttcctcccctcagcgcaatgtgctttgcctgtttcaagaacgtcccttccatttcctgttcctggggctgcacaatatgcttcctctcttcctttggacataagcctgaagaaagatactctcttcttgaagaagttttcatccctggctataatcttttttcccatatccttagcaagtatgggcaaatgagcactcacgttgctactccctggttttgcattgatctcctagagcaggtggccacacttgcacctttttctcagaagtgggattggagtaaggagccaagttcacctatcatgatcatgtgacatagtggtttgagatcatgtgacatactggtacggggatcatatgacattggaatgggaacaaaaagcaggagacccaatatttcaggtaaataaccaatccaagaataaaaattgctagtatttcctgttatccttttaaagtgaattatctgtttcttattcgcaaatttagaagctgtttggcacaattttagatatctagaaacaatctatcaaaatatgcctcctgagcaacttgggggttcattaggttaattaattaatagtggttaataagccctttgaaatcctcttattaattgggtcacctaagtcctaagtactattataaccaggcctaatgaggtcaatggtttaaagagagggttttaaaccatatataaagctcctctaatgatcattggtacaggacgaaggtaagaaaagccaggtgagtcttcatgctggtgtttaaaagtttcctccacagcagtagagccacgctgatgtctactctgttgaagccaggtgcgcagtgatctactgactaatggattctccaattgttaagcctatgttacaggacaaaggccgtcgctttgtaaaagcttgaagtgcagtttgctgctgagtacagaagacctttgcaaacagagaggggagattttctctgtaaggttgcaaacaaggttagtgctggccttcttatgtcttgtaaaacttataagctaccatttgaatgaaaccaagaatagagttgattgaggaagaaatggagcagaggaaacctcttctaagtca

SEQ ID NO: 24117 - DNA, 2300 bp, Homo sapien
gcttggtggaaaaaataaaatggatgagttccattttgggggtcaggatagagtttttaatgggtgcattagttctctttttaccccaactctgccaacaaccgagaggaacccagtgttctcacactcccctcccagagttaaagttcaggaactccctgggtgtccaaatctggacccttgctcacagtgccctgccttgtggtctcaccatctcagtcacaagtagagaaaaacaaaatcttcttttttttttttttcagatggaggcttgctctgtggcccaggctggagtacactggcatgatcttggcttactgcaacctctccctcttggttcaactgattctcctgcctcagcctcccgagtagctgggattactggtgtgtgccaccatgcctggataatttttgtatttttagtagagatggggtttcgccatgttggccaggctggtccgaactcctgacctcaagtgatccacctgcctcggcctcccaaagcgctgggattacagacgtgaggctctgtgcccggctgagaataacaaaatcttaaccctcaatgtctgcactggggatgcagagtgagtgacttccaaaaagtcataaatacgctttaaatcattcatttactcattccgtaaacatgtactgaataccccttatgtgccataaggaatacaggagaaaaaagcctttgtttttgttctcaagacaacaacaaaccaaagtgctgtaggtgctatggtagaaatatccacatgttgcttgaaacacaaggaacacacgtctaacctggggcccagcattggaagcccagtccaaatcttgctgggtgaggttgtaggaattcttcagtcattgactgattcaacaaagatttactgaacacttacagtgtgccaggctgttatctgggcactgaagactcagtcttataaatgaagtagccagattcacagctctcacggagcttgtgtttgagttgtggtatggggagggagctaaggcaggggatgcagaagaaacagactgtataccagtcagccgataagcaagccattgattccacgtgttttactgagtgtctaatatgtatcatgcagagtgttgcatgctggtattataaagacgaatgagacacagcccctgtccctgagggtttagataaaaaggaaagatcctgtaggaatgcctagtgcaaagaatggcgctgtgtttggggaaaatcaagctgttcagctgagctggggcacagggtgtggtgagggagggggctccctctttcagtcatgaaatgcaccctttccacaacttgggaaagaatccttcctggaaacttcatatgaaccctctcaaagtacttattgatgtagacatttggaacacgctgtaggtcctgggtgtctgtaaaatagcatcatccagccgatcatctctccccacattgctgaactgaggacatgtgaactggtatctctcggtggttcagaacaggggccagcaacctacggccctagggccaccacctgtgtagtaaagaaagttttttttttggaacacagtcttggccattcatttaaatattatctatgatcactctcatgctacaatgtcagaggcattataaagaccacgtagcccaaaaacctgtctgggtctgtaagaaaaagctgccaacccctggtctaggcgctctgcttacctgaaatacaaaccaataatgagtttctgacacaccaagttcaattccctccctcccttccttccttccttcttccttttctttcttccttcccttcctcccttcctcttcccttcctcccttccccttctcactctctctctccttctcactctctctctctttctctctctcttccttccttgttttcttacctaacccacattcccagaaaatgatgtgaataaagacaagtgttggacctcaatgtgtcaaagttaaactacaactaggatctgccttctgaggtatggcaagaaacaaattggttaatgtttgcaaaatgccaggacattctcgaataaaaggccctatataagttcggagtatttataataattatgattattattataatttatgagatgtcataaatctctccaaaataggatgagatgaacacttttaacaagagaacaggactctatataaatcgctgtgggctcaccacctctaaggaggagcactgactgaagacaggtgagtgtgaagcagaggcatggatcttacactcgggcttattgaggatgaaaatccagtgtatggtgatcag

SEQ ID NO: 24118 - DNA, 2300 bp, Homo sapien
taatatttaaatgaatggccaagactgtgttccaaaaaaactttctttactacacaggtggtggccctagggccgtaggttgctggcccctgttctgaaccaccgagagataccagttcacatgtcctcagttcagcaatgtggggagagatgatcggctggatgatgctattttacagacacccaggacctacagcatgttccaaatgtctacatcaataagtactttgagagggttcatatgaagtttccaggaaggattccttcccaagttgtggaaagggtgcatttcacgactgaaagagggagccccctccctcaccacaccctgtgccccagctcaactaagcagcttgattttccccaaacacagcgccattctttgcattaggccttcctacaggctgtttgctttttatctaacccctcagggacaggggctgtgtctcagaaacttgtgctatgagccaccatgtccctggcttgtcctttcagacctcctggatcctcactttttcaagaaaacgttcacacttgtctcaaagtcttattcttgactctgtcatgctgagtgggttcaatgtccatttagatggctggattcaattctctggtctctccttttttgtgtgttttttacttataagaaatcatgaggcagggtgtggtggctcatgcctgtaatcccagcactttgggaggctgaggccggcggatcatgaggtcagtagatcgagaccatcctggctaacacggtgaaaccccgcctctactagaaatacaaaaaattagccgggcatggtggcaggctactgtagtcccagctactcgggaggctgaggcaggagaatggtgtgaacccaggaggcggaggttgcagtgagctgagatcacgctcactccatctgggtgacagagcgagactccgtctcaaaataaaaagatattatatattttgtaaaagttttatttttaatttatacataagaattgcatagatttatgggataagttgtgtaatgatcaaatcagggtatttagcatatccatcacctcaaattgatgagaatactaaatagcttcccttttagatattttgtagtatacactacaatattgttaaatatagtcactgcagtgtgcaataggacaccagaacttactcctcctatctagctgtaattttgcatgcaaccaatctctccccattcctccccagcctctagtagccactattctgctctttacttctatgagatcgccttttttttttcttgagatggagtcttgctctgtttcccagtgcagtggcgggatcttggcttactgcaacctccaccttccaggttcaagcaattctcctgcctcagcctcctgagtagctgggattacaggtgcccaccaccatgtccggctaatttttgtacttttagtaaagacggggttttaccatgttggccaggctggtctcgaactcccgactcaggtaatctgcctgcctcggcctcccaaagtgctgggattacaggcgtgagccaccacacctggccattacacatgatcaacttttttagatttcacaaatgggtgattttgtctttctgtgccttatttcacttaatgtcctttaggttgatcgtgttgctgcaaatgacaggatttcatgctttttaatgacaaaatattattccattatgtgtatatactgcattttctttatccactcatgtgttgatggacacttaggatgattctgtgtcttggctattacaaataatgctgcagtcaacatgggagtgcatatttccctttgacatatccattttctttggatacatacccagcagtgagatttctgggtcatatgccacttctacttttaattttttgaggcatctccatactgttttccataatggctagattcgtgtatatacccacctagagtgtataagggctccatttctccatatctacaccacaatttgttattttttctctttaaaaacatttttagattgaggtgtacacgtgtaggtttgttacatgggagttaaaacataatcctttctttttctttttcataaattgagacaggatgttgctatgttgcccaggctggtcttgaagtgccttgacctcctaaagtgttggaaccacagacgtgagccactccacccagcctaaaacttcatcttctttggtaaatgtgctttcatcttcagcattccagacttagtaccatcctcccaggcacttatgtcctcttctttgctctcatccttggcgtcttgtcccaa

SEQ ID NO: 24119 - DNA, 2300 bp, Homo sapien
caaacttcaattctgattcctttttctttacaggaaaaggatttgaaaagcatacttgatttcatctttgtatctccatagaacacagcaggtactcaataaacatgtatttaacgttgaatgaacacgtgcctgacttctgttcaaattactacactgttaagtttcaaaagtatttgagtctaaaaaaccaaattgtaagctcctcgtgagtgctataaaattggaaaggtgctgtatttcaaacacagcaaagatttccacgctccctatcgcccaagaaaaatgtcagtaggactgtgaccctcagtgagggggctggaaggagaagataataagatactgaattgaacgttggaagctgtgctccagggataagcacagagaatgcctaccctggaactttatagaatgagcccagaatttaattatgggataactggaaaaagacgagattaagaagagctattctgggtgtaggtgttggtggtcagagcattgagaatggggtaaagagacgatgcaacccctcgttagcttttcatttttcaaaccacagcctctgattcttcctttttacagctccgctggaagggtgggacgggacacagcgcgtcctcaaattccctagtcatttcctggacacccttacaggtatccgccaaaacaatcaaggggcctggtccttaactgaaccccaggtacctccccaatggcaagccggccactccctgcgcccggggaaacagaggaaagcacagtcccggtggccccaacttcgacgcctcctggtgcgcttgcgcaagagcctctgccaggacaccgacaccggtgctggggccgcgcccctcctccgctccggatgtggagcagcagaatgttcaccagcacccggacgtggtggtcggattcttctcactaccctctgcctcacctgagctctcggtgacgcctgagaagtgaaagagcagcagtttcaaaagacacgtccactccggcttttgccttgcagtagctgccggcggctgcaaacgggccgtcacatccgcctccttattggctgcgaacctcgcgcgatatcaccttggacgccagaggaaggggcgggcggtcgggtggcgaacagttctgcgcgtgcgcctcccgcccagcagcccggaacccaaggtgtccgacccttgctttcctccgggtacacggccgaactggaaggccgcaaagcattgtgggagttgcagtttcttagtgcgcaggctgtcgtggccggactttctcaggagcgtgcttcagtattcacggtccagtgcgccagactggaaatgagacagctgtgctctcgctcagccgtgacgcttgaactgcgtttccattctgttagtgttgaatgaacatttttcttttttttgttttcttttgttaacatttttcctaaagtcgaggcataaacatatacagcacaattaacttttgcatagttaaaacccaaaatatcaccggccagatccagatatagaacattttccaccacccctgtaggtcccctcttgactcttcgaaacacaggaatttttagaactcgccctcgctttgagggtgaagctgaagacctatgttagggaattgatcggctgtgtcctgttctgttttattcagtgactgtacataatgcataatgcatggatgttactgagaggtccctattttgtcctgaatttatctctctcgcaaacccccagaggactctattggttcgttgtggttctttactgaacttcgtgcggctgagaatacaaagatataaagggaagcccaaagcccactcctgaaccgaagcgtgcgttccccgttgggagaggggtgaggtggcgaaattgacagcttcattgtccacctccgggttctagaacgtggaaaacccgcgggtgtcggctcgtggcggacgcttgagggcagggggcgctcgggctgctgcctggtcggccggtcaaccggagacgctctacccgaagcgcagctctcgatgagccgcgccctgcgtcctcacgccgaggcggctgggcgatgcgcttgcgcactgagaactcacaccatatgtgtcctgttccagtgcgcgggtctgtggagagccgggtgcgagcggcggcagcacgaggggaaaagagctgagcggagaccaaagtcagccgggagacagtgggtctgtgagagaccgaatagaggggctggggccacgagcgccattgacaagcaatggggaagaaacagaaaaacaagagcgaagacaggtagataggggttgg

SEQ ID NO: 24120 - DNA, 2300 bp, Homo sapien
gatgaactagcactagtttttttaatttaccttactctccgcctcgtatttaagtttggtgggtagtgtacgaacgtgtaatgtaacagatgttgttcactcccaggaagtcaactctttccatcatgagtaacagaactcaatcgaatgtgacacacagaaatgtctcaaaaatctctaggtaagtaactcgcatatacccttatcctccctccccaaagcattgcaggtggttagaaaggagcgacctcggttggttggtttcttcttcttcccttcctttcttaggggaaggctagagagcaaagaaacgacaaaaaaaaacaggccggaagaaggaaagcgaaaagcatgagggctggacaatcagcccttaaataaacgaaaactgtatccaaatcagattaagttgagagacagcgaactgctaaacacctccccataactctaacgtacctgaaaccgcgagtagagaaacccggccgtacatcacattcaagctcccttccctcccaaagtactcacaggtataagaggcataaaaagaacttccccaccctcgccaagagtagcgcggaaaaaaactcacactggcctgggccacgctggcgaagccgcctgaccctccccgcgcgaccaggaaccctcaaatgactaccccgctcctcaggccggggaaggggtgccgggggagcgaggctcgactgggaggacccgcccgccgtcgaggccctacgtgcccacccggcccgggggcttgggcccgctccgcacactctgggcccaggcctggtaccccgcgaagctcatcgcgagcccagaccccggtccgacgccgcgcccggcgagacccgcacactccactgagccacggcggccgccgccgtacggacccaacccctatctacctgtcttcgctcttgtttttctgtttcttccccattgcttgtcaatggcgctcgtggccccagcccctctattcggtctctcacagacccactgtctcccggctgactttggtctccgctcagctcttttcccctcgtgctgccgccgctcgcacccggctctccacagacccgcgcactggaacaggacacatatggtgtgagttctcagtgcgcaagcgcatcgcccagccgcctcggcgtgaggacgcagggcgcggctcatcgagagctgcgcttcgggtagagcgtctccggttgaccggccgaccaggcagcagcccgagcgccccctgccctcaagcgtccgccacgagccgacacccgcgggttttccacgttctagaacccggaggtggacaatgaagctgtcaatttcgccacctcacccctctcccaacggggaacgcacgcttcggttcaggagtgggctttgggcttccctttatatctttgtattctcagccgcacgaagttcagtaaagaaccacaacgaaccaatagagtcctctgggggtttgcgagagagataaattcaggacaaaatagggacctctcagtaacatccatgcattatgcattatgtacagtcactgaataaaacagaacaggacacagccgatcaattccctaacataggtcttcagcttcaccctcaaagcgagggcgagttctaaaaattcctgtgtttcgaagagtcaagaggggacctacaggggtggtggaaaatgttctatatctggatctggccggtgatattttgggttttaactatgcaaaagttaattgtgctgtatatgtttatgcctcgactttaggaaaaatgttaacaaaagaaaacaaaaaaaagaaaaatgttcattcaacactaacagaatggaaacgcagttcaagcgtcacggctgagcgagagcacagctgtctcatttccagtctggcgcactggaccgtgaatactgaagcacgctcctgagaaagtccggccacgacagcctgcgcactaagaaactgcaactcccacaatgctttgcggccttccagttcggccgtgtacccggaggaaagcaagggtcggacaccttgggttccgggctgctgggcgggaggcgcacgcgcagaactgttcgccacccgaccgcccgccccttcctctggcgtccaaggtgatatcgcgcgaggttcgcagccaataaggaggcggatgtgacggcccgtttgcagccgccggcagctactgcaaggcaaaagccggagtggacgtgtcttttgaaactgctgctctttcacttctcaggcgtcaccgagagctcaggtgaggcagagggtagtgagaagaatccgaccaccacgtcc

SEQ ID NO: 24121 - DNA, 2300 bp, Homo sapien
agcgagactcttacctaaaaaaaaaaaaaaaaaaaaaagatataatttttctcatttcttttcattatctatttaaaacctcaaattagcttatattttatatagtcaatacttactatttataagtttacccacattcttaacattttgttgcgcttcgtttcctgcatcttgtaccttccatttgagatcatttcttcctatctgaagaacactttagagttttttttagtatggatcagttagtaagacattctgttttgctttctaaaaacatctttattgcatcttcattctttagttttatatgtttactgagtgaggaattattggttgaagtttaacactttgaagttattattcccttgccctggctttcattgttcctgttgagaagtcaggtatcagcctaaatttttcatatggtcttgcttttcagcagttttatcatgacgtacccagaataggctttttaaaaatatattctacttgtagagctttattaatatatggttttatgtttttatcagttttatgttaggagtcattttctccctcagaattccaatgatgtctctgataggccctcttattgtatcattgtttcctattttcttttctgtattttccacctagtgagtctctgtggttcattctggattgcttctcttgactgtcttctaggtcactgattttctccttggctctttctattctgaggttagatccatcttttgagttctcaatttcatttgttatatttttcagttttagtatttccatttaactttttttatagttttaattcaccttctaaaattttaactttgtcttttgcttctgactgaatgttagaagcacagccattttaaaattttgattttatgactttattaaagtccttttggtgttttatatgttggttcttctcacgtaaattgttttctcatgtgccttgctatttttatagctggatattttgcttggagaagtaatttgaggtcaaggatgatgttttcttttctccagagctaatttatgtgttacttccacaaggtacctgagtgaactagcaatatggaataatcttattctagatttagaatccagaggatctgaaggtgatctgccaataatggggagatcctgtttatttcttattcatccttattcctagggtacagctcttcatgattgtaccccacagtaagggtgtaacccaatgtctgctcactgcaccccactgaattcttagtattttggtaggtctggactcccaatgcagcttagcctttcatctgcctcttcccgaatcaacaaatgaccataaggggaaagtggtactaaagactgttccacctccttgagttttgttctcccatggattctgtcttactaatactgacttcagtctggattactgccttaaggttttactgttaagtgacagatttcgttttagcatatagacaaacaccttgcgtttatgatgtatgaaaacaccatgttactgccttaaatacaagttgagcctctgaaattcaaaaatctgaaatctgaaatgctccaaaatcaagtttgagcaccactacgtgacgctcaaaggatatgctcattggagcatttcgtatttcaggtttttccgatttcagatgcaaatattccaaattaaaaaaaatatgaagtaagtatagaatgcaaatattccaaattttaaaaaatctgaaacagttctggtccaggcattatctcctccccttactttaaagcaggcttgtccagtctgcagcctgtgggccacatgcagcccaggatggctttcaatgtggcctagcacaaatttgtaaactttcttaaaacgtgagacttttttttgtgatttttatttttaagctgatcagctattgttagtgttagtgtgttagtgtattttatgtgtggcccaagacaattcttcttgtaatgtggctcagggaagccaaaagattggacacccctgctttaaagtctcttatcttgatataaatctatcatattaatgtttatttatttaaaaatatatttgctttcgtagtagaaggaaacaaagttcatatagaagtaaaagaaaaccctgaagaggaggaggaggaggaagaagaggaagaagaagatgaagaaagtgaagaagaggaggaagaggagggagaaagtgaaggcagtgaaggtgatgaggaagatgaaaaggtgtcagatgagaaggattcagggaagacattagataaaaagccaagtaaagaaatgagctcagattctgaata

SEQ ID NO: 24122 - DNA, 2300 bp, Homo sapien
tccagaaagggctgtaaacagcaaaatcatggcatttactcatctaccagaggctgcatcctgaaatggtgtgttacaaaccagaaacccaacatactggggacattccagcagtatgcaaacaagtcttgtctgtgacttcagtttaataatcttggcagacttgggtcttgttaatgggttcgtagttattaaatgtagggactttatgttgctcatctgggattatatagattggaagtaacaaaacttgagtgaggaaaaccgggaaataagagattctgtgggagagaagtccattcctctaccaaactttcactcaagcactcacagtacctacattgctgcagtggtagaggaggcatcagcagagaaccaggccagcctccctcctcctttccctttgagacagggtctcgttctgtcacccatgctgcagtacagtggcatgatcatgggtcaccccaacctctgcctactgggctcaagtgatcctcccaccttggcctcccgagtagttgagactacaggctcacaccactatgcctggctaattttttgtatttttggtagagatagggtttcgccatgttggccaggctggtcttgaactcctgagctcaagtgatccacctgcctctgcctcccaaagtgctgggattataggtgtaagccactgtgcctggtctgggacatgctcttattgcaggacaattgacacatgttgagaagtgctgaaaaaccaaataaagcagggaagggcctagataaggagaggagggactgtgattaatgatgtggtttgggaaggcatctcacctcttcagacagagtaagccacacaggcacatggggagtgtccagagagaacagcagtgcgaggcagagtgaccagaagggacagtgataaatgaggtcagagagggtggcaggacctgtatcgtcaaggatcttacaggccatgggagggattgagcttctctgagttttgcaagaagccattgccaaggctgtgtgttcacaatcagactggttaattgggttgttatgtggaccttgggttgttaggaagtcagtggcaagagcctgtcaggaggctcccacagtccaagcaagaggtctaggtgattcagaccacagtgatgataggagtgatggcgtagtttgggatacatttttaagtggagcttactagtaaatattaggatttagactggtatatgctcactttagatcatgaaacctgaagtgagaagaattctacttaacaagactgctggaaacttttaaagcattttaagcgtgtgctcaataagcagggtagttatgtagtggccttttggatcaatggtttgggaacgtggtggagaaaaggagggtgataatacggtctgatgcctatgtgatcccccagtagcctacatatgtgcctaacgaagacctgcctgtcaccaggtactgcctaggttctaagccccagactgtggctgacatcttcagcagccaagctcagtgttttagactaggaacagaatgctcctgtgatgcagcttcttttggaggtagggctttaaaagagaagaaagcaaagacttgggaagcaacagaatggggaggaggaggttaagaacaaggaagaagcgctctgggcatggggtggccctgggctgcagcaccctgcctgcccctctcctgtggccgctggggaaagctgctttcctctaatgggagaagcctgatgttcagctgcagtttttctttttatgtttaagtgattctgtaagcttaaaattcttttcttttttcctttcaggcacatagcagtatttccctgcaagataaaaatcctccctcagtacatttttaattctcgagatccgatagtgatgggggtgacggtggaagcaggtcaggtgaaacaggggacacccatgtgtgtcccaagcaaaaatgtaagttctagttgtacattctgtgggtcatttcttaaagcactaaatgagtgtccaagagtcgtaccaacacagctttgtgcctgtagttcacagtactgtgctgtgtatttagtgtggtctccaccttcttaacaaatgtttcagtgtttttacctcagtaggaagaaaatgtggtaactttaaaacaagcagagcctgtcaccttctgttgtgcttcagtattggtaaatatcagtgctccatagtcagtgttgactcagtgctgatctcagtgcttcagttaattggggctccaaggcactttacattattgccttttattttattttgaaaggtttcaagcct

SEQ ID NO: 24123 - DNA, 2300 bp, Homo sapien
ttttcattctaaagaacaacagttttaaaaatcgtattagtcatagatttattctcagcgatttctttttcacagacttgggtcctggcctctgatttctccaaccgttcctccacattctccatgtgcccgtctagtttgtcaagttttgatgagcagttctctactttgccctccagtgaggacagtgtgtccctgcatttccctgaatctcacatgaagcaactcactccgctcgtggagggacccacgcactctgctgcactgtggaacaggtcagccagcccaatggagaggaacacgatggtgctgcctctcaggccagggcactgggggcgcatggaccacagagactgttctctcctcaagcataagttttctgttattttcaagacaatatcttagataactagcccttcagataccaaagtcaggtaattctccaacttgtaaggcataactcatggttacaccttggaaagacagttggttgtggctgttcaagcttcagcactcctttttttggggtctagtagcaccctctgttgaagtgtgatactgacagtcctgaaattcttacagtttttcagcttagatgaatggactattaaaatttatatttacccttttaaaaccctccagaaacactgggtaatctgcttgggattctgtctttaatttgtaatagtatagctagcatacgttattcatatgtcagaaactagctcacattacacactctgctgttttgaagcaagtaggatttgacccgagatgttagtcagtttgatttgcatttatgctgtgtatatatggttgccgaaatccagaaatgcttgtatgggttgcatagttagatgaaagatgctgatgattattggtcaaaccaggaagagttgtttaagcccatgaagccagagactttgccagttttcctggtggtgcattaacgtggctgacttcacagaacagtgagtctgaaataaacaaaagagaaatgctgggtttcttagttatgtgttgttacagtgcactcaaaatagatttgtctggaatagctgaagtgatatattttgggtttgttttactcatggtacttttgtttataatagtagagatgtggctgaggttgtggttttagaatgtgatttttttttttacagcatactcttcctggaacctaatagtagtatcccaagagacctatgatgaagttgtgttttaatttatttctcaattactagtgaagctaaaggtggcaaaggaagtaaagtggcatgcagccagtaggctctccagagtgtgtggttttgttttcttgtgtaaagttgtaaatttggtttggatattaagagatgttggtaagccacactaggctccagttgtgttctctaaagcatcgatactctgatcacacttgaatgtttttaattgaacatgcattattaaaccaaaatacaattacctgtagcgggggataatgtgacatgtgtacaaaagaaaaagcttgaatttaggatgaaacctcttcatgttttgtgacctactaaattattgtttgatcagatagatggtaggaatttcatgtttgttgtacccgttagttagctttaagttttacagatagttcttttaggaaacagcaaagaatattcagagaaatttatatttttcgttaacttttccccactaccgagagctgtacagtccttttaaggttataagagggagttcatctccctgatcacttctcatccatgtccacctccagggactgtgtgttataggatattttatatttatcttctggtgtatttaaaaaaaaaacaaacctcccaggacactttgaatttattataagtttttatctgctgatgaagaatataatggaagcgaaccattttagagttttcttttattagataaggagataataccaatagagataactgtatttggaatttactgaacatttttatatgaaagtaatggaaaacaaatttcttgaaaaagtgagggaaaatcagtttataacatataaccattaatttttttttatttttaaagcagatataccagattcatcattgtgggagaatccagattctgcgcaagcaaatggaattgattctgttttgtcaagggctgaaattgcatcttgtagttatgaggccaggtatgtagaagttgtgtgttacaattcttaatgaataatttggttaattatttttatataatttcttgaactataatcttttgaagtggatttaaatgttacagacgtgttatgaggttttagc

SEQ ID NO: 24124 - DNA, 2300 bp, Homo sapien
aactgtctagttatttttcattcttctgttataatgtggtttaagttgttttctaaattgtaaattactttagacaccacatctttgagttttcacagtgtattgaaagccttatgatgtttataaactttatcccctaaactttactctcaggaattttaccctgaggaaataaatatgcctagtgcacaataatttactatatgatgattttattgcagcattgctaataatacagaaaaacaggaaaacacataaatatccaataataagggattggtcaaataagttatctgtgtatagtggagcactgtacagtcattattcagctttatatatctcaacctggaaggataaccttgactaaaacaatgtgttacaaagaaatattttgtatgattatatgtttgtaaaacctctgtgctctgagttatggaaataagctttgaaaacaacaccccaaagttttaatgaataggattataccagttttaattttcttccccatatttcctgtattttctgaaaagaaacttcatagtgagcatataatattttaataatcagcaaaaataatgcagtcatttccattttgggaaaaaaacatcatgtacttctagccacctacacctttaatttaaagacctaataattgaaatcaagcttaattatatcaaagttcaggaaaagtatagttgaatccctagatctgtcaagatgtttagcaaaaaaaattattttttaatatttattgtgaggtgaatgttatctaatgaaagttaatattactatcaaatagattgattagatccagaatttagccactggagcattcattgtattctttcccatgtgtagggaggactacactggtttatccagttgcctcatttttacctgaaataattcattttaagccctctgtatgtgggagatagtggaagccagtctaaaatatgctctgaggttgggcgtggtggctcacacctgtaatcccagcactttgggaggctcaggcaggtggatcacctgaggtcaggagttggaaaccatcctggccaacatggtgaaatcccgtctctattaaaaatacaaaaattagctgggcatagtggtgagcacctataatcccagctacttgggaactgaggcaggagaattgcttgaacctgggaggcggagtttgcagtgagctgagatcgtgccactgcactccagcctgggcgacaacagcaagaccctgtcaaaaaaataaaataaaatatgctctgagaccacttgtcaaatttgtaattggtttaaactttggtgtagcttgctcaattgtgtacataagaacaatattttgtgatattattactatgttttgatatgcagttttgctcttgttgtccaggctggggtgcaatagcacgatctcagctcgtttgcaacctccaccttctgggttcaagcgattctcctgcctcagcctcctgagtaactgggattacaggcatgcaccaccacacccagctgattttgtatttttagtagagacgaggtttcaccatgttggtcaggctgatctcgaactcctgacctcaggtgatctgcccacctcagcctcccaaaatgctgggatcacaggtgtgagccactgtgcccagccagtattattattattgacttagctttttttaaaagtaacttttataatcataagaatgtaataaaattaaaacttgagttgatagagggaaaattcttctttgacctatgtgttttatgtatttatatttatttattataatttttttttgagatggagtcttgctctgtcacccaggctggagtgcagtggcgccatctcacctcactgcaacctccacctcctgggttcaggcaattctcctgcctcagcctcccgagtagctgggattacaggcacttggcactgcacccggctaatttttgtatttttagtagagacggggtttcaccatgttggccaagctggtctcaaactcctgatctcaggtgatccgcctgcctcagcttcccaaagtgctgggattacaggtgtgagccactgcgcccggcccaactttcctgttttatttattgccttgccttatggtttatgtttatgaggtcatcattatgttctggtcactagcacagaataaggtccatttatttatttagtttttaaaatttttttttttcaaaaaaggggggagaaaatgtaacctttgtgattggtttaccttttctttaattctagggtgggtatatggctgccaaggtccagaaattgg

SEQ ID NO: 24125 - DNA, 2300 bp, Homo sapien
tttggaacacctaggtgggaggttcgcttgggaccaggagtttgaggttacactgagctatgatcttgccactgcactccagcctggacaacagagcaagaccctgtcacaaggatgctagaatttgtccataaatacatttttatttatgtattccccatctctctttttatcctattttatgtagacagcaacgtgattttttttcgtcctttacagaggctgcctactagtttgcagttaataccattttactgtattctataaaggtattgccaaggtcagttggctcaaggtttgtgtttcttccttgagaaaaatacaaaaagaagaaaaaaaaagatcttcggtttgaatacgagagtggaaaagaaaattgaaatacaatcgtgcaggaatgctgccatttagacatttaaaacaagcaaaagaacaacaaccaaaacaaaactcacccataacaaggggttaccactgtttttctgtagcatctcagcagatgacctcctggtgttgcagtcggcaactggtcgtgagtctgttaaaattatgggcaggcacggtggctcacgcctataatcctagcactttaggatgccaaggctggtggattacctgaggtcaggacttccagaccagcctggccaacatggtgaaaccccctctctactaaaaatacaaaaattagccgggcatggtggcgcatgcctgtaatcccagctactcgggaggctgaggtgggagaatcacttgaacctgggaggcggaggttgcagtgagccgagatcgcgccattgcactccagcctgggcaaaagagcaaaacttcgtctcaaaagaaaagaaaagaaaagaaagcaattacgcaatttgttttaaattatgacgtctttgaaaagtatgcaatctaaattcgttggattagcgacgagaatactgaagttgaagtgcatttatagaagtctataaaatggcaaaaaactgaaagggaaagaaatgagctatttgagtattctctgtgttgctagtaaacaagttccaactctgcaaatcagttttcaaaagaatactgattgtttcctaagtacctgcaaactctgaagcattttaggcaagggaatgagtgggaaaaaagtatcttcatgtttgtgcattacaacaataaagactattatgtaacaatgtggagtcttcaaagcgaccctgccaagagggagaaagtggtccttatggacggattgttttctgctagaaggccctcaattagaattgtacttacgcatacataatataggatattatttttatattcatagaaaactgctttctcgggtaactccagcgctgtacatgggatgggataccggccctccgtttacaaatactcaggcgcaatgctgcccgggcactcaaaggacagaagatagtgtctgtgccctgcgggagcaggccacgaatcccgaaaacgccgtggcgcagtgctccttcccgcgaacctgagtgggccgtggttctcggttgctctggacataggaaaatgtcagttcatgtgtgtccctttctccactagatgtcactgtaaatcaattgcttaaggagggaacccgggcgtctggcgcatcttcacacagtaccggggtttgaagcccggtcagtgtctgcacttgtgtccttccccactggggagccccaaggcggggcaggcgcggggactcgctgtgcacggagcggcgcgctgtccgaatggcaaccgaagagccgcgacccggtcaacgaagcgcgggggtgaccggagcaggacgggcgggcaggcggcgcagtgcgtgggcgggcccgcgctgcgctcccctccgcccagctagcgagacggtcacgtgccgcccaggcgctgccccttgcgggcggctgcagaacaacagggcggggccggggaggggaggaacacggaggccgacgccgggcgccgcggtgctacgcccgaggctggggtcgccccgggccggggggagcagagcgcgtgcgccgcgcggctgtgagcgcgagcggggccggggagcgcgcgcggaacgctagggggcgtggctgcggcgcgcgcgctaaccggagggggaggggcggagagccaccgcggagcgcgcgcggggttggttgccgcgagcgtgggggagcgtggaccgcggcgctgctcagcggtggggctgccttcccccggccctcctccctggtccctggcgagggcactggcggcggcggggccggggtccgcaaggccggagaaggccgccgggcccgggcatggtg

SEQ ID NO: 24126 - DNA, 2300 bp, Homo sapien
cccctacccacccctgcacctagcagagtgccttggtacatcatagatatttgtttgtttttgaggcggagtcttgctctgtggcccaggctggagtgcagtggcacaatctcagctcactgcaacctcctcctcccgggttcaagcgattctcccacctcagcctccggagtagctgggattacaggtgtgcgccaccacacctggctaatgtttgtttgtatctttagtagagacagggttttgccatgttgtcctgactggtcgcgatctcctgacctcaagcgttctacccgcctcagcctcctaaagtgccggaattccaggtgtgagccaccgtgcttggccacatcataaacatttggtgaaagggcaaacctagggaatgttcaaaagctagaaggtgacttcagtccagatgtctcgtgacccatctctgatttgcccccaggaacctggagcctcaccccttggactcactccaggggctcagcgcataccagaattgagtacagggtgagggacgacagagccacgttcacgttcaggagtgggaagcattactggactaggagaatgcagctggaggatatggattttctttgctatttggctaagcaaatactattcatttgagttagaaatggcagatatcatgtatttatttatttggatataggatgagttccccatccttggattttattttgttcaaaggaatgctaaagttacatgatggaacggagaatccttgatttatatagagaccatgaatggaatttttccttacatcagttgctcaggatagcacacctagcatgtgtggcattcttaacaactctttctgtccccctagaattcttcaacgacctggatctgctcatggggccggtcaccctgcacagcagcatggagcacctggtccagtactcccaacagggcctgcactggctgcggaacagcgcccacctgtcatagggacctcaccctggggccagagtgggctctggtctccacagatggctcaacgtttttggacactgtgctactgaaactcccagccacagcatttatcagactgcggtgaacatttcctcagcattgaacaatgatcttttgcagggcatgtgtgtttgtatgtgtgggtatataagaagccgcctgtgtatgtgtgtaagatacacagctcttcagaacacaccttctttgtctagtttccataatcccaggctagacaaagtgatcagaggtttctgactagaggaagtacacacacacacacacacacacacacacaccgtacactcacacacaatcacagacacacactttctattccattccagtgctaaaccgtgacttcttagaaaattcaaccaaaatctcatgggttagttaaccaggtgcaatacagcacaccaaaagcttgactgccagtgaagatggacctgctcttatactgttgattactttcagtattaatatactattccccaattattttttgattggtatgtattaatgggtaattgaataatgaaaataagccaggtatttttgtgccggaagtttactagattgcatgttaccaaataccctgctcttcctctaattcccttcccccatctgactctattatcaactaaatgcattccaggcaaacagatggacactcacagcccttcccagccccacctccaagtagtatgcaaatggcactgagatttagcaaaaacgcggcgtctttgaaagttaacagacactaaggtagcagtgcctgtgtgttggagctcagttaggagttgaagttttctgcacctgtgataacaagcccaccagccacatgcatttcttcttcctgccactgtgactcggtggctgtagagccacatggcatttgtcagccaatctgtttcaagtcttttctttccaccaatagctttcttacagattttcttggctaaatgaggccattacctagattgtcccttcagtaggagcctgaatccttcgcttaccaggctgagagctatttgccatgataatgctgattctctcactcctcatgcagaatgtgcacctgcagccctttgatgcgttttgatttgggggcgatttttcaggctttgattagcaggctgcttgcaatgcagaagatcacagttcctttctggggcagcagcaaccagagcctcttcctgtgtcctgtgtgtctggtatgtttacaccttgctctgagtttttctcttgttttctttttttaattaagtttacattttagtttctttgacatcttgttt

SEQ ID NO: 24127 - DNA, 2300 bp, Homo sapien
ttcttccagacaggggctgttcctgctccctcctccaccctccacccccagcctttgttcctgggaatgctgtctcaatgtctcgatctcactttcgccaaagcaaacatttccaacaaggcgtatgctaaggggatattagaaagacagattttctttttcttttttttctttttccaaatacactgtgcattgggatttgggcagccagcccttcacacctgtactttttcctatattcatattctctatgtttttacctaatcttcttgctacttgctaccttcagctaatgagaggggtttttgagggctgagagttatcagcttgtaaaataacaatttcattttctcagactatgttgatgccaactctgtcttaatttagcgttttacattttgcacattagttatggatgctaatgaagaaaggattgattcagagctgggggaagaagggagccaggctgagcattctcaaatccgatctcaaataggaaagaagtctcattggccttttggtcttctacctgtgtcctgaattgagtttgttaatcctcattcggaggtgggtgaggtgagaggatgactcttcggcttgacgctggagggatcccgtcacttgcacccagggtttacatttctggcagccccagtcagcggttcttgcccagaaaaaggaacaaaggggagagtgctggaagggactcccttttggcggggagtgcgaggtttggttcgcgtggtgaggcacaactgcagggctctgagctgctctctaggaattctggggaatccctggtgagaatccggagctgtggccaagaggtcaggagagtcagggggccttggaggggcttccggttctaggccaactgtggagaagcagaggtagggccctgatggagacatgcgcttctcagcatgtctaaaaaagtaagccagggggaagagctgtctttacaatgagggagattattattactctttaggagccacgatgatactcttatcacccttctagctgatcacctgcctttccagaccggagacgggcggcaagtttgaagtcgacacccagaggccagtttgtcccccttcccggtgagaaataaaaagaaaggaggttggtttccagggctggccagctagagggtgggtgggaccaccactggaggccaaaccgcaacggagagcaggtccgggtggaagaggtttcctccgcgccgccgctttatttcgctgaacttgcgggctccagagaccttaaacggtttgtttggggcgctgctgcgggcggcacagctcactctccccgcgcctgggcggccggggaattcccccgcacccacccgggtccgccgcccgcgggagcgcccagcagggtcaagtggattctgggccgcgggagaagtgcgtgcagcccgggcaaggccgggcggggccgggcgcgggcgggcggccgagggatgcgacagggccgggcacggctccgcatccccccgcactcggcgccgccgcctcgccgctctctcccgcttgcagggccgccccgggcaccccagggctgctgaggggcgggcgggccgtaaaagccacgagagaggggcggcagggcggcgcggcctgcgagcgccgcgggaccccgaggagcggcgcggggagtacaggggcgcgcggggcgggcgcggcgcggggctcacggtgcgcgcgcgcctcggcctcgcccgcgcacacgcgcctcccggaggagaaagaggcgggcgggcgggcgcagagcaccgcggcggcggcggcggcggcggcggctgcagcagcgggccgggccgccgcgagggaggggaggaggggcgggcgcagggccgggggcggggggcggcggcggcgcggcgagctcgctgctctctcttgagtgtgcctgcgcgcaagccggggagcgggtgagtgcgccggccgctgcagccagcccggccggcccggagtcgggggcggggggcgtcgggagccccgacctgggggtgggcggtgggcgggcggcggccgctctggcgcggctgggatgcaccttgagcggcgcctttcgttgcagcgcgcgggcggcccgagcctcggcggcggcggtagcggcggcggcgacgctgacacctcccaccatggacagcttcgacttagccctgctccaggaatgggacctcgagtcactgtggtaagtccccgtgccggccgcttcgggcgggcgggagcggcgaggggcggccgcggcggcccgcgcgtcctcacctgggccgggggctccgggcg

SEQ ID NO: 24128 - DNA, 2300 bp, Homo sapien
catgtaatttgcaaggagaaagcctagaaggtttatcctgcaatccctggatacagttacaaacacccaagaagcctctggaaggagaagcagatggagtcatgcgtctgcagctttgctggaacaggagagagtagtgtccttagggacaaagctggaggagatgctgtaggggctgaggcagcttgatgatgctcctatcaccttccagcagtaccacctgcagagccagcttttggccagacatatttttctaggggaatggtgggattataaagagagaaaaaaaatcccacttggttacaaaaatgacctctgagttgcagctgcgtcttcaggataaggcatgaattaaagccatgcaaggcttctcttctatcaaatcatatctgaagggagatcttagatgctataggtttgcttctggatttatttaggaggcttccagcactaggttggcagaatgtgagtagggccccagactgagcaggattcatttgttagtccctttctttggtacatttagtctacaccaaccaaccaacctgacccgggaagccaagcagctcctctcatttagcagcttcccccagcagccctccccttagctgggtggtttgattcagctcccaggggtgttgcttgcatccatgtggggagaaaagaccctcaggtcacaagcactataggatgagcaaaagctaaggcagcttcatagaaaacatcactctaacatttttatttttagagagtctctttctcttttacataaaaaagttcccttttagttctgacattctaatccccaaaagtccaaaccctttttttgctttgtattaaggagttaaaattttgacaactagattaagtgcttgttttggtttgcatacccagaggctggaggataataggaacatcttcataaaccagataaataataaagatctcccataaaggctctcactaactgttctacattttacttgtaaaaactattttggatttatctccatgacagcttagtaaaaaacaggatctgcaactactatttgggtttcctcaaaagtcctcattctccaagacactattacatgaaaacataacactggaaataatcaatccaactatccccatgttagaggccccaaacagaaaatcatggctattcctaaagaaacatttttaaatacccgccttgcaattgctttaggtgcacacactctcatatattaacacaaggcaccagagtttaaattcaaacgtaaatctgcccgttactacatggctttttgggagaggcctttcatgagtaaacccctcaaccagctctataccatcccagggccttccctctttccttttctgggatcatctatttatcttcagcctccatggtgagggcaaatctgtatctgagctccaggcccagcatgggactcgcagtaaacacggttatgtttgtccttcagcggccctcctttgtataaacagatgtggtgggaagggaaggaaagccagatcccggtgagggccgggaggtctcctttctgaagaagcttcccagctgcagccaggagcacgggaacaggacacatttcttgttcaggcctcagaacttgcagttcttccagacaggggctgttcctgctccctcctccaccctccacccccagcctttgttcctgggaatgctgtctcaatgtctcgatctcactttcgccaaagcaaacatttccaacaaggcgtatgctaaggggatattagaaagacagattttctttttcttttttttctttttccaaatacactgtgcattgggatttgggcagccagcccttcacacctgtactttttcctatattcatattctctatgtttttacctaatcttcttgctacttgctaccttcagctaatgagaggggtttttgagggctgagagttatcagcttgtaaaataacaatttcattttctcagactatgttgatgccaactctgtcttaatttagcgttttacattttgcacattagttatggatgctaatgaagaaaggattgattcagagctgggggaagaagggagccaggctgagcattctcaaatccgatctcaaataggaaagaagtctcattggccttttggtcttctacctgtgtcctgaattgagtttgttaatcctcattcggaggtgggtgaggtgagaggatgactcttcggcttgacgctggagggatcccgtcacttgcacccagggtttacatttctggcagccccagtcagcggttcttgcccagaaaaa

SEQ ID NO: 24129 - DNA, 2300 bp, Homo sapien
gagccattgaagcgtttaaggactggtcgtggggtgaggggagtgtactgtcatcatttttgtagtcttttgcagagaaaatttggaggcagtttggaaaacactctagagcctgacatgtgagagatgagttaggaggtcacgtgtccccacttttctaattttgtatcttcttcagcaaaaaagtctttgccgcctattctgagcagatgtatgattattcacaaatgatatacaatacaactgtattcacacattgcatgccttgaaacatacacaaaatgtaaacactaaaaacatgacgtaaaaatagatgtaagtctgggaactcgatggaggtggtggctgcacagcattgtgagtgtactcaatgccacaggattccccatcttaaaacggctcattttatggtatgtgagtcttaattaaatacaaaaaccagacaagtgtgggtagatagacattcaattcctttcttctcatccttcagtgaacggtctggtgtgccctgggtgcacgtaccccttggggattagggcagtgatgagaggcaatggagggagggtgtggctgtggagatgcggacgggaagaaggatctgaggagtgactgaagaggtagaatgggcagggcttggtgatggaaggttgaagagtattcagcaaagagaagaacgtgggaagcctccccatttctggtttgggtataagataaagaaacgttttctccttgccagggacatgaggcagacaatactgggataatttcccagggcttgggataggactgggtggggaagtttctaggtatccattctcaggataaggacgggcctgtttggatgaggataatggagggtcaaacctgaagaagccagattagcagaggcaaagtgagagatcagaaggtggtaaactcagaagggggtagagacctgaggagcaagctgggacaaggcaggagggaattcacaggccacatggtaagtaatgagtggggtagaggacagagcagggtttcattgtggcgagtctgacgggaggtgctgggggatgttccaggagaacagcagaaatgtgtgatgctatggatgtgggcttggcaagttccatctggagctgggaagaggccacccatggagaacaggaaccatgaggcggagagtggagcttgcaggagggcgaaaattaagaccaaagaatggaagcctgccagtgtgagagaccgcctgacaaaaaccaggagagtatggagtcatggcggcccaggcagaagttctgggaggaaagaaatggtcaacactacagggaagtcaaacactgccagtggagacaaataggacaggaactgaaaaagcatccattagtgaatccctggtgtcattagtgaaaataattccaggcatgaatggggagagggaagggtgtcgggcaggaagtccagtgcccgtgggttgactgaatgggagatgaggaggtaacacccatcatgtaggtcatgtagagcagccttaggacatctgattccttgcctaagactcttctttcctggtgtagctttgttctagaaaggtctggaagacttgtcacagttccaatgcaggatgagcctttggtcctgatctcttggaggcccagacagcctgggaaaccagcagagctttggacaagttaagcagcccattgaaatcaacattcttgataatcatatatctaagagattccaaaatgttcctgggattcttttatgggtctgcatagggttagaaagcacaggagtcaaagagaccttctcccttggcctccagggccaccatcctctgcttttgtcagttggtctccccagagtagagtccaggttcctgcttccagccttctggtagaccaggccctgccacaagtgagagttggccggttgggtatctggtttagtcactcgcctccacactttcacatcctctatcaacacctgcacacttgggttgtgaccacacatgctcttcctgtttgtacagaaagtgccattcagaaagctcgccagcgagaagagagctccacgctcagcctcagaagaaagacgttcaacgacttactggggagagaaagaaaaggaacgggagctgagaggtaagatcaaactggagggtgtgcgggccctctaggatgccttgcctggaagagaggtagccccgactttgtgtcctgaagggtggcgctctaagtagctgtgcccatgctccgctggtcagggcagggggagcattcttggtcagcctcaccgagatggtccaggccctggtg

SEQ ID NO: 24130 - DNA, 2300 bp, Homo sapien
agtcaaaaaaagtcatagtccaaggaggagagctttccttgatttcagtctctcccatctgtgtgtgccatccacaattagaatcacacattacaagttcctgggtgattccagggccaagggaagcaaggtttatatattgctgaggagaatgctccaacctgaattgtaagatgcgtcttgctgtcacattctacttgcatttctaaaactgtaaaaaggaattgcttggcttccctaagtgtaaaatcactaaggtgagattatgtttccatgttacgatgcccccatcacctcttgagatttactgagcaagatgccttgtgggagggggtttaaatgcacagatgtaagccctgcaatcccaacactcacaatctttatattaacaagaacatgcttctaattattccaaattctgttaaaattaagcccaaatgttcaattttccacgtgttcctcttaattagaaatgaaatgaaagagaaaaagaaaccatcaaaattatataaataaaaacagatggaagagagtgttggaagctcttttctataacattccctttaataaaattcattggttaatttggttgataaaagcagcgttaaaattaaataagaattaacatacactcggataaatatttgtcgcttctttcatgtgctaccatgataaaggtaatttagcttaaaagcagtcatcatctttcttcataactgataaagcattactaattgtgtgtgttaatatggtacaatatggaattgaatagagattttatcttaataacatctccattaaattaaggacagtgttgtatgacaggaaagataagtctgtttattccaagccagcacatcaaaagaacaactgtgggagatggtgcaataactaacattttctatagtgttctagctggcagcctcacatttataaggcttgtaagcaatgttgtaagcaatgctgttttgtgagataatctagataatgtttcattgagaaaagtgatattttaattatggtgtaaaagatactgatcttttcctttctgtgtctaataggatatttctacaaacaagatgctggatggaaaatgatctgattctatttcaataaaataaccaccctttgaggcaatttcaccacccctgagcctctgtgagcaggacatgaggggccaggggttaccaagaagagagttgacaataacgactggactgggggaaagagggggccatggtgtcagtgccttcctccttctgtccctcatggggctgtcttgtgcaggactgccttcctgccccatggcggtgcactcagctatgtccctgcaggctggtaggccaggattccctctgcccattagctgcagacagcctggcccggggctgaaaagggggagctgaaccctgatggcaaagagggagttagagtccagagctcccttccccacatgagcctggggagcttagctctgataagtacatcgttgccttggcaccatctgccctggaggaccaggagatgtttggaatgccagttgttgtgtctgttagtttgtattttaaaagcacatgccacaaactgcctattcagagaccggatttgctatgactgtgagatgctgtgccttgatatgctgacattctcccatgtcatctctctgcctctgggagcaaatgtcctccagccctacagacacatgcagggcctcggaagacgtatctctttactgccactccggccacgcacatgtctgataagaagcagtattatagtgaatagccagagtcaatattaagtattggataagaatgaaagtagtttgggaataattataaccacctcccctaccccaaaaaatatgctgttcaaaagtcagtctggagacacagataacaaccctatttttataccaacccgactgaattcttaatacatggcaaaaaagaagatcatggcttaacataaagcaggagatgtaataaataatgaactgcactaacagcttagcatcataaggagacagatggaaaacttctctcccgagatcactgcttccagaattagagaaagggcttctggacgtgttcagggtggatagttcaagcctgaatttcaatgagatgggaacactttttagtataaacgcaagattttcatgtctcccttttaggaaaaatagggattatggcgttcatctgtttcatccagaactagaagcaaaaccctaaacctcagactcttccagcatgtctgatccaatcaaacaagggaagatgctgcgggtgctttgtatg

SEQ ID NO: 24131 - DNA, 2300 bp, Homo sapien
cttgtgtgaggttagcctgaagtctgaatggagcccatagttggaaaacaacctaagaaaatctcttagaagcaggtgcttggggaatgcagttcactgacagcacaggaccctgcagatggtttacatgtggtttgggtttcacgagaaagaaggattcacttcccagtcagcatctggctctgccagatggtaaaggcgtgctttagtgtgtagacaatatgggggaaccacgtttttatctggaagtggatttcttagaacacaggctaaccaaaactacgcttaggctttgcgtgttgctgtgaagttgtctgtgaaatcgaataatcacaccattgttcagtgcaggagcccaaactagtccttacccaagaagtagtagcctctggatagaactgtgtttaatgtcctgttgtagtcccaggtgttgtaaattgcatgttgtaatcaaacgaatgtcaaaacataagaaagtataccttggatatagaaaaacctgagaacagtatcattcacttgaggatatatatatatatatttacacacaataaagtgagttaaaattgtatatgcattgggatgtcaaacataaaaccaccaagtgcaaagaatgctttgaaagtagaaccttgtctcattgatcagtggttactaagcatttaggaaacagtcatctttttctattgggatttgcattagaaattagccccatcagtaaatttcagtttactatccatttattaatatacaaaaacattaaaaaatctgccatgccatggtaatctatctattccaggaaaatagatcagaatatatgaagggaggatggccggtatgggatgtaaatattcagtaagtttttctccaacaccaacctaaaattatctttatttttttgaaagaaagttttacggtgatcagaccaggtgttatctgttaaaggacagtagtatgacttccatcctgtaatgcacgttggtgatattgattggaataactgaatctgagatactcatatgttctctctggcccaaccagctggtgcatttggttggcttcctcgtctgtaaggtggacattcttaaccagagggtcacgaccacatcacagctgcaagttttgctttgttcattgaaggtgattttttagttttaaaatatatatatctcataatatacaatgttgatggtatatcaatccatcaagcattttattagaaagactttataatattattaatttttctttagttttcagtagataaagtagtttcagtagataaagactttataatattattaatttttcttttagttttcagtctcatcatgggagttagaaaataccagcatcacttaattgtaaagagaaaatgtgaaagtattttccaatccaatgtttcaagtgcctcacttattgtgaatctcaaatatcatcttgagatggtttaatggcagtttggccaagtgatttctaagagattttattaatttatgcattaacaatagtattcaactttcttaggcattataacctaacccgatcatttgattggaataactgaatcattcattgattggaataaaataaagaaaacaaaatgcatctcacatgccagaagacctttaccagaagtggttcatgaaaatcagtatgcattgaccattctctgcctttcccttttggaaaatttttttgtaccttcatatcacagctgaatagttatcaatgccatttccatttggaagtatctaaataaccacaatgtgatcacagcttctccacgagccttcctgaagtaaagctggtatgcttgctataatacttggaacctgttgctttctcttcctcactctttaaatgtcataaggtcacacagttcttggaatcagaactattcagttatttcttcatgattctgcctggctttctgagtcttctccttcggcatgttatgtaaaagtctgaacaacaatgatgacgcagacgagagcaacatacgtttttattttttgataggtttttatttttttgataccagagggaattaactatgatcacatcgtgctctctctgttcagcatcacacgcccacatactgcagtgtgggagtagattggtacttactgagcacttagaaacatcacgcatcaggaaccgggtcagggtgacagcatcctacggtcatatcatgaaggaagcctcccttacaaacctaaaaaaaaaaaaccccagcttcagtttgctaccaattaagctaaagcagaacggtctgcttcctcctccgcctgccccct

SEQ ID NO: 24132 - DNA, 2300 bp, Homo sapien
ttattgcaatatgagagcatgaggaaataggagtataaatactagaatgaaaaggagtgaattgcacatgacattcttgtttaaaatattcaagagaatccattggcagattggactaataagaaactgtagccaagtggaaacaggatatgagatctccattctcacacaggtttgcagcaggcataacccaagcctaaaaaactatacttccaggagcacattttttttttccaaaatttttttttccaaatctcctttggaagatgtggaaaaaaatcagcattatagtaagtattacatttttttccccaaatctcctttggatttttggaaatctccaaaggagaattgtatatttcaaaatgcatttaactgtgtgattgaggcattttcaccaatcttttagttggaaataatctaataacatgctaaaaaggcagataccgtgaggagaatctaatagaattctataatgtcttcccagcaattaaaatgctcaatttaaaatcatatgaattgatgccagcactttcacagttactatgtgcattttcaaagatgaaatacataaaatctcatgttagatcataattaacagatgaatattttcagttgttttgatgataggaaacactaacttggaaacttaagaaaaatgttattccccaaacaagaattccattcttctcattagtttatctgtattacaaaaaagtacttaaattattgttaccatattttaaattgcgtcaataagaaatctgtcaaaatttgttttccttcttgttaagcaagtatctatatgatatccttcagtttgcctctttgcctgcaaagcctaaaatagttactatctggcctgttacagaaaaaaagtttctgccacctgctctagccagttatccatacccagcaatgtctctcttaataattaaaattgtattgtttaactcttgctgtttctttccccttctacttttttcttgttatactttctctatattacacatatgtggtgatgacacatttataagtagttacttttcaccatgtcttgatgtaatatctttgtgtgtaagttcttcggtgtatgcttgctcagttacctacataaactaaaaggaggctagtggcatttggaaagcaccaagtgggtagtttgaaaagaatcaaggtcaaggttttggaggaaactgaaaacgtacattaggtagagggatgagaacacatcttaggagctcagaaaatttgtggttgaactaaaatgcatagctgtagccctcctacaaggatcgtaggtgggcaaaggtagagtgagccaggccccacagtatggaaaatggctgtgatggttctgcctttctgaggtctggcttccagccttttccatgggaccctgccaagtcaatacttcgtagactgcaagtcagttcaaagagaggccagtcttggcttctgtgtagctggacttaagtctgtggcagcatgtgagttgttatcaggacctctgctgttgaggaatgcagagaaaggagtttttttttcctttccctccttaagagaatatactgtaggtacaattatggggacaaatcaacatctaccaagttgtgtagaaaaacaaattatgggccaggcatggtggctcacacctgtaatcccagcactttgggaggccgaggtgggtggatcacctgaggtcgggagtttgacaccagcctggccaacatggtgaaaccccatctctactaaagatacaaaaattagccgggcgtggtggcacatacctgtaatcccagctactggggaggctgaggcaggagaattgcttgaacccaggaggcagaggttgcagtgagccaagatcatgccattgcacttcagcctgggtgacagagcgagactcgatgtctgaaaaaaaaagaaaaaaaattatgttttacttttctgtttcttaaacatgaatttccttgcatactttcataaaaattattttaaatctcttctaaaaatacctagttatagcagtgagaggattcagcagttgctgaatttattattggagatgatgtagctcgtgtgtgtgtaggaatactcagtggcagtctgtttttcttggtgctttttcaagtcttgttaatcttcttcctgttttcctgagaggagctgtctaaaatatacttatcaaataactaaactctaaatatgattggagggaggaattctttcttattttgtttttatacttattttgtattgtattgtatttatactttatacatatgtatatatacact

SEQ ID NO: 24133 - DNA, 2300 bp, Homo sapien
cactctttgcgaactgctattttagaaacaatcctcctgctacaaagactaaatatttggctcacacgtgtaatcccagcactttgggaggctgaggcgggtggataacttgaggtcaggagtttgagaccagcctggctaacatggtgaaaccccgtctctactaaaaatacaaaaattagccgggtgtggtggcacgcacctgtaattccagctacttgagagactgagacaggagaatcacttgaacccaggaggcagaggttgcagtgagctgggatggcaccactgcactccaacctgggcgacagagcgagattccgtctcaaaaaaaaaaaaaagactaaatactaatattttcctagacattcatttataggaaaaaaagaggaactattttgaaaaactccaacaaaaaaaaccaaaaaacctcagttaccttagttgtcaatgtgtaagcctctagaacaaactccatcttttaaagttttgaacagtatcttgggaatgcagtaataacagtgacaatagtgtgtgtttgttgcagtgtttactactgcgggatgactgtgctttgtattttaaatgcatcctctacaatattctttagtaccacacttttttttttttttttgaaggagtttcactcttgttgcccaggctggagtgcagtggcgagatctcgactcaccgcaacctccgcctcctgggttcaagcaattctcctgcctcagtctcccgagcagctgggattacaggcacgtgcccccactcctggctaattttttttgtagttttattagagacagggtttctccatgttggtcatgctggtctcgaactcccgacctcaggtgatccacctacctccgcctctcaaaatgttgggattacaggcgtgagccaccacgcccggcctagtaccacattctgtagatgagaagactgggacacagagagatgagagtgtgacaaggtcaacagtcatatgcagtgactaaggctctgaatccacgtggtctgattcccagagccttgatccttaaatcctgcataatatgctgcatcacatccaagcttcacatttacttacttcttttctgccgtgcacgtgtatcgattcaaatcctcaaagggaaacccaatgtctcatctcaaccacagggccccaaaaaagggctcagtaaacgtcttctgcatgagggacagaacctttaaaccatgattagtaatggggctagaagtgaaatactcaaacagccagctccctcaatattattaactcattaaggagggaaccaataaaaaagaaaaaaaacaaaaacaaaaacgcttgttccttgaaagctttgaaaaattgtgtgtgtgtgtgtgtgtgtgtgtatacatacacgtatctattttacttgtttgctaaatagacacagatatagtcgggtagttaacaaacatgtaggttgtataaaaataaaactagtttatcttctttggggcaataaaatcccaatacctttgaggttgactcaggccttatccatttctgcaggttaagaagttacaattcttcaggtctgtaaactggtcaggccgttatcattgtccttcgttaatccactgtacctagacaacagttacatccccaacccggacagccaagggggttctttaaagaatagaacgtcccccttttactaagtaggcttattagaaaatgctagaagttacccttaacgcaagcaagtggcctttttccaagttggggatttaagaaatttacttatctattttttgtatttttccaaggtggttttgtgtgtgtgtgtgactttgttgttgttttggtttggttttttgcctttttccaagtttgggattttttttctttctcaaaaagcgaacctgttttctggatggaggcccagcgggacttgttccggccgcaggtctcggtcagaaagaacgcttttgcagcggcagaaagggagactcgggatccgggcctggggtcccgcggccgcgcccctccccactccccgcgacccgctggaacgcgcacggccggggacggcggcggggacgcgcgcgggcaggcggcgcgcacggccggataggcgcgagggggccgcgtgaggcggtgccggcgttctggcccccaaagccggtctagcgcgccgggcgtcttccttacttccgctgccgccgccgccacatcccgggacccgacgggccgcggcgcggaggcctcggggcaaggtggggcgggcctcccgagctcccaggaccccgcgcgcttcgcccac

SEQ ID NO: 24134 - DNA, 2300 bp, Homo sapien
tctcctgaatatctgaaaaaatagtgtaggcaaaatatgcagaagaaacatagggttgatataaatcagagctatcacagaggtttacttgatgcttatgcataaacaccagttcactggtagacagagcggatgttggaaaagtacttgttggttgacacttattaaaaataccacaaccatttgctattatatgtgtgtcgtgtatctacaatgaccataagtaactgtttttaataccatgtagataaatggtttcagttgaaaaatcatttattcatgttttttcctttcattcagtaaagacttgctgttaggcagtgggtggattttaatgtaaatggcataatccctgcctggtatttaaagaccttgggttagtctcctagaaccaaagtggtaaatactgtaataaatagaaatctctatttcttactggctcaaagaagtaggcaaaatattatggctataaagtagtgtataattattgctctgttatgaattgaaaatgttttggcaaaatgccacattttaagtaaaaaataaacagctccttctgagcaactcccacttaaaattattctttaaaagctcattcattaaaacaattatatattatgacttaggtaaagtattaacatgtttgagccatgtgtaaacatccagcagttattagtaaccacctaatctctaaaagagcaaaaattaaagacatgcggccaggcgcagtggctcacgcctgtaatcccagcactttgggaggctgaggtgggcagatcacgaggtcaggagtttgagaccagcctgaccagcatggtgaaaactggtctctactaaaaatacaaaaattagctgggcgtggtggtgggcgcctgtaatccccgctactcaggaggctgaggcaggagaatcgcttgaactcaggaggcagaggttgcagtgagccaagatcgcgccactgcaatctagtctgagtgacagagtgagactctgtctcaaaaagaaaaaaaaaataaagatatgcataatgaaaaaaacaaaagatatttgtttcacgtatactatgtatgttgccctttttgcaagaaatagaagacttcagtctttcttcttctttctatctgatgtctaatcccaaggaagcatgtttaaaaaattacttatcaattaaaattccatattcttacagaaatgactgggctcaggtacctttgagtccaaatttcttctctgatccttgatagctggatgaccttggacaagtttcttcatctttcctagcctctgtttcctcattcataaaattagggtaataacacattcctaatagattttctgtgagaattacatgaaataacctatgtgaaatgcctaaaacagatcccaacatgtagaagctcagtagatgaagttatttattattattaaacattgtcatgttttcctgaatactgacaatttgaaatatttaacttgttccttaaaatgaatctggaaagaccttaaagaggctaatttccagccatgatctaaaaaacaaacagagccccaattgaactttagatttttacaaatattatacagaagactccaaattttgtccttcttaaatgcaccaagataacacaacatcctttgttagaggtggaaaataaacagcttcgtaggaaacaagactttatcaagcaataatttagagatttgtgtcctttttttattttatctcttttattaaaaagagaaaaagccattcttgattcagaaatatttctcagatcattatagaataacaatcaggactctccaccttttattttcattgctgggttgtaaaacatggctctctacaatgcctactccagaaagatattattctacaaataagggctcagcatgacatttatgagaaagccggggtcctcctgtgcaaagctgattggtgatcagccagtgggttccggggcgctgcaaataaaggcactttcttcgctgggctgatcagatgcaggacagagggttgcctctgcctgtggaccttggggaaatgcgcggctcctgtcctagcagcacctgtctgtggccagcaaggagaaaccagactctcacaatgaaacatcttcgtccccagttccctctcatcttggccatctactgcttctgcatgctacagattccctcctcaggtaaggggagcttcctcagactccatctggcctaaactctgaggatgtctgagacagaccttgatcccccagggcagctctggagggagtcaagctttattctcccccgccagacct

SEQ ID NO: 24135 - DNA, 2300 bp, Homo sapien
tgaacccaggagggggaggctgcagtgagctgagatcttgccattgcactccagggtggggaacaaagagagactctcaaaaaaacaaaacaaggccaggtgcggtggctcacacctttaatcccagcactttgggaggccaaggcaggtggatcacctgaggtcaggagttcgagaccagcctggctaacacagtgaaaccccgtctctactacaaatacaaaaaaaaaaaattagccaggcgtggtggcgcgcacctgtaatcccagctattcggaagctgaggcaggagaatcgcttgaacccaggaggtggaaattgcagtgagccgagatcacgccattgcactccagcttgggcaacaagagtgaaactccatctcaaaaaaaagaaagaaaaaagaaagctttcaggacaccaggccatttcctgggtctgttgtcttaggtctgtttggtaaatattctgtgactaagcatgcgtaaccttctgggaatacaacccagtaggtctcagcctccttttccccatcccctattcaggatggattggctttggttagaatgcctctgaccggatcatgtggggaagagcaactgtagaatagctgagtcctggaaaacaggcctcagggaacagcaaaggctggggatgaggaaaggacaaaacaccacctgctctgttgctgtgcaggactgagcaagaagcacaggatcaaactcaaagttagttccagtcctgattttggtggtaagacccaaggaaaattcattaacaaacattgtgctgccagatacattaataaatccctaaaagggcctgtaattcagttgaaatgagtgagaaaaatcttaaggatccttataaattaaataaaaactccttgctctcaagcaatcatttgattcactctatatcaacgactgtgcactttagcatcacctgaggatctttaagaaagtatctgtgctaggcctcatttccaaggatttaatttgtctggggatggagccccaggacattcctagtttttgagggcttccaggtgattctaatgcatagccacggttggaagccctgcgcctatctcacaggtgtgtgggtctctactctctgtgtccgcttagttgccaggaggcagcaagttagcccacgtgtgcaagatgcttccttccataccaggtaggaatattgctctcttaaacttggagtgtgcctgggcagaagctctggagcccaatacctgcattttacaagtcagattgctgctttttgctcagtgcctgtgtgcctgcatacatgggtctcctgatactcaggcacggcagatgactttcacctttgttttagtgttttgctcactgctgcatctgcagagcctagaatggtgcctggtacacagcaggctctcaatgtcttattaatgagttgccttttccaaggctgaagtgatcgtgggtgaattccagaagaccctgcatcatttttatttatttatttatttaagacggagtctcgctctgtaacccaggctggagtgcagtggagagatctcagctcactgcaagctccgcctcccccgttcaagcaattcttctgcctcagcctccagagtagctgggattacaggcaaccaccactacgcccggctaatttttttgtatttttagtagagacggggtttcaccatgttggccaggctgatctcgaactcctgacctcaagtgatccgcccgcctcggcctgggatcacaggcgtgtgccaccgcgcccggcctagaggcaattttctatttctgacttgttaggctagtcagagcgagacgtctttacaggtttgggccggcagctggaaaaggcacacggccccgggctcctcctccacccagccccacccctcctccgctgaagaccagccctaataaggcagccaccagaattagaaccaggtcaagtgcactccgagcaggacagtaggcagatcctatctggcgcatgcgaacgcttctgtgccagttccttgaagagcaggcgcagactcaaggctgttgcttccgcccttactccccgccgctcgtccctgggcggggcgaaggctgggctgggggaagaggcgtggcggcgctgtgcgcgtgcacaaaagagagctgaggggcgggggcgctgcggcacagctggtttgagcaactgaactggaaacaagatgcaggtgagctaggacgggtctcgggtctgggggctgcggcccgttcctttgtctcgttaggcccgggcgggcagtggacgcccgccctggggga

SEQ ID NO: 24136 - DNA, 2300 bp, Homo sapien
cttccaaagcaaaaaaggaagggaggtgactttaaataatgctttaaaaccggttagaagtacacaatttcatcctttagtaatattagtcatggccacgctctaaaggcggggtgaaacctacttgcctggaggaaaaggacggggtagaaaaacaaagcaaaataaaatccatcaaacaaaagtttcttcttttggaaagggagggacttcaaaatcatgacaggccaaatgcctcctcctctttcttgaaaagccctccaagtcagaagcaagcctgagaataacagctgctcttaggatgctcaaagctccttgcagctgattatttttcaggaggagaattagacacaaataatacaagtgggaaataaagagaatgacctactttacagggggggtaaaaaggagctctgtgtgagcgttttgatctaattgacggtgtggggttgcatgcccaaataaggcgctgctggtcggatctgcgagggagagggcacgtctcaaactcgagggagaggacgagacagcgagaggaacagcgtccggggcgacccccagtccaccgcgggggcctggcgcgcttggggcaaaggccctaggagaccccttctggccacaaaatcgagtatgacagaaaagggccagcgggggcgctttccttccagggccacttgccggaatgtaagagggacggagagacgtccggaaaaggctgccacgctcggagcgctgcgccaggccaggcacctaggccaggggagcggagacctcgtgggagcgggcagggggacctttcccctctcccgggcttccacccaggcgcctccccgctgtgaacgccgccgcccaggtgaaggggaaaccggccacgtttccggacctcggcggggcacacggtctccggttttcaccggctctgtcttggagccccgaagggcatcagacagcagccccggcacccggggattattcctgtacctctgcctccctccgcttggcgtttgcgggaaccttggtaaaatcctccctgtttctcgcgcgcgcctctctctccagcttctttttcttggattctcgcctgtctcctcccacagaggaaaaaaaaaaaaaggtcacgtatgtttggaaaaatatgtaggtcagtggaacatttcctgcactggtgcaaaaggagaggagggcagcggaggaggggagggagaggcagagtggagctccaagtgcccgctcctggccgcagccccacaccccacgtgcccctgccggggaggggggcaattagccggttcctttccatccttgacccattttccggaccagctacgttcgccttaggacaggcactggttattcctccccagcagtcgctgctgtcctccgccgaccaccgctcgcccgcatcttccccgacccccgcctcccacctgcccccgggccgcacccccgccgctcattgagaaatcgcagtggtccccgcagagacgcgctttgtgccctgggtcgagacctgcgcgcaaccctgcccctggaggacagtgtggagggggtgacagtcgcgtgctcgtcccccttcatcccctgcgcgggacagcagggtggcggcccgcactgcgagggtctacactaggcgggggcggcagattccttgttccccccgagtgacaactttaatgggacctcggctggcagcctctagtccacttgcctctcctctgggccggctcacctggaagcacaacccccccctcccccagccccggcgcccaaccccgaccctgcgccccaggcccgaccccgccgcgcgtccctggcagcccagcagaggctgcggcggcctggggactcgcgggtgtctgcgccgcccagggaagccgggggtctagggggccgggggtccgtctgcctgcggcgcgcgcggggtgcttgtcccaggctgggtcggggccaggagagaccccgcaggcggaggcaggcgaggggaggaggaggagggtgggggtaggagggggaggtggagagggaggagggtggagggaggaggcaggggaggaggcagaggcggaggcggctctccccgccggctctgcgtgcggaagagtttgccgcgcgagcagccggcctctcgcaggagccgagggacccgcgcggctgcggcccaggagcggcggccgcggagcccggagacccgcagccgcggcggcggcggcggcggcggcagcagctagagcagcgcctcccgccgccgcccgggaggagctcgccgcgcccgctcgccgcctcgtctcccagcggcggcg

SEQ ID NO: 24137 - DNA, 2300 bp, Homo sapien
ggtgatggttgcctaacagtatgaatgtgcttaatgccactgagctgggcactcagcagtggttaagatggtaaatttctgaggtgtattttatcacaattttttaagtgaaaaaataacatggtagacaacagaggtgacaaaatagtaaaaatatcagcacggagcttctgtgacaggtgcaatgggaactcagcttagaggccctctcctcacactgggtgcagctcagctgaatggcttagtcgggtcaagtgagaggaacggggcagggaaatgagagggatgctgaagaagaggaaatgggtgtagagcatccaggttttatagattcaggaaatgtctgcgggataaacatacaaatcacagaagatgtggttgataaagaagagctattagtcatttttagatgtttagtttatgactcagcaaccctggtcatccaaacaggatcccaggagctcaggagagtggactgaggagcagcagccagccctcctgtggacaagctctgtccaggggcccctggtaaagaacacagcgtggccgggtccttgctcatgccctggggctttgatcagccaccattctccttggaagcacaggcttggggtagggcatcattcaatgaattgacataaaactttgaacagattccatctggaaaacattaagcacaggcctgtttgcagatgtgttaacgctgactcaattgtaatacaggctttaacttctaagcagcatttcttgctagtccattgtggaatatgcctgctgttgactgcatgggcattatgtgaacaggggctgtggctgcagaattcatctttgctttggctcagacccatgtttgtgtacgtaggtgaccaaaatcacaaaactaaatgagctcagagaaagattgattggctccattgaaaatttttatctgaaactttatatttcaagagtaattggtggtgcatttgcgaagtgctggtttgggagttccgactgaagaccctgtgtgttgagcgtagaagcgggtgggcagtggtgattcagcttctccatggtccccacctttacctcgatcacactttgccctcccagccaccgcagccttcagcctcccactcccacagctggcattggcctcatgagtgccctgagaacggttctgcttgatgtgctgacttggggggcgcaccccagacaggtggggctctgggaaatgtgtgaatgaagaaaggagccagggctatgcagctctgaggggtggagggaacccaggcctgcgtgtggtaggagaggaagctggatctgtgggcctgagaagcatcaagccagtggcctgggagagtagaggctccggtgttgaggaagaacattcctggattgttacgtaatctttcacatctgtgcaccttcgctgtctcaaggagagtaaacgccctaagggaggaactgcggattacactcctttggggctgattcttccaggccacttgtcagaggagcttgtgtggtttgaatggacagataaacactctcctttaggatgtcataggccactggggtcctgcaagcaggagtgaacaaggcccgctgtggtgtcgctaacggatcccaggcaggcactgggaggtgcgtgcgacctaaggcttgagaggaacagatgctgcttcactgagcaggtctggacagcacttctcaaagtgtggtctgaagacccttggggtccttgaggtcaagacattttttcaaaatataattaactcgttatttgctccttttaaaagagctctccttgtctcatgagtgtacacgacataattgttctgacttttccagaagttacttgacatctgatgacttcattgctccgatgcccaatgaaagagtgcctgtgcatttaaacatttctcagccttaacccacatacacagaagtgctttggagacctcagtccattttgagagtgtaaaggggtgccaggaccaacaagtttgagaaccactgggctaagaccaaaatgacaacaacctgaaagacttttaagaaagatgtagaagcagacagtaattatccattctttttaatttttttttttttttttgcaggaaaaactgcatagaaaatctaatggatgaagatgagaaagacagagccaagaggtaagatgcagctgtccccctgctcagcagagctctctggcccccgggggtctgcctggcagaatctcgctggctttcactctgtgcaggtgaggccaccagcaagataggcagctgtaggacacactctctgtgacatattgc

SEQ ID NO: 24138 - DNA, 2300 bp, Homo sapien
tgaagaacaggtgtagtgtgtatcatccagtcggaaatttatcattgaggtttctgatccttggggagtcctggagccctgcgaaagaatgtcttctcatcaaaatgcatatatgtataaatacaaacgcaatcgccgggcacggtggctcacgcctataatcccagcactttgggaggctgaggcgggcagatcacaaggtcaggagttccagcccagcctgaccaacatggagaaaccccgtctccactaaaaatacaaaaattagccgggcatggtggcgtgcacctgtaatcccagctactcaggaggctgaggcaggagaatcgcttcaacccaggaggcagaggttgcagtgagccgagattgcgccattgcactccagcctgggcaacagagcgagactccgtctcaaaaaaaaaaaaaatacaaacacaatcttgggcactgggttaagaaatccctttaaagtaaaagctcccaaactatccgtggtattgaaccagtttggtttttatagcttcgctgtctgtcactgtgcagtgcatttgtaaaatgcagattcccgtgtgtggacgtgatgtgcagagatgtcaaatgggcatcaaggttcctccgggcttattctcgcttcctggaccgacttctctgctgactaggaacacataattcacaaacagccgtggtccagggaccccgctctaaggagcctggtcaaaggcaaactgtaaccaagcagcaaggtccccaaattgccatttacctcagcacatccagccacatctggtatttctgttttgcacaaaggcctgtaggtcacatgtcagtcacttcattcctactgtaggtgtacaatatccacccccactgcagccgtgacacaaaagacaaaacggccacgcagacgcacgcatgggatttcatacccaaggccatgggacacagaccagcccattgacatagcccagagatgctggcagtttccattcttctaacactagctaggaatgcggctcaggagggtaatcactgttttgttttcttctttagcttaaaaattatcccaacctttgtttggtttattattatttttttagacagagtctcactatgttgcccaggctggagtgcaatggcatgatctcagctcactgcaacctctgcctccgaagttcaaaccattctcctgcctcagcctcccaagtagctgggattacaggcgcctgccaccacgtccagctaatttttgtatttttagtaaagacgatgtttcaccatgttggccaggctggtctcgaactcctgacctcaaatgatccgcctgcctcagcctcccaaagagctgggattacaggcgtgagccaccgcacccagccccaacccagcccctgttttcatgtgcctataacagctaagccacagaggatggaaaaacggtccttcggagtcagactgtcacagctgctttctcgtcacactgtatttgaagcagagacatcctgggagccagggtcagtcaggagcgagaggtcgaaagacaggagaccccttgccctccccggttctccactccaggggacactgaggctgcagagaatgagtaacaggagaaagcctgggaaggacccaggaaggtccaaaggcacctgtcccagtggatgagtttacagtccactgccagcagcaaccttatttctagaacctccttcccccttcttggaaagtcaagatgctgggtggtgaggtgacaatgttgaggaaataataaaatggaaagtcagttacgaaaatgtaaataataaaaacaaaaggcgagaaagggtaataaacgctgcttttcggctgcaagcctctctgaggctttaggttacgtatatgtatatactctacccaagcatctttggaatcgtccccaaacaactatggtatttgtctcagcagcttctgaggttgtcgacatatttagaactaaagtcacgcccactgattctttcctcttgatgctgacatgaggactgtttgatgtgtgtgtttcaggacaagggctcaagcctggaacctcggcagcactttaacacactcgacgtgggtgcctcgggccttaataccagtcattcgccatcggcgtcctcaagaagttcccacaaatcctcgcacacagccatgtcagaacccacctgtgagtgcgagtccatggatggggagtgggatgtccacatcagaccagagggacagccccacagagggtcccgggcccaagtggaatcagggcagtctgtgcctccgacagaggttgccgt

SEQ ID NO: 24139 - DNA, 2300 bp, Homo sapien
ttggggaggtcccgtgggatggtagaaagatcagaacccagccccagctcagccacctgcccatctcgggcctctggtaagtggctcgaccccacccatgaaacagatgcttgagcgaactgatccgtaagtctccccagcgcgcctgcatggtgggatcctcgcctgcctctccaaacctgcgctgacactcagcagatgtcagcctgtcggtcctgtactgcatatgaggtgggactgcactgagtacaggaatggggtgaaaaacgtcagatgctgggagccagagagccttccccctaaagaactccaggctaagggcctgatggactggaacagtgtatgttgagaatcatgatagacacagtgccatctgatgtttttaatacccaagaggtacttttgtttaaaaagccagtttcaggtctgtcattaaattattattaaaattacaaaagttgtctttcttaaaactttagagtcaactgacagattccgttttatttatgaatctactaatttggtctaaaaagagcaatgctctaactagatttttatttatgttcaattagttgataggttgattgtgaataatcaacattatctaccaaaactattcatttacacatttaatttatctgaatctttcaagcattttatgtacctaacaaggcagacttataaagctaagaagtaaaatctttctaagcacctaaacaactgttttatttatttattcatttttaagacagagtctcaccctgttgcccaggctggagcgcagtggcacgatcttggctcactgcaacctccgcctcccaggttcaagcaattcccctgcctcagcctcccaaataactgggattacaggcgtgcgccaccatgcccagctaatttttatatttttagtagagacagggtttcaccatattggttaggctggtctcaagctcctggcctcaagcgatctgcccgccttggcctcccaaagtgctgtaatacaggcgttagacacagcgcccagcgtaaacaactgttttaaatcaaatacaccaaacttatttgaactaaatcaggattctcaagaacacctcaaattctcttaaatctttcaaattaaaaccaccaagctaatatcccatggccttttaaatgtctctgagacaccttaggtaacaaaacacagagatgatcatgatgattacaaaacttgaacataattttaaagtgcatggacttaatgttatgtgatcatatccatgttattggcctgcctgggtatgtggttccttaattaatgacagatctgccatctcagctgagagcactggattgaaaattctcaacagtaatgtgggtacagacacgagtcactggtcagagattcaagggcaaacacagagcctggtcctactgcgagggcaatgtggcccatgccacaggtgagccatccctctgcccctatatcatgaggcaatattatcatgactgcatcatgcattccactcaccaggtatttctcccttctaggaagaagctggtaagccaacctcgactctaaacaagtacatcacattatttagagaacatctgggtctaaacagctttcacattgttaggcctcagtcacttgcctgtaaccttcatgaaggcagagagagtgtctctccagcccatggctctgtggccagtgcctgacactgagcttggggcatcacaggtgctccatgtccaccagtggagtaaatgaactatttctaggcagctcagagcaagaaagttcttactggcacagggaatgcaaaggaggtgcacactggtgaggtacccatgaccccaacttcacaggcatttctattctgctcccagatgttcctgcagcagccagctgtatccctgagcttcagcagcacccagcgacctgaggctcagcagcagctacagcaaaggtcagctgcagtgactcagccccagctcggggcgggcccccaacttccagggcagatctcctctgcccaggtcacaagccagcacctgctcagagaatcaagtgtgatatcaacccaggtaaatgtgctccttgccagcttcactccttgcctctagagcagacaccctcttgcagtttgggacatacttgattcctgcagcctacgtgaactgaggcctactgccctgttccgttatggactgagggtagatttgggagtgagccttcttttccttcttctgttaaagtcactttgaaaccccaagttgtattggcttccttctgtgttttataaatgtccacctcagtc

SEQ ID NO: 24140 - DNA, 2300 bp, Homo sapien
gatcatgatgattacaaaacttgaacataattttaaagtgcatggacttaatgttatgtgatcatatccatgttattggcctgcctgggtatgtggttccttaattaatgacagatctgccatctcagctgagagcactggattgaaaattctcaacagtaatgtgggtacagacacgagtcactggtcagagattcaagggcaaacacagagcctggtcctactgcgagggcaatgtggcccatgccacaggtgagccatccctctgcccctatatcatgaggcaatattatcatgactgcatcatgcattccactcaccaggtatttctcccttctaggaagaagctggtaagccaacctcgactctaaacaagtacatcacattatttagagaacatctgggtctaaacagctttcacattgttaggcctcagtcacttgcctgtaaccttcatgaaggcagagagagtgtctctccagcccatggctctgtggccagtgcctgacactgagcttggggcatcacaggtgctccatgtccaccagtggagtaaatgaactatttctaggcagctcagagcaagaaagttcttactggcacagggaatgcaaaggaggtgcacactggtgaggtacccatgaccccaacttcacaggcatttctattctgctcccagatgttcctgcagcagccagctgtatccctgagcttcagcagcacccagcgacctgaggctcagcagcagctacagcaaaggtcagctgcagtgactcagccccagctcggggcgggcccccaacttccagggcagatctcctctgcccaggtcacaagccagcacctgctcagagaatcaagtgtgatatcaacccaggtaaatgtgctccttgccagcttcactccttgcctctagagcagacaccctcttgcagtttgggacatacttgattcctgcagcctacgtgaactgaggcctactgccctgttccgttatggactgagggtagatttgggagtgagccttcttttccttcttctgttaaagtcactttgaaaccccaagttgtattggcttccttctgtgttttataaatgtccacctcagtcccttgctctcgtgcttaaagatatcactcggctgaaatgttcacctttgatgctgacttagggttggaggcagatatggccatcccagagacccactggcagctgaatgtcccaacactcaacgtccatggtccccgccatctactctggttttaaccattacccacatgagcagccactgctgttcactgtcccttgccccaggtgccccctgctcctccaggcgccccctgctcctccaggcccccactgctcctccaggtctccctgctcctccaggcccccattgctcctccaggtctccctgctcctccaggtccccctgctcctccaggcccccactgctcctccaggcctctctgctcctccaggcgccccctgcccctccaggcccccactgttcctccaggtccccctgctcctccaggcctccctgttcctccaggcgccccctgctcctccaggcccccctgctcctccaggcccccactgctcctccaggccccccagactctttgccaaacccttgtagccatttccacctattccaagccaccagtgaccttgcaattggacaaaatcgccagcagataaatggcactcaaatggaatggaattcagaagtctggagcagggcttctggaggataacagatgggaaggcagcctttcctccagcctcacattcccatgccctcgtggctttggtaaagtcagctgagctcctggaattcaccaagacccaggggaacaatgatgagcaagagttgtcctgggcctcgaggagcctgtagtccagtagagaatctgggaacttagataacctgcagtacaatacagataaacacacatatggaagtgtttaggccatctttcttcaaatgtaagggttttgcttgaaaatacagccttttgatttaaaaggtcatcagaaaaataggtgagaagagctaagaaaattttggaaaagagaaaactgaggaaggatttatactatctgatattggaaaattttgtaaaaactaagaatgagagcactgtgttatcggatgaatggacaatcagtgaaatagacagaaaacccaaagcaggtgcaagcccacttcctcactcatttattatttcactcagctccctgcgtgccaggcactaaattctgagcactgagggaaagcagtgaacaaaaaagaa

SEQ ID NO: 24141 - DNA, 2300 bp, Homo sapien
agtccaccttgttggccctgtctggggtctccctatgcctcaggataactttctaggcagcctctgcccctgagactttctggccctccctttggtcacaggagggtaaggagggacctgcaggttgtggggagccatctgtaaagttccgttcatgtctatcattaggtgggaggaagtgggctggttttgcttctggattttacctgttcttcctaaatgatccaaataagtggaaataggctgggcgcagtggctcatgcctgtaatcccaacactttgggaggccaaggcgggcggatcacctgaggtcagaagttcaagaccagtctggccaacatggtgaaacccccatctctactaaaaatacaaaaattagccgggtgtggtggcacgtgcctgtaatcccagctactcaggaggctgaggcaggagaatcacttgaacttcagtgctctgttggtgggaactgtccagtgctgcagccactgtgttaaatgtcggctctgtgtccccaccaaaatctcttgttgaattgtaatccctagtgttggaggtgtggcctggtgggaggtgattgatcatgggtggggacttcccccttgctattcttgtgatagagttctccctagatctgtttgtttaaaagtgtgtagcccctccccctcgttctcgatctcctcccggccatgtgaagttacttcctggttttttgataatcaccattgtaatgagtgtgaagggacatctcattttggttttgatctgctttgccctaatggaatggctactgatgctgagtatgttttcatgtgtgtgttggccatttccaggttctctttggagaaatgtcagccccaatgcccattttttgattgggttgtgtgggtgtcttgttgtggagttgtaggcattctttatatattctgttatcggtctcttattagatatgtgatgtgcaaatatcttcccctactctgtgggctgccttttccctctgttgatagtgttgatagtgtcttttgatggacaaaagtttcttttttttttttgctttgagacggagtctcactctgtcgcccaggctggagtgcagtggtgtgatctcggctcactacagtctccacctcccgggttcaagctattctcctgcctcagcctcccaagtagctgggactacaggtgcccaacatgacacctggctaatttttatttatatttttagtagagacgggggtttcaccatattggccaggctgatctcgatctcctgaccttgtgatccgcctgcctcggcctcccaaagtgctgggattacaggcatgagccaccgcgcctggccaaaagtttcttatgaagtccaacttatttgttttttctttgttgctcgtgcttttggtgtcgtatcaatactgctttcttaaaggacctgttttctccttcccacgtgaaacaggtacgcccagagccagaccgtgtttcaaaatccagacgcacaccccgccaacagcagcagcgccccgatgcccgtcctgctgatggggcaggcggtgctccaccccagcttccctgcctcccaaccatcgcccctgcagcctgcacaggcccggcagcagccaccgcagcactacctgcaggtgggtgccacggcccagggggcccccgtgcaggcctgggagccgggccacgctccacacccgaagtctcagagatattttattcccttgctttcaaggttgttctatccctagtatagaagtaagccccagaaagattgttatttgattgtttttcatgcttaaagtttatgaagtctatgtctacagagtacatgaaattacgagtcggctattatgccttatgtggttatgtgctaaaaaggttcttttttaaaaaagtagtttctactcaaggatttgcatcttgatatgttcacagtttttagagcaaaagtcgaaaaacattgatgactatgttggacttttcagtgtgtttataaagtcctatataaacataaagttaaatcacatttagttaaagatccattaacctgccttcataaatacagtgatgtgtgaaattgggcttgccaggaaaatttggagctcatttacatgtggtcactacttcgaaggcaaaaattacttcaagcaagtgccaagtatgtcaaaagcagggagggtgagagccactggtccgcaggttcacgtgggagccacacgtctgcgtctgccaagctgcagaagggcctggccttccctcacccatgtgcagggtgcccctcttcaccccagcccttc

SEQ ID NO: 24142 - DNA, 2300 bp, Homo sapien
gtcagctggcaccagacttctttctgatttattacagtaacacttttactacctctaatggatggtaccctagaaagctgtcccttaatccctctctaggtgctgggagccagatagaaggggcaagatcacatcttcagagtgtgattgcagggagtcaggatcagaacaatgatcccaaaagggccatggggtatgaaaggcctgaggcaggctttagggtgcctgagcatgaggaagaggaggcagaaaggagatgagagcaagcatcatttggttgaaacaaattgtgccagcccctcttcttctttgttaacagaaccccacttctgtgcattaaaagcaacgtgtctatcttgtaatcctagcactttgggaggccgaggcgggcggatcacgaggtcaggagatcaagaccatcctggctaacacggtgaaaccctgtctctactaaaaatacaaaaaattagccgggtgtagtggcgggcgcctgtagtcccagctactcaggaggctgaggcagaagaatggcgtgaactcggcaggcggagcttgcagtgagccgagatcgcgccactgcactccagcctgggcaacagagcgagactccgtctcaaaaaacaacaacaacaacaaaagcaatgtgtttagcccaggccacaaaatacacaacccatcattaggccaaggtaatcgtgacaatcccatttgcttttggcaggcatgtgctctcccagcctaactgaaatggagtccctagtcctaaccaatgacaggcagaaatctactggaggtttctggaaaggcctttggagtctgataagagacatggggggaggcttccttgtccaccaccatctcttgcctttgaggactgctgggatacctagaagtgcaacatctaccctgatacaggatgcaaagattcctcatgagatcagagtccctgttccagccctgaaattgcctgcctccagtctcgtctgtgaggtcttgaaacatgtccattgctgaaaaccctgttagtaggttaggggtgacttggtccgggcattttcccattcaccaaagtgccaggcattaagtgggccctttcaacttggaacatcaagctccttcgttctgggaaatttccttaaattcaaggtaccatcgtcatgaaatttctgaactttaaagagaagatcctaaaatctttcagagagaaaaaaatgacgcatcacttctcaccacactgaaaaactgaagacaatgaagcctgccttcaaaatgctggggagaaattcttttcaatctagaattccatacaagccagaatttaaatttgagggttgaataaatactcaggtatttgagggctcataaactttttagctagtgtactcatcttaagaaaccactaaaaatggtgtgctcctgtgaaagaagggagttcgacaagaaaaaggaagacatgggtccatagatccaactgtctccgaatctctagactggtgacacgcagttcccagttctctggggacctcctcagatctccctgtcgtgtcatctcacatctgtcatctctcaggtcatatccaacacactgggccacccacgcacagggacgacgcgacagccctgtggctccaccgcacaggacagccacgactggcaatcctgtgccggccctgctcgacgcaagcacctccagcgccgggttgcgtcttagtgaccctgggaccgccagccaggcaccgcgcccgacgcaggctcagtcagtgttggtcggatgcatgaatgaatgggaaaaacgaagtctctctctccctggccctgctcccatacatctgtaggcctaggtcttggttttatccgaagacttagagaagggacgcaagttccttcgcggagccagaaggaatccgtcgagaagcgggacctcaagctcgcggcccaaaagcgcggccccgccacgacgcctgctagctggccccacttcggcgcgcgccgcttacatcatagctcgcctctccccttccctagccacacccccttgcctggcgacccggaagttgtacttgcaactgcggctttccttctcccacaatccttcgcgctcttcctttccaacttggacgctgcagagtgagtatgggtggcggagtctgggctcctggaatccagccccatcctcctttgggattgtgctaactgggaccgcaaaatctctcccgagccagcccggggctccggttgtggggagatgggaatacaccctgcttttaaaggctcccagagcctgaggaagaaagtgacca

SEQ ID NO: 24143 - DNA, 2300 bp, Homo sapien
gggttaagtgaagctggtgtcattgcaaaagttcaccttcgaatacagataactttagcaccttattcctttggcccagacagctttgttgagcctggtgtcaatgcgcacatctggagttcccatctccttcatggcaaatttccgaatctctttgagtgcccgaggtgcacgcttcttgaagcccctacgattcaaacataagtgaacaaattaaaggagcacaaaactaaattaggtacatgtgagaaatcctcaatgtcgatgataggctcctggaaactgactttaagcaatgtcttatgtaacaaaaccaagtttttacagcatacagtaggccagtgtgcttaaagctcagtgaagacttactgtagatggtatgtcctcctaaaaccagcctaaaccaacccttaaactaggcagtaacaatccttttttcccaccagtgtgcaatgcccagcaattagcataacacttaggacaagaagatgcataatccactttctgaagtcctcaatcaaaatactaaatttgattaaatgtcatgtcttaagacaggacatgtttttggaacagatcattcaatgctattgacttcatctatgcttaaagagcaggggcctgaagtgtgcaggcaggtcgcttcttgagtatgatgaatggcagtagttagcgctatgaacccatcaagcaagctcacttcacttaaatacttaaaacatccagaagtaaacggtactagaaataacagcagctggcaatcccttgttcttcacacagcttatgtaagcaacctattgagtacatcagatggtatctagtactacagagaaagacaaaccagggaaaataaagcattagggaaggggactgcaagtttctataagacggccaaggtgggccaggtgtggtggcggggtccggtaatcccagctactcgggaggcggaggttgcagtgagccgagagcgcgccactgcattccaggctggagacagagcaagactccgtctcaaacaaaacaaaacaaaacagatggccagggtgatattggactcaaagtctgaaggcaacgaagcatttatttgtggaaaaaacattcaggcatagggaaaaaaagggtaaaaattcaacaaagtagctactttgaaacaaaagcatgcccggtatgattaagcgggtcagccaatgtgggatcatggcaagaactcttgatttctaacctaagatagaaggccgatggaggatctgagaatagaccacgcatgtttgggtagggaagggaacaggagtagggagctgctgctgtccgcattcggctaagaaagaataatgggggcggtcagaaagaccaatgcagctggtcagactgtgaatgtattcggagggtagagcccacaggatttgttaaattgccaatgaatgaaacagggaaggccacaagaggaaaagattggggtggaggtgattcggcacatctctcggtaacaaccagacgcgtgagttcgagacccagggcggctagagggatactcacactccatggatgcgcttgtgaatgttgatggtgtattctcgggttaccacttcgttgatggcagaacggccctttttcttctcgccacccttctttgcgggagccatctaaatgcaggcgacaaggaggctcagagcagagtttaacaagctcaagccaagtcctccctcccagcctcacgctgtcactctcggggcgcttccaggtgctgagagtctggccaggctaagtcggtcacccagtggcccacgcacccgcgcccctgcgcccctcagatgcctccgacccggaaatccctgccgctccggctcccctaagcctggtcactttcttcctcaggctctgggagcctttaaaagcagggtgtattcccatctccccacaaccggagccccgggctggctcgggagagattttgcggtcccagttagcacaatcccaaaggaggatggggctggattccaggagcccagactccgccacccatactcactctgcagcgtccaagttggaaaggaagagcgcgaaggattgtgggagaaggaaagccgcagttgcaagtacaacttccgggtcgccaggcaagggggtgtggctagggaaggggagaggcgagctatgatgtaagcggcgcgcgccgaagtggggccagctagcaggcgtcgtggcggggccgcgcttttgggccgcgagcttgaggtcccgcttctcgacggattccttctggctccgcgaaggaacttgcgtcccttctctaagtcttc

SEQ ID NO: 24144 - DNA, 2300 bp, Homo sapien
ttgtagacgggtctgggcattctattttccacaacctttttacatcccagatatggatcagttttgcattctttagcatcttcccacaccaacaatttaaaaagggtacaatgacgtgtgtcacccctagcttaacagatgaattcacattttaagaggtaaggacatttttctaatgaatttaaatggctttatgggatggagaacttacttttgaaagtggtaacaggtacataggtaaccaaagtatatagcttatttggtgaatcttcatcctcattacgttttctggacagccgcacacggattcggtatggcacattcctaataaaaacataattgtgttgctgaagtcaatgcctcctttcaaccaagcagccactagctgtattcacatatctcatatgcctgcttctaatgctgtcctttgctctactctgaccaacctagaacttacagttccctggaaaatgaaacataacccccaggtgaacattaaatgctgttaccacaggagggatgcttgtttgaagacatgttaaggtagccaccattgatacccaaccggttaatcctaagcagatatctgggtccaaatggtccaaatgtgttagtcttttgtctatcaccagaaactttgttacgtgatttttctgttacattaaaatatgaagaaacggcatggtggcttgcccctgtaaccccagcactttgggaggctgaggtgggtgcatcatctgaggtcaggagttcgagatcaccctggccaacatggtaaaacccctctctactaaaaatgcaaaactaagagccaggcgtggtggcggctgcctgtaatcccagctacttgggaggctgaggcaggaaaatagctggaacccaggaggtggaggttgcagtgagctgagactacgccattgcgctccagcctgggcaacattaactccatctcaaaacgaacaaaaaacagtgttaaaaactctgccacaggcgcatactctatttctctatcttccacatgcaatccccttgtcctgtcttaccctctccgtagcatcacagctgattctctttcctctatcgatgccgggtattgttctaggccccgattcctataaactcaggacttctcttggctcctgtaatcccattcctcttatcccaaggcaggcatcggaggacacctctcctgctgcacccttcaatgtccacccacagaagagctaggtctcaggtccctgtcttgttcatctcacttaatcctaaggtttaaataccacacagatgcagacagtcctcccccaacccgtttccagaatcaactagtccacactgtcatcattcctctagctgcccctcactccacttctgttctggcacctcatgacgtcctttacagcacaagcctcccctgctttctggttccactttagagcagggtcccccaacatgagaactaacatctgagctaggcaattttttgttgagggagcagccccatgagttgtaggatgtttagtagtccctggcccacagtatccctcagtagtgacaaaaaacactgccccccacccccgccacaaccccgggaaggacaggtaaaactgccgcaggccaagaaccacttctctcctggtggacttgccatgatgtctagagcgaccctcacccctccctcctccactgggctcacagtgatttattccactttacctgcgttcaccaccccgctcccagatcctgccaagcttcctctctctgcaatgctctttcccaccctacactgctggctccttcccttgggtctcagttcataagccactaaattaaggggcttccctgcagatactacacaccctaagtcacggtcacagtattttttttttttatacttccacatgcattaaccaaattactgaactgatatgggctcttgcagggttaagtgaagctggtgtcattgcaaaagttcaccttcgaatacagataactttagcaccttattcctttggcccagacagctttgttgagcctggtgtcaatgcgcacatctggagttcccatctccttcatggcaaatttccgaatctctttgagtgcccgaggtgcacgcttcttgaagcccctacgattcaaacataagtgaacaaattaaaggagcacaaaactaaattaggtacatgtgagaaatcctcaatgtcgatgataggctcctggaaactgactttaagcaatgtcttatgtaacaaaaccaagtttttacagcatacagtaggccagtgtgcttaaagctcagtgaa

SEQ ID NO: 24145 - DNA, 2300 bp, Homo sapien
tgggagtcctggggcgtcttcccagtgtctgcaaaaaccgagtcctcaggagaaggagctgaagcccgcagctcctccccacactcctgggagcagcttccagagctgctgcctcgctgccccacctccccgatctgcagcagcagtgtggtgactgtggcgatggcttgatacaaatcattttcttctggatcttcatggaacatactgtacagagttttacagaactggataaattctctctgaaattgaaataagtcttaggtagcagcagaaccagggtggaagtgtcatttttttttttaaacatacctgtgagctttgagaaaacgacacagtatttttgaagacacagaatataagaaaaggtagtctctgcctttccactctaaactattaacagtggtgattcctgggaatttcagcacagacttggaaatgggtagaccttcctagaggatgtgcacaccctttaacaaagcaattcaagaaaccacagcaggctgggcacagtggctcccgcctgtaatcccagcactgtgggaggccgaggcaggcggatcacctgaggttgggagtcagaccagcccaatcaacatggagaaaccccatctctactaaaaatacaaaattagccaggcatggtgacccatgcctgcaatcccagctacttgggaggctgaggcaggagaatcgcttaaacccaggaggcaaaggttgtggtagtcaagatcacaccattgcactccagcctgggcaacaagagtaaaactttgtcttaaaaaaaaaaaaatgaaaccacagcaacgtacagatttatctgtagggatctttaagctagagtttataataggaaaatgctggaaacagctgaaacgctataaagttagggcatgttcctctggtgggaaggccatgcaggacctaaatgtaaaatgaaatggaagagtgatgcctgttgttttctcagtgtaatctgagacactgctgctgaaattgagaatacgtaatgtgaggacaggtgcttcaggtggaatctagctacacaattactccaagaatagaaaaatggttgggtatggccgggtgcggtggctcatgcctgtaatcccagcactttgggaggccaaggcaggcggatcacgaggtcaggagattgagaccatcctggctaacacctggctaacatggtgaaaccctgtctctattaaaaatacaaaaaaaattagccgggcttggtggcgggcgcctgtagtcccagctactcgggaagctgaggcaggagaatggcatgaacttgggaggcggagcttgcagtgagccgagatcgtgccactgcactctagcctgggcgacagagtgagactctgtctccaaaaaaaaaaaaaaaaagaaaaatgcttgggtactaatataacaaatatttatttgggggaaaagatccatggttattctgaaaggaaacctgagtatgaacatggcccgttttgtttgaaacatcatctatagaaaaaaaaaggttatgtgtatcagaatgttaatactgatagctctgagtgatgaagtttaactcattttgatcatatatccagagagtagaatgagcatctgagagcaattcccagcacagtagacgagcagcatttctcaaacatgctacgaaacactaatcccacaagatgttttgtggtcaaaagaaaaaaaagactgagaaactgcatgctaaattctactcttgaagggtcgtagtccacagcaccaaaatgacttaagtcctataaaaaaggagctttttcttttttttttttgagatggagtctcgctctgtcgcccaggctggagtgcagtggtgcgatctcggctcactgcaagctccgcctcccgggttcatgccattctcctgcctcagcctcccgagtagctgggactacaggcgcccgccaccacgtccagctaatttttttttttgtatttttagtagagacggggtttcaccatgttagccaggatggtctcaatcttctgacctcgtaatccacccgcctcggcctcccaaagtgctgggattacagacgtgagccaaaaaggagcatttttaactttaagcctacatttcctaaacattgggaggaaccattttcaaaatgaaacaaaccatatggaacctgaatatggcacaacccttttctggaagatgctcagaagttttagagactcctctatcagtactgtgtatcatgcagccagtgatttcccaggaaatggagcaagcacagtatttttgaagggaagaatgctgt

SEQ ID NO: 24146 - DNA, 2300 bp, Homo sapien
gtactgatgtcttctgcccttgcctcttcgacaggcaagtaataagacttaagtgaagagaattctttaggcacacaaattcacatttgatgtaatctcattatacttcctgatctgtgattgaaaactttcatttcgtaactagtatgtctgtcccacctttaaaaagtttttcattatgaaagtaagtatttgttagaattaagtctatttaaatgaaaaaaacttagatatgagtctgcatggcctcaggaaaatgatgttttaaaatagagattttaggttgtctgcactctagcttttttgtcgttttcttaaggcttttttaactgcatcaaaaattcagatacgaaacatacactaaaaaataatacatcatatcttaatttccactgaacttgatttaaattcagagttacacagtatgaatatcacaatcagatatgttcaaaaaggtctgaacaattgattttctgaaaccatgaaggactacaaatgcttctaataaatcaatgtaattaaaatgtcttttagaaataaacttatttggaaacaagtagtaattcattagaaagttagatgaagaggctgggcgcggtggctcatgcctgtaatcccagcactttggggggctgaggcaggtggatcacgaggtcaggagatcgagaccatcctggctaacacagtgaaaccctatctctgctaaaaaaaaatacaaaaaattagctgggcatggtggtgggcgcctgtagtcccagctactcgggaggctgaggcaggagaatggtgtggaacccgggaggcggagcttgcagtgagccgagattgcgccactgcattccagcctgggccacagagcgaaactccgtctcaaaaaaaaaaaaaaaagacagttagatgaagaatcaaaaatcaatcttagatgataattcaaaagccaattataaatttaaaaatataccatggtgaaattccatctgtactaatctatgcaacttttctataaatctaaaattattccaaaataatgtttgttttaaaaccaagataaaataatagagtaaaataaaaacaatcatgttctatttaagaatgccagatatagataatgacaactatggaaagatgatgatgatgatgatgatatgatgaagataaacaattatgcatgccttctatgttaatagaaaaacatttgtgaaaaataaggataaattaaaactcaatttgtattggcataaagggcagaaaacttcagtgatgctaaacaatttgcatttatgatcagttgacagagaaagggaaaccaaaaataaataaataataaacaatttgcactcaagtcataatagtgcatattgtcaatgagaaggtcaaggagggactgcgtggccagcacagaatgctcactggggagagcgtgcctaaggtataagatgccagttcagcaatggctgcatctgggaggtagacccagaaagcccacaagtaatgtccaggtgcatcttcaatgtttgtacagtagtccccctcatccgaagtgttaaactgcatgctgctctgagtaatattttgaaatcttgcactgttccactccatcccaggccagacgtgaatcctccctttgtccagtatctgcacaaggtctacactacctgcctgttagtccctcattagccatcttggtgatcagattgaaaaaatcgagtgtatatagggtttggtactatccacagtttcaggcatccacggggagttgggggggttcttgggacatatgcccagtggataaaggagaatgtgtaagtgcactaatagttgtaaaagccaccaggatatcatggctctagaatccccctcagtgcctaccagcctccccaggcaccatccaacaccagaaccacaaccacagcactggggggacagagccctctgggatttctgattcatctctattagtttttaagatccaaggaacaccttttaggtttccttggtcttgttcccgtcaatgtcaagtctgatctcatagatacccaaatggcttccttttcctggtttctagtgctgaaatttggagaaaacatggtctgatgcactagaaacatgaaatggttcttcagattcagtagcctaaaataactattaaggtaatgaggatatggctctcacacacattccacaggccagaggttgtgaaggtgtcctcagacccagggtgttggaaaccagggtgggggcccaggaacttggtttaacaggccctccaggcaactctggtgcacactccagtttgggag

SEQ ID NO: 24147 - DNA, 2300 bp, Homo sapien
gcatgagactggtttgaaccttggaggcggaggttgcagtgagctgagatcgcgccactgcactccagcctgggtgaccgagcgagactccgtctcaaaaaaaggaaaacaaacaaacaaaaaaaacgctctgttgcccaggctggagtgcagtggcgcgatctcggctcactgcaacctccgcctccggagttcaagcgattctcctgtctcagcctcctgagtagctgggatcacaggtgcacaccgctacacccagctaatgttttgtattttttagtagagacggggtttcactgtgttgcccaggctggtcacgaaatcttgagcgcagacgatccacccacctcggtctcccaaagtgctaggattacaggcgtgagccaccacgcctggccaaaaaagtaggattttaagtgaaaatatcagaataaaaattgtgtgtcttctataatgaaaactatgttagctgaactgtacatttaaaaatagttacattggtacattttacgttatgtatattttaccacaatgagaaagaaaaaaaccttaataaaaaaaccaacgtgaaaattacatgttcatgtgggtaaggatgtcagggtaacaagggaacacttttacgtatccagttagagtggtgagattgtgagtaatttattattgtatttgtttgtgttaataacgtggcttgttcaataagtggtaagaactccctttccccctcttgtttgaagagagaacatatgatgagctgttactgggagcagcccaggcccatggcctcacgccacgaccccagccggccctatgctgagcagtaccgcatagatgcccggcagtttgcacacctgtttcagctagtctcgccctggacctgcggggcccacacggagatcctcgccgaaaggacgttcaggctcttggatgacaacatggaccagctcatcgagttcaaagcgtttgtgagctgcctcggtatgcctctgtgggatttcgcagtgatgtgctttggggtgtgggtctgtgagcagaacacaaagtggatcttcggagcaggcagatgcacatggtgtaacacttttgtgactggcctgacatgaacttatgattttgaaatatcactctgcaggcccctctcaggatctactttctgaagggggatgggagaggggcccacgctctcaacatacgaggctgttcaccttgctttccttggcatccacgatgtggtggtggcttgttgggagccatgttcctaacttttgtccataaaattaaaatgttttggaaggtatgaggccagacaacattcacaaagttccgtggagctcacatagtcaccagcccagtctttaacactttcattgctaccatggtgtgtgtctggggcaggagagttgggggtggcaggtattgaccttccccagtgttctctccacagtgagtttgtgtcctgacaaatggactttcagcattggcatcaactcactctttttaaactttttgcagatattatgtataatggagaaatgaatgagaagattaaactattatacaggcttcatatccctccaggtaagaaagtccaagtagcaaaatcagactgtgctctgcttcaacacagtatcagctttgtgcatgactctgaagctcttctctttttaaagttcacttatgcttgaggcaacaggtgtttctggcttggggtttcaggtcacaggtttggagttctgtgctgcacagctctggcaggacctcccaaactggagtgtgcaccagagttgcctggagggcctgttaaaccaagttcctgggcccccaccctggtttccaacaccctgggtctgaggacaccttcacaacctctggcctgtggaatgtgtgtgagagccatatcctcattaccttaatagttattttaggctactgaatctgaagaaccatttcatgtttctagtgcatcagaccatgttttctccaaatttcagcactagaaaccaggaaaaggaagccatttgggtatctatgagatcagacttgacattgacgggaacaagaccaaggaaacctaaaaggtgttccttggatcttaaaaactaatagagatgaatcagaaatcccagagggctctgtccccccagtgctgtggttgtggttctggtgttggatggtgcctggggaggctggtaggcactgagggggattctagagccatgatatcctggtggcttttacaactattagtgcacttacacattctcctttatccactgggcatatgtcccaagaaccccccc

SEQ ID NO: 24148 - DNA, 2300 bp, Homo sapien
atggtgaaatcccgtctctactaaaaatacaaaaattagccgagtgtggtggcatgcacctgtaatcccagctacttgggaggctgaggcaggagaattgcttgaacctgggaggcagaggttgcagtgagccaagatcgtgccactgcactccagcctgggcaacaagagtgagactctgtctcaaaaaaaaaaaaaaaaaaaaattacagtcccactgatggtgtctaagaggactcatttccccacactccacacccacccagcatttaatatcatggatcttttaaaattttgctagtccagtggaaaattgcatttcattttaatttaaacttgttttctcattaatgaggttgagtgccagttcatgtttattggctagttctctactcttttgaatcacctgttcatatcctttgcctatttttatagtggtttgttttcctgtggcattctatgtaaactaatatttgtccttggcatatgcattacaaccattttcttctgcattttatgggatgttgatgtgacagtctacatgaatatacatagaaattcatggtgtaccttgggttttaaggaacagaaatttatgagacctttatttcacacttaaaagttcttgtggttattttcatgattctgtaatgactatttaaataacatggctgcagtgaatatgacagtaaaattataaatggcattttggtctctttgaggatatgagcttgcagactacagcatctgcccttgtttttgtcccatcctgtggacagaggacattgaaatggtcaagaaccctgcagttactgggaactacttcagacttttgtgaattgggatgtccaaagagatgatgtagtcatttagtatgggtggaaatgatgcattctgaagaggctcacctggtcctcagcgatggggccggttttgttagttttcagtctattcccaagacttcaactcaccttaaaaaaaaaacttaaaaaaaattgttaatgtattcatgtggttcagaattgagaaagtattaaaaatatgcaataaaaagtctcacttccacctctggggccctccccacaggtagccagggttattagttccttctgtatcctacagatctggctagtcctttttgatttttaaataatatgattttgggccagtcgcagtggctcatgcctataatcccagcactttgggaggccaaggcgagtggatcacccaaggtcaagagttcgagaccagcctggctgacacggtgaaaccccatctctactaaaaatacaaaaagttagctgggtgtggtggcgggcacctgtaatcccagctactcgggaggctgaggcatgagactggtttgaaccttggaggcggaggttgcagtgagctgagatcgcgccactgcactccagcctgggtgaccgagcgagactccgtctcaaaaaaaggaaaacaaacaaacaaaaaaaacgctctgttgcccaggctggagtgcagtggcgcgatctcggctcactgcaacctccgcctccggagttcaagcgattctcctgtctcagcctcctgagtagctgggatcacaggtgcacaccgctacacccagctaatgttttgtattttttagtagagacggggtttcactgtgttgcccaggctggtcacgaaatcttgagcgcagacgatccacccacctcggtctcccaaagtgctaggattacaggcgtgagccaccacgcctggccaaaaaagtaggattttaagtgaaaatatcagaataaaaattgtgtgtcttctataatgaaaactatgttagctgaactgtacatttaaaaatagttacattggtacattttacgttatgtatattttaccacaatgagaaagaaaaaaaccttaataaaaaaaccaacgtgaaaattacatgttcatgtgggtaaggatgtcagggtaacaagggaacacttttacgtatccagttagagtggtgagattgtgagtaatttattattgtatttgtttgtgttaataacgtggcttgttcaataagtggtaagaactccctttccccctcttgtttgaagagagaacatatgatgagctgttactgggagcagcccaggcccatggcctcacgccacgaccccagccggccctatgctgagcagtaccgcatagatgcccggcagtttgcacacctgtttcagctagtctcgccctggacctgcggggcccacacggagatcctcgccgaaaggacgttcaggctcttggatgacaacatggaccagctcatc

SEQ ID NO: 24149 - DNA, 2300 bp, Homo sapien
actaagtgctcttggtgtagggaccggggaagtcatggcctgtgaatagagacctcaggcagagagaagcctgggctggccctcccagctctgatgagaacactggctttagtgatgactgaaggatactgctttggccaatgccttgcccaagaaatacaaaataggcaccactgttttaaactttcattattccttatgaaatattctattagatacttctttttattccttccctaagtgtccgctcagaacaacagtcctactacagatagatgtttttcattctcatggactccaaagcagccacaagtccagagccggtcccctggcaccttcttgtgtggggtgtttatatttacattccagggagaggaaggctgcacataacatgcagagagaaagatgactgagcaaaatgcatgcctggctttttttttttttttttttttttgagacagagtcttgctctgtcacccaggctggattgcaatggcgtgatctcggctcactgcaatctccgcctcccaggttcgacagattctcctgacccagcctcccaagaagctgggattaggggggcccaccaccgtgactggctaatttttgtatgtttagtagagatggagttttatcatgtaggccaggctggtctcaaactcctgacctcaagtgatccattcacctcggcctcccaaagtgctgggattacaggcgtgagccactgcacccggtccatatctggcttttgagtaagtggtgtgtggctctgggcaccatatccctctcacactggctagatgattcagctctgttgttgtctaatttctttgaggttagaatatctcctgcttcccattttggaaacctgcctacagtagaaacacctgatgcccacgtgccttttgttgtccaggaccgtgtgtgcttctagtcgtgtgcttactgagcatctgctgtgtgccaggcccttcatgaggagctggaagtagtccctgtgttaaagtgcccattgtccagtagagatgatgagaatagagaggaaatacagacaactaaaatgactaagctttttgcttaatgctttaataatgtggtgatttaaaaaaattgtcattgaaagaaatgaatttacgcctttgatttaatgcttttgtgtttctattttaacatgtaccgtaagacctctttttatgtatgtttttaacggtcattgctataaatgatatgaagtatgcatttgtaagctgtaaatttcctaggcccttgcttgttgtgttgcagcaatgttgggtgcaagtggcagtccctggccctggcaagaggctcattcctccgtggacttgggctttagtacttcttgaaggcacccttgttttcatgggagaactttgcaaggctgcttaggattggtctgctactcagggcttgttccatgccggagtagctgaatcattagaaatgtttctgtcatttgagtggagatggtcagagttctttgcgttagtagggtgggtgggatggtcatagaacagtcccagcggtaactcacttggccacctggcccatctttgtggcagtgggagtgacgcttgcacatcccagtcctgcagggaggagcaccacggcccctatgggggtgccttccttttcatctggcaaactgtggcccagggtatgagaggcaagatttttttttttttgagacggagtctcgcactctcgcccaggctggaatgcagtgatgccatctcggctcactgcaagctccgcctcctgggttcatgccattctcctgcctcagcctcccgagtagctgggactacaggtgcccgccaccacgcccggctaattttttgcatttttagtagagacagagtttcaccttgttagccaggatggttcgatctcctgaccttgtgatccgcctgccttggtctcccaaagtcctgggattacaggcgtgagccactgcgcctggccaaggccagatgttttaacatcaacatggggatacacaatatttggaaaatgagttaacgttctaggaattacttctattgcattttttaatctctgtatctttttctgtttgaatccaggtgcaacattagaggaaatcaatcagcactgggactggctggaacaaaatctcctccacaccttgtctgtctttgataataaagatgacattgccagttttgtcaaagggaaggtaaaggtaggtcccctgagtttcatgtttctccccatctttccatctttcttccttaagacattccgaacactgtagcatacta

SEQ ID NO: 24150 - DNA, 2300 bp, Homo sapien
ctcacttcacaaatcttcaggccttgtcctcactctctactaaatgaaacatttatagaccaggaaccctgctaaatgcaccataaataaagatacactgccctcaaagaaagggagggacgacaaattcctgcctcttcgcctcttcccagggcaccacccacctccatttcctgagagcctgggcactaagcaccagggtgcgtcacggggcccaacaaggccactgtggcccctgcctcctgcacaactccctcccccaaagctcaaaacagctcctggagcaggcccacgtgctgcccaagttgcccaagttgagtccttgttgccactcaacaggaccactggttaccaaagcaccgcctccgtccagaatcctaactacactctgccccttccatggggaaccctcagctgcctacagctccctccatgcagcaacctgccaactcccacccactcacccggtctcagtgtaagtctgcactcctctaacaaacccaaccgccagctttctcagaagctaaagtccagcaaaatccagttcctttgcacttggttctgcggtttccaggcgtgttagtacatctcctaccagactcaacctcaaaaaggccttccctagactggtctgagagcagaaagagccgccaaccactaacccggggacctaacctaggtcctttgacctctctctggcctctgtcttctcctcagtagaacaggaacaagacaggagatctaagctctcttttattccgattccaaaattggaaagaaaaatataggccccctagatacaaatgaaaaagtctaattgttccttcactgacctttaaacaggtgtcctagctactgcaagttggcgtcaatttcaaagagctttggaacaaaacttttagaaaaaaaatgctttgttttatcatcaactttacgagcctgggttttttttcctatcattccttgtaagacactgaaagagaggaaaaaactgatctgttcaatttctctactgagatcacgagcttgggattcgcccaccctcagtttcccctccgggcgtggagacagttcccgctcaccgcggcctccaagagctgcgccccgcgcgcatcgccgcgcgcccccagccacgacaccacctggagcctccggcgcctccagatggccgagtccgggctggctcggcgcaccccgctgtcacctggccccacacagcagcctcgctgctccagggcggccccgagccctccggccccgctccacccggcgtttctccttcgattcccaagtcgagtccggcctccagctcaccgggccaggcggcgaagacacctgcctcgcccggaaaacgcacgcgcccgggagccccctctaccaccacctcgacgggagcccgcgggagaaacgcagaaaaaaggaaaacaagcccgcggcagggccgtccgggccccgcgtctcccaagaaatcgcctctggcgacgcagcccgggactgggggccgcgggcccggcggggtgcgaggccccgggcccggccgccgcgcccgccccggcgagccccttaccggtgaggcggccgcccccctcgccgtgcccgcggcgccgctgcaggatgaagtagcagctgctcttctgggtcacccagagcttcagcgcgttcttcagcagcacctcctcgggcttgagccacatcgcggcggtccggccgcgcccgccggccccagctcacatctccccggccgccggtcgctgtgagccgagcccgctcgagaggcgacggcggcgcgcggggaccacagcccggccggtgcccagcgctctgagagcccgcggagcgcagcaggcgcagctagccccgcgcacccagcgcggccctcacgtggccccgccccgcacccgcccctggccccgccccgcacccgcccctggcccctctccagccgccggccccgcccccgaccgcccctaccccgcggctcccgcggcgcctcccgggtttccgcgtccaaggcgctccggcgcgcagttccggagtggagggaggaagtccaatcctgcgccaggctccctccctcccgcctctccgcgctctcagggggaactcgggagagctgccgtccctgacctcgacctgagacgtggaggagggacagggaaaaagccttcttctcgcagctgcaggttgccccaccgagggcatttttccgcaccgagggggcggggggcagaatgcacgccagaaaacctaagtgcgctgggtttaaaatagcaacaacaacaaaaattacaaataaccaa

SEQ ID NO: 24151 - DNA, 2300 bp, Homo sapien
caggttcaagccattcttctgcctcatcctcccaagtagctgggattacaggcatgagccgccatgctcggccaatttttatatttttagtagattcggggtttcaccacggccaggctggtctcaaactcctggcctcaagtgatccacctgcctcggtctcctaaagtgctgggattacaggcataagccaccttgcccaggccctataataaaaaatttatgagagtacttttgagctaatttgaatcagttccccaagttaccacattatatctgctgctgttaggaacgttaattggcaggatctttctgaagtgcaatttagcagtaaattgaagaagcctttaaaattcagtagatatcacacctgttgacccagcaatttctcttccttaaatttttcataagaattgaggtagcaaaccaaatattacacttctaagtgggagctaagttatgaggatgcaaagacataagaatgatataatggactttgaggactctggggtgggagggggtatacgtgggacagggctgagggataaaagactatattttgggtactgtcacgcgcgtccgtgtggagaccaccaaacaggctctgtgtgagcaataaagctttttaatcacctgggtgcaggcgggctgagtctgaaaagagtcagggaagtgagagaggggtggggccatcttataggatttgggtgggtagtggaaaattacagtcaaagggggttgttctctggcaggccggggcgggggtcataaggtgctcagcgggggagcttctgagccaggagaagggatttcacaaggtaatgtcatcagttaaggcaggaaccagccatttgcacttcttttgtgattcttcagttacttcaggccatgtggatgtatatgtgcaggcttgggctcagaggcctgacaggtacagcgtacactgctctggtgacgggtgcaccaaagtctcagaaatcaccactaaaaacttatccatgtaaccaaaaaccacctgtacccccaaaactactgaaatacaagttttaaaaagatgaaaaaaattttttttacataaaatatctttctccccaaaaacacataaaataaaataaaaatatgttttaaaaaagaattgaggtggctcttaactagataattagaatcgctggtggtaatcactggcgaaatacgcgtacgtttctgtaggtttagggaccgggcaagtctgggaaatgccacctggtggttctcagcccagactacacctcagactcacctgaagaggtggggtttattaatatctcaatcagcatctctgggggtggaactaggtatttgtaacgtctccccgtgggtttctaatgcacagctaagtgcccaggataagtgccctagggcaatctaagtaaaacgtggcacagcaaacaattttgtaaatgaatattaactggagacatgttctcgaaatcatgttaagagaaaaaaccatgtacaaaaaagctcatagtgcagtatgattccatttctgcaatgagtgtaagactagaaattaaccgtggttatgtgaaatgtgtggtatatttgcatttactaaattaaaaaaaatgtttctgagacagagcgcccgggctgcaatgcagtggtgatcacagctcactgcagcctgggactcccgggctcaagcgaccctcccgcctaggactctcaaagtgctgggattacaggcacgcgccaccacgcccggcctgcatttacaatactttttacgacgaatacttacggatgttatattaagaaaatagttaacatctgaggtgcattcttccaaataataacgtagacagcacttactgggaccgtctggcaccaggaaccgtcctggggaccgccaaagggcggcttaacctcgcagctgcgcagacgcatgcagtccccgggctctcctgccgcgggacctcggcagacctaaccctgaacgccaccagcccgacctcgccccgcccctcccctcccttcccgggccccgcccccgcttcctgccaattcgccccgcctaccccgcgtctccgcatcctcttcctggcttcgctccatcagcctcgctttcgctgggcgctgtccctctccgcggcggtctggtttccccgacgtgttttgtttgcgacgctgtcgtgtaacagcgcgctttacggccgcggggacggagcgagccggcgccagggcccctcgggccgggaagaggggaaggggagcgaggttgatgcccggcggaggggcgagcgcggcgtctggccggc

SEQ ID NO: 24152 - DNA, 2300 bp, Homo sapien
attgtgtaatgctgggtagttaagaggaaggaacgaccacctgtggagctggagaaattctcaggagtgatattttttgctggatattgattagggatgcaggagggagggcaggagtagctctgccaggtattattaaaaaactgggtgtaaggccgggtgtggtagctcatgcctgcaatcccagcactttgggaggccaaggcaggcagatcacttgaggccaggagttggaagccagcctggccaacatgacgaaaccccatctctaccaaaaaatacaaaaattagcccggcatgatggtgcactcctgtaatcccagctactcaggagtctgaggcaggagaattgcttgaacctgggaggcggaggctgtagtgagctgagatcgcgccactgcactccagcctgagcaacagagtgagactgcctcaaaaaaaaaaaaaatagtgtagaagttgagggattttgtgcaaccggggtgtagggtacatggatgggagagaaggtcaagaagtgagattaggaaggtgtggtgggaccagattttgaagggtcttgtaatggtgtagaaatctgggtttaattctgtgtacacaggttaagtaatgtgatcagatttgtactctagagatataactaaatggtaagaggaagtatggactatgggtggtgggtgagcaggggtcaaaactgggagctggggaagtcagtagagggggcaggagtagtcccagcaagagaggcgtggggactacatctgagggaatgcagcctggtgacatttctgcagtgggagagatgaggcttcatgagcaattaaacatgggacaaaagggaaggaacattcagccttgtgggaatttgtagctgcattgtgtgttgaatcaggtagtgtatttggatagctgctggttgctcttctatttattcaacttctacacagtggaaacagagaagaaagaaaagcatttccgagcactatagtgttgtctgtttttgtttgcatatataagctttagcctttgcaggaattgaggcactttagaaaatgcagttattgggccaggcgtggtggctcacgcctgtaatcccagcactttgggaggccgaggtgggtggatctcgaggtcaggagatcaagaccatcctggctaacacggtgaaaccctgtctttactaaaaagtacaaaaaattacctgggcgtggtggcgggcgcctgtagtcccagctactcgggagccagaggcaggagaatggcgtgaacccaggaggcagagcttgcagtgagccgagattgcaccactgcactccagcctgggcgacagagcgagattccatctcaaaaaaaaaaagaaaagaaaatgaagttactaatgtgagagttaaagaggaaagaaacaccaggcggggcacggtgactcatgcctgtaatcccagcactttgggaggctgaggcgagtggatcacctgaggtcaggagttcaagaccagcctggccaacatggtgaaaccccgactcgactaaaaatacaaacattagctgggcatggtggcaggtgcctgtaatcccagctacttgggaggctgaggcaggagaatctcttgaacccgggaggtggaggttgcagtgagccaagatcatgccatcacactgcagcctgggagacaagagtgagacttcatctcaaaaaaaaaaaaaaagccacaaaacgcagcttggcagtcaaagacagattttctttagttagaacctgagaagcactcctggccgatgttttaactaaagaaaacctgtctttgactgccaggctgcgttttgtgtttctttcctctttctttaactcttacagttaacaagtacaaaaaccttaagtttcatttgtagggccacagatcatagaatttcaaatgacatattacatagtttgtaaatgtatatatttggttgactgaaacttaatcataatttagttcttaaaactatgtggcttgaagtggcaagtagcaagtactgattttaccagattcaagttgatttttaaaagtaaccattggagaaatcgttatacatttttgtttgcaggatttttacctcctataactccaccagaaaagttttttctttcccagctgatgctggcacccccacgggaactcttcaaaaagacgcctcgccagattgcactgatggacgttggaaacatgggccagtctgtggacattagtgggcttcagttagccttggccggtaaggaggaatcagtgttttgggcatttctgtgtggtaatattagg

SEQ ID NO: 24153 - DNA, 2300 bp, Homo sapien
aaggtttttggcaaagcacatcaatgttagactagttgaagtggaattgtataattcaattcgataattgatctcatgggctttccctggaggaaaggttttttttgttgttttttttttaagaacttgaaacttgtaaactgagatgtctgtagcttttttgcccatctgtagtgtatgtgaagatttcaaaacctgagagcactttttctttgtttagaattatgagaaaggcactagatgactttaggatttgcatttttccctttattgcctcatttcttgtgacgccttgttggggagggaaatctgtttattttttcctacaaataaaaagctaagattctatatcgcacatgagcattaagttcttcattgccttgttaaggaaaatgagtaggcagactcagaatctgttatattgatttcagttacaatttaatctttacaattaaaagggcgaaagatgtagaattttagtttttgttgttgactcgaaataaccagttttcttgattagagtttaagcagatttaataccatgaccttgcttaaccgtttcttcttttttacttgcttgctgttcttttgggtcaaaggagcaggctaatgcaaagcttttggagactgctaagtgttaaaaagtgattaaacacacactctgctattttttcacttcttggaggtagaagtcgagtatgaggcagttattttttagagtgtggaattatagtctttccttgctcctagttattctgtatatctttactttgtaggtaaaaataaatgtttatttaaaacaatttttaaaattataaatttatttttatagccatatgtaggatataaagatttatatagattattttctcaagctacttaatgctttaattctagctactcatcatgaaatagtaaacagttttactgaaataaactctacagacagatgcagtatgaggagctattgaagtagaaaatgtatttcgctttgcacactgagttggttttagcagacaacctcaagtaggtttccataacagccattacctttgaaatctaccttctgtagtttattataaataggaaaatacatcctgattctgtagcaagtagattgtttgctctttgtctttaagaaatactaggagggccgggcgcggtggctcacgcctgtaatcccagcactttgggaggccgaggcgggcggatcacgaggtcaggagatcgagaccatcccggctaaaacggtgaaaccccgtctctactaaaaatacaaaaaattagccgggcgtagtggcgggcgcctgtagtcccagctacttgggaggctgaggcaggagaatggcgtgaacccggaaggcagagcttgcagtgagccgagatcccgccactgcactccagcctgggcgacagagcgagactccgtctcaaaaaaaaaaaaaaaaaaaaaaaaaaaagaaatactaggggagggccgggcgcggtggctcacgcctgtaatcccagcactttgggaggccaaggcaggcagatcacaagatcaggagatcgagaccatcctggctaacacggtgaaaccctgtctccattaaaaatacaaaaaattagccggacgtggtggcatgtgcctgtagtcccagctactcaggaggctgaggcaggagaatcgcttgaacctgggaggcagaggttgcagtgagccaagattgcgctactgcactccagcctgggcgacagagcaagactccgcctcaaaaaaaaaaaaaaaaaaaaaaaacagaaatactagggaagggccaggcgtggtggctcacgcctctaaacccagcactttgagaggccaaggtgggaggatcacctgaggtcaagagttcaagaccagcctgaccaacatggagaaaccccatctctacttaaaaaaaaaaaaatacaaaattagccaggcatggtggtgggcacctgtaatcccagctactcgggagactgaggcaggagattctcttgaacctgggaggcagaggttgcggtgagccgagatcgtgccattgcactccagcctgggcaacaagagcaaaactccatctcaaaaagaaaaaagaaagaaagaaatgctaggggaaaatgttttaactagtcattcttcccagtagctaatgaagctgacttttaaaaagaaggctgtgagctttgcagatgctgctgccgcccagggccccctgcttccagccatggtcaaccccaccatgtttttccacattgctgtcgatggcgagcccttgggctgtgtctccttcgag

SEQ ID NO: 24154 - DNA, 2300 bp, Homo sapien
aaggaactgtgctaaacttaagagctcaacagctgcaaggtctgttcctattagcctgccggactttgctcaacaagcctgtaaccaatcctgagtactcaactctggcacagtaaaaacaaaaaacaaaaaaaacctattctgcctatttcagaaattatcaattacacatacatcactgtgctagttgaggtaggctcatgaaaagaccgaggacacaatcccagcccttgcaaagttcacaacattaaaagaaggcccaaaacttggaaagcagtattgctggtacagcatgaatgtacaaacgtaatacatacaagcaacatggacaactggaggagcacccaagtttgcccatagttacccaagacgggtttcaccaaaaaaatagcttttgagttaacacttgaagactaacttagtgtttgctggaacaagagccaggagcaggtcatgggagaaagaagtaaatgaatttgcaagacctaacatgaaactgcaaggacacgtttttgggaacttcagtatttgttttgctggagcataaagggtggcggtggaggcgttcctaaaacccgttctcagcctgcatagaccacgataatttaagcctgaggccctttgggccttttaaaattcagtttcctgatgggaaaggagaggagatccatcttcatggaaaacttacgggttgtgggtcagactgcattttggagcacagagacagcaacaaagaggaaatggagagggtttaaggaccaacaaaaaacacgtggtgcaggccggtcgcacagcctcacgcctgtaatcccagcactttgggaggctgtggtcaggagctcaagaccagcctggccaacatggcgaaaccctgtttctactaaaaatacaaaaattagctgggtggtgcacgcctgtaatcccagctactccggagcttgaggcaggagaatcgcttgaacctgggaggcagaagttgcagttagccaagatcgcgccactgcactccagcctgggcgacagagcaagactccgtcaaaacaaaacaaaacaaaaaacacgtgatgcaggcagtaacaacctacttcccacagttatagacccttaacgcaggaagatgagtctatcagaaatcaatgttctgaacttcctttctgaaagcagtaggcttttgtactcaatagtaattttatatggattctctatcactgggtattgatgtccaaacaataaatccttttcccttttttattgacatgaaacgtaagtgctcatttaggtagtctgacgcctaaatgagcacttacattgtatgtcatcagtagtaggcatcagactacttaaatgagcacttatgttgtatgcttatgcctatttcaaaattatagattatgcataaaatactataacaaaaagggctgttgtaaatatacttaagctgtaaggaatcaattagcatcataatattagtagcaaaaggcagttggataatgtgtgcgtagctttggatttttttttttttttttcacaaaatgtatttggattttttttttttcttaattgacagggtttcgcttagtcgcccaggctgaagtggagtggtgatctcggctcactgcagcctcgacctccggggctcaggtggtcctcccacctcgacctcccgagtgggaactctagttgggcgccaccaggcttggctaattaactttgaaacgacttagacaaggcctctgccatgtgccttgcacaataaactctccacaaacatctgttcagcgattttacagaactgcggtcccacacctgctttcagggaagcttcccgtttctctggagttacttcccttcactttgggggtgctagacgtcctattgcgcaaacttggcccctggccacagggtccgccgtggcgcaagctgtggtacaggctgcgcgccccgcctcggcccacaggcgcctgagatcccgggacggatcgcggtccgaggctccgcggagcttacgcctgcgcacaacgcggccggtcggacgggggcggagccagggccgatcacgcccttcgtccactccgccaggtgcgcgtgcgcagcggccccgaccccgcctcagtcttccagggcggcggtgggtgtccgcttctctctgctcttcgactgcaccgcactcgcgcgtgaccctgactccccctagtcagctcagcggtgctgccatggcgtggcggcggcgcgaagccagcgtcggggctcgcggcgtgttggctctggcgttgctcgccctggccctgtgcgtgcccggg

SEQ ID NO: 24155 - DNA, 2300 bp, Homo sapien
tgtcatatgctataacatggatgaattttgaacatcatgctaagtaaggtaagccagtcatggaaggacaaatactgtataattccacttatataaggtatctaaaatagtcaaactcatagaaacagagtagaatggttgctgccaggggctggggggagggaaaatggggagttgctgttcagtggataaagagttccagttatgcaaggtacaattctagagatttgctatagaacaatgttcttatagttaacaatgctgcactgtacacttgttgagaggatagatctcctgttacattttttaccacatttttttaaatgggcaaaagacattaacaggcattttataaaagatttcgaactgggcaataaacacatgaaaaatgatcagccatattagtcattaggtaaatgcaaattaaaataacaatgagataccattgctcatccaccagatttggttggcgtgagaggggtgcgggggatgggcaaaaaaaactaacgctaatctgtgttgatgagaatgtagagctgtaacagaaactctcacattctgacagtagcaatataaactggtacaatcattttgaaaataagtttgattttcatatgatatatattttttttctatatatatatatatatatatgtatatatatatatatatatataaacatattcctacccatatctttagtacctgggatgtctctgcaaaatagatccctaaatctctccagaaagacactatctctagcttttcaagcttattcaaacaggtttggattctgcaggaaaccaggaaatccatggagaattatcttccaaaatttgagtttgagggatctgttgaatattcaggggtaaatggccaaaacaaacaacaattgctgtcattaatggagcatttactatgttctggcacaagttgtgtgatggggtttgaggagtgattattgatcaccctcttaaatcccctttgagtgtggaactaatttgggaaataaaactcaagaatcagaaagcttaatagaagtaaagctaatgggaaattttgaccaaataggattcctattaggttctgcaactgaacttactcccttagtcacagacagggcagggcgacctctcatctgctgaaggggcaggacagctcaggcaagacagaagagaagggtgaacagatcattcagaaaagaatagctttgcaggggctgagaaaagcatgttaagcttgcctttcgaaactcatccatcagatgagtcacttctcccatgaggaggcaggagtaagaaaacagccatggccgggcgtggtggttcacacctgtaatcccagcactttgggaggctgaggcagaaggatcacctgagcctgggaagttgaggctgcagtgagctgtgattgtgccactgcactccagcctgggaagacagagcaagaccctttatcagaaaaataaaaaataaaaaagggtgattgcatctgtactgaacatatattggctttttttcttgttctattccctaaacaatacagtaaacaacaatttacatagtgtttacattgtattaggcattttataagcaaatcagatattaaaggaagatgtgcatgggttatatgcaaatgctgcactatttttttataagggacttcagcatctctggattttggtatccacgggggtcctggaaccaatacccctcggataccaagggactgctgtagagcgtttgctccatgccacacactgttctaagcctcttcaaatattaatcgttcaaccgtcccatccatcatccttaagaggtagatattatctttgtcagctaatgaaggaaatgggcacagagaggttaagtggcttggcaggtctcacagctgttgagcagacgcgtgtattaagccgggatttgaacgcccaccctctggctgcggaacctgtgccatcctgcaggaaacgaacccatcccgggacctggcgcgcgaggaggactccgcaggatgcgcggcgtgtgcgtggaacctggtcttctgcgagcctggacttctgagcttcgcgcgcggctgcagggattcgccgggactcgcgcgggggaccgcgcccggggatcctgcaggggcgggaagggggctcgggctccttgcttccgccgcagtggggcgctgccgggctccccggcactagcgctgctggcggccccggcggccgggcgtgctgcctgcaagatgtccgtgcgccgcggccggcggccggcgcggccggggacccgcctctcctggctgctgtg

SEQ ID NO: 24156 - DNA, 2300 bp, Homo sapien
cttgcctatcctacccctacactccaaatgccccaggcttcaggaccaggctgattcatggggcagtgccccaaaggagagtcagatgccatcccgggtcagctccagtgacctggttgaacttcagggtccaggttctgaatgtcctgctatctctctggaactgaccttggagcttcaccctggtgatggtgtccctgtggaagggaggatgctggccatggagatctctggtgggccccagcaactaccttccagggctggcacgtgggaggcagtcggcagttgtttcctttgttgaatcgatgtctttcctgcttccagaagtggttctcaaacgtgtgtgtgtgtgtgtgcatatgttttgggggcagactttttttaaaactgtggtaatatatatataacacaaaatttaccattttaacaatttataagcacacaattcagtggtgtggtattaagtacattggtattgttttgcaaccatcagcatctatttccagaacttttcatcttccccaactgaaactcagtccctattaaaacactaatcccccaacccccagcccctggcaacccccattctactttctgtcgctatgaatttgacttctctagggacctcatgtaagtggaatcatgcttttctgtgtgctaatgttttcagtgtatctgtgttgtagcatgtatcagaatttcattcctttttaagggtaaataatgttctagtgtatgtatatgtaccacattttgtttatccattcatctgtccatagacacttgggttacttctaccttctggctattgtgaataatgctgctatgaacattgctgtacatatttgtttttgttcctgctttcaattctttttgggtatacactcagaattgggactgctggatcataaggtaattctatgtttaatttttgaggccgtactgttttccatagcagctgcaccactttaatattatacatattttttgagacagagtctcaccctgtcacccaggctggagtgcagtggcacgatcttggctcactgcaacctccacctcccaggttcaagcgattcttgtgcctcagcctcccgagtagctgggattacaggcgcctgccgccacgtccggctaatttttgtatttttagtagagacgggggtttcaccatgttggccaggctggtctcgaactccagacctcaggttatctgcccgtctcggcctcccaaagtgctgggattacaggcgtgggccgccgcccccggccagctgcaccactttaaatgtcctaccctcagtgaacaagagttccaatttctctacatcctcaccaacactcgttagtttctgtgttttaaataatagccatcctcttgggtatggtttttatttgcgtttcctaatgattaatgatgtcgagcatcttttcatgtgcttagtaggcatttatgtatcttctttggataaatgtctattcaagtcctttgcccatttttaaactgggcggtttggtttttgttgctgtcaagtcggcaaatgtgtttttgatctagattgagaaatccttacccggagactctgaagcggttagcagccacagtaacggctgcatgactgagctctgactacaacacagccttgcaagtgaatgtcgcttaatactcacaacaacccacacagttccccacaaaggaagtgaacttggagatggccagcagctccatgtcacacagcaatgacactgacataaatggctcttgagagcaaggactggcaggacctggctacagatatggggactcacgttgaggtggcactgctcacctggagcagcacactggagtcacctgggaccagcctcctagaagtccagatgcgcccgcctgccagagagctccgagatttttcaaaactcctagagacagtggttttcagcaacggcgggcacattagcatcacccgggaccctgaaaaagccggttggcccaggcggccctcgcccagaccaattcatcagaacctcttggggtggggtggggcggggctgggatggggagcggcagccggggtatcaatatttttgaaaactgcctgaataactccaacgctcaagcaagtcaaggacacccacggactcaacaccgcgaccagattggaaaaggtgtaagttggtgcttgttgttcgcgtccctgtttgactggttgctacgccggtgggaagggcgctgggtgagagcgggaggcagctccagcccacaccgcaggatgcagggcggggtccgcgcatcctcggcg

SEQ ID NO: 24157 - DNA, 2300 bp, Homo sapien
gctcctgacctcaggcggtccacccgcctcagcctcccaaagtgctgggattacaggcgtgaaccaccatgcccagctcagcttgctttcttttagttctcacagctacactctgcaggaggcactttacaatccaggaaacggcccctcagaggtcccccaggcagaacggttaaatccgtggccctatgtgctctgtcactcattggctacacaaccttgtgcaaactcacttcaagtgtcttcaattccctgcaagtctccttttcctccctgtgaaatgagtccactctactggattcacgaactcacgcataagatcttaagcaggggccgggcgcggtggctcacgcctgtaatcccagcactttgggaggccgaggcgggcggatcacgaggtcaggagatcgagaccatcctggctaacacggtgaaaccccgtctctactaaaaatacaaaaaattagccgggcgtggtagcgggcgcctgtagtcccagctactcgggaggctgaggcaggagaatggcgtgaacccgggaggcggagcttgcagtgagccgagatcgcgccactgcactccagcctgggcgacagagcgagactccgtctcaaaaaaaaaaaaaaaaaaaaaaaaaaaaaaaaagatcttaagcaggtactgattggttcttctgcatatgctgggtactagggctggaggggtctaagttttggtctgatcttagacttagcccactgtcacggactcagtcaggcctctgagatcatgcctagtctcctcaggtaaacatgacttatctctcagtttattttcttctctggctttctccaagatggccccagggtctatggggaagaggggtggctcacctggtgggaggatgctgtaactcatggctcaagccagagcattcttcacagtgggaaagagagctagcagcagcagctaaaagtggcaggcaggccccacccatacgggtccctcctcatcgcaggaccatggactctaaggcagtgcccttgtcctctgggtgctagtcacactgacggcagccacggccaatgtgtggctgcacctgagtcactctccctgagggacttgtttctgcttcctcccgtgggctctgtgggccccgtggtctggctgtgactcctgtgatccctgccaaggggcccatgcggtggtcctcagctgcatgaccgtgttaacaaggtccccagccagacctccaactactgtctaatgggttctgctggacagaagttttgggggtagccctactttcactcttgtgtctttgttagagatggtgattaccgtggataccccgagggcagggaccactgcaacgtatccttcctgaggtctccccagcgcctagcacacaagaggctcatgtgggttctccctaaatatctgtccagtgaatgactcaactccagctcccccttagcttagccatggggcaccaagtgtccttcaaaatggtcacctctggaagggtgtgggaaccacctccttctcccagatccttaccgagaagacaaatgacaggtattagaaactcatgaacttggtggggcgcagtggctcacacctgtaatgccagcattttgagaggctgaggcaagtgggtcatctgaggtccggagttcgagaccagcctggccaacagggtgaaaccgtgtctctactaaaaatgcaaaattagccaggcagggtgtcaggcgcctgtaatcccagctacttgggaggctgaggcaggaaaattgctcgaacccaggaaggagaggttgcagtgagcgaagattgtgccactgcactccagcctgagtgacagaatgagactccatcccaaaaaaacaaaacacaaacaaaaaaaccctcatgaacttgtgataagaaaaagaaacctgctctaaatggctcaagggaaaaggtaatttgtcggaggacacagaggagctcctggaccacatgagaggcaggaaattctcatgggtctgcgccctccagctcttccgactcgggtgcctgtggcctctctcttcagcatctctcgccttgcctgcttcctgtgcaaggttctaagacattattaaatggagtgggctggttgaggaacaagcagaggcaggtgggagaggtccctgcctctcagttcacctccacacagatgcgctgagaggcactgggtaagtgtttacggttccggcacagcgataacgtgaaaataatatttgcaaaagaccatcttgacaactatttgcatcttagactggctttgcggggtctta

SEQ ID NO: 24158 - DNA, 2300 bp, Homo sapien
aatccagcactttgggaagccgaggtgggcagatcacctgaggtcaggagttcgagaccagcctggccaacatggtgaaaccctgtctctactaaaaataaaaaattagctgggcatggtggcaggcacctgtagtcccagctactggggaggctgaggcaggagaattgctggaacccaggaggcagaggttgcagtgagctgagagcactccactgcactccagcttgggtgacagagcaagattctgtctcaaaacaaacaaacaaacaaaaaacaatgttatcaatagtaagatagcctgaaagttcagatgtgtttctgtctagttctctgagtaaattattttatttacactcatagataatgacattgctgctgacaaaaaccaaaattatctaaaagcaccaatacattcataggaatacttggttactataattttccttacaaatggataccaggagcccctctatatattttacccttaccagggattctcatagtcaaaaatttcagaaaccaaactgttgggaagcaggatagtgctatacatattctgggtagagctaacttggctgaatcagagatctggattttgggaacaggctaacctggtgaaaatccctgctccacttccaggctgtgcttttaaggaatttggacatactccttatctttcagtactttgctttccttacctaaaaggaggataacattccttcaaggctgtaaatagagtgctgtgtgtaaagcactcggcacaacgcgtttgtgtgggggagacacagtatgtgcataagaattggtagatgatgatggtgatgtttatgaaaatccaatcatgaatagccggaggccactgttgtcaacgagtgatccctgtaacagcgacgttagctacactgagaacttacacatgcacattctcaggcccattgcagacctcctgaaacgagaactcgggaggcagggccaggcaattggcactttgcctgaagcactcacgttttgagaacacctgtcaggtaacagggaaccactgaaagtttttggacggtggaggaatgcgatataaatgactgttgattcactggcattaaagtgcctaactaccgactggcttccgaggttgccggaagaaacctgttggttgatccttagtgatctccaggttacaaaatgcgggttggtactaagggccccaaacacagtgctcacctaccgagcgcagccaggagcgcagcgccagacaattacaggagctgttttggatatggccgggcagcccagcgatgctcagcgaatcccacaactacaaccacaaccgtaccacacatttagcctgcaaaagcagagaaaggaaaagaaaaccgtgcagggaagccggaaacgagggacttaagggtctcctctctagggtgtgggagagtgggggatggggcgaatggggcgaggagggggcgaggatcgagggaggcccctcctccgctcggcaacaccgggttcgggtccctctagagccgggacgcggccggcgggacacacccttgccctgggagacgcgagggtccatggcctcttagtgtcggtccagctcagtttcgtgtcatttgttgttagcgcgaggtaggggcgtttccccaccccagctcctccccggggaaatcccagcccgcttcctccccgctcctgcagttttcgggagcgccgtgcggggtcgagcgcggaggccgcaccctgggcgccgggcgtcgtgtcgggaccgctgcccgcgctgcccgccggcgcggccattgttcgagccccacccctgatgaatattcacgccgcgcgggcgcctcggcccgcgccctacccggcagggctcggggtgtgagtgcgtttccgccggtttttcctgcctgaggaggaaagggggagctgttttctctctcctcagaatatatttttggtgtcccgtttctcctcctccagcgccgccgccgccccctccctccccacctcgctccccgcctccgcctccgcctcccgggttatctttgtctcgctgcctcgcgctcactcgctcaactcggcgccgccgcggccccacgctccgggcccgtcctcgaggcgcgcggcgcggggcgcgggcgccggggcctgaggcggcgggcgacgcccgggggcctgacggccggccccgcgccatggtgtgagcgccgccgcccgtgcacgctccgtccgccctccgcgcggcccggccggcagagagccccgagcggcccgagagcgcagccgagcccgccgccgccgcc

SEQ ID NO: 24159 - DNA, 2300 bp, Homo sapien
tgtgaaaccttttttcatattcttagtcttccttctttgaaatggctatatggctttctgtcaggattctggaatagttggtagatggtctttgggattatattcatgatttaaaactcctttcctgctttgtgatatgatcatgagtctggggtggagaagtttgtaaatgggggccagctccccacgactggaaactgaagggcacaccttctgtcttgccccgctctcctttttggggttgtggtagggacagtttttcagatcatatgttggttatagcaaaagaaggcagaggttaaactcatggctagctagtggcagagacacccgtgtttaagaaggttgggtgggggaaggagctggtgccctattgtcccgtgggtctctattacagacaccaggtcactaactccagagctctggtgggatgaatgcccagcagcactggacaggtgttcagtacgggggtatttctgtcacctccagagcacattcacatggcttcagtagggttaagcatacgtttttgaatttttccccttaagactattacaaatccttaaaacttaattcctgtgaatcactttgacttagaaatatgttgaatagtggccgggtgtggtggctcatgcctgtaatcccagcactttgggaggccgaggcaggcggatcatgagatcaggagatcaagaccatcctggctaacacagtgaaaccccatctctacaaaaaacgcagaaaattagccgggcacgatggcgggcacctgtagtcccaactactcgggagcctgcgcaggagaatagtgtgaacccgggaggcggagcttgcagtgagctgagattgcgccactgcactctagcctgggcgacagagggagactgtctcaaaaaaaaaaccaaacagttgaatagtatatatttatattgatttgaatgtgacagtaatttaatttttatttttattattactattttttgagacacagtttcattctgctgcccaggctggagtgcagtggcgcgatctcggctcactgcaacctccgccccccagattcaagtgattctattgcctcaaccttccgagtagctgggattacgggtgtgtgccaccatgcctggctcatttttgtatttttagtagagatggggtttcaccatgttggccaggctggcctcgaactcctgacctaggtgatccgcctgccttggccatccaaagtgctgggattacaggtgtgagccactgcccctggccgacagtaattttttaaaaattattaagcaaagagcagagaatgatcttaaaaaatgaaatgggctgggggtggtggctcacgcctgtaatccaagcactttgggaggccaaggtgggcagattgccagagcttagaagtttgagaccaacctgggcaacatgatgaaaccccatctctaaaaataaatacaaaaattacccaggcgtcatggtgtacaccagctactggagggactgaggtgggaggatagcttgagctcaggaggtcaaggctacagtgagtcgtgttggtgccactgcattccagactgggtgacaaagggagaccctgtctgaaaaggaaaaaaaaaaaaagatggaggggaggggtaggggaaaataaagggaattttgaaaataaaccagaataatgcaccctgttcctgtttttcattcactcaggattccttttaaatgaaaaagttttggttcctggataccttttggttagtggatacgtttcttttctcttttcagaaataactaggaaaattgttaaaagtcccataattttgtgtggatttaccaatattgtgaacccttcccttaattttgaattattcttcagaattggggaggtgaagctggttctgcaagtttttatggtaacatgtatgtaaaacaacactgaaggagtagggacggattttaatataatttagtattatttataaactctgtgggagatgaaatgggcttagaaaacccacagaagtagctggtgtgtaatttaccatggccctggggctgaagtaacccatacaaccttccctcataaactttccagaatttatttaggttatgttgattttattcctttgagaactgattacccctcaggagtgtaatcaagatgggcttgtgtggggtggggccaaagggagaatggcaggcaaccattcagagaaagtggttttaccatctcgaggtgagtaatgtttaaagttttagctgctgtgaagtgggatgctataaaattcgggggagttttccttcta

SEQ ID NO: 24160 - DNA, 2300 bp, Homo sapien
tgaaaccacattctcagtgatgttttgttactggggcccactggacgtagctgaacctcttttcgggttagtggattctcgctgagcacaccgtcacagactacacctccagcctgcgttcatgtattcagtactttgccttggcttcactagagggtgctgtcgtgcagggttgttagaggtaaacgttttctggacttaaatggaccagatgatctgtatttgcaaaggaaacagattttccaagtgataagttcaaatagtatcagtcattttccttttgtggtcccatttttacagctgaacaaaccgaggctcagagaagtggagtgcattgcccgaggtcacagttagtgggagagctggccgggcagtcccctcgcactatccctgcggctctccgtgtctgcctttacctcctatgcatcacgtcctataatcacacttcaaaggatgagtcctctaaggttcctgttcttggcacaaggataaagtgaatgtatatgtgcctctgctcctggaggatggagaacttgtgttcctttcattattgtatgtagtgtgggggaagtaaagtcattcacatcgttcagtagccacacattttatttttattttttcataaggatgaagaggaagaaatcaaactggagataaatatgctaaagaaatactctcatcacagaaacattgcaacatattatggtgctttcatcaaaaagagccctccaggacatgatgaccaactctgggtaggtggatgtttcctgagcatttgtgggcattccatttgcttgaattgtaagggcatggcgggggtgggggcgggggaaagagggggggaagaaaaacaataaagaggggcagtaagtagctggcaggttctaaaggcttccttggcttgtatctgtgggttgactatatgctggttgtttattttgatgtcgatttcacattgcgtggaaaaaagttaactttgtgtttcgggaataaaatggcagcatctagaaggaatgtaaccaaatagcaaggaaattaggagcttgaaagcaatacaataaaaactttatttatgggaacaaaattaatttgaaagctcagtaaattgagcttaccacttggaaatgagagacagatctcaagaaacaaacttctgtcagtagcttattaataatattaatgataatagttaaaacaaattccagggaaatttctggaattgacacattcaaccttacctctttttgaacacatttatattcaagataatgacttggagataccatcagatctgtggctatcacattatttaaacttataaagcaggaagataggttaatactttttgtatcagtatttttaaaaggctattacagaaaacatttgcaaaattaagtagaaggcaaaaaatttactgttactattgcccaagtcagatcatagttaaaattttagaatagttcaattcagtttattttctgggtactttaaacataccattgtgatcatattgttcaaacttttagatactgtaaatattgcattaaaaattgtataactgcttaaaaataccattttttattcacattagacccagttaatataaaatataatagtttgaggatcataatgtgaaaagtagaatgtttttgaggtaaaatgaaaaagaatgttagggaatatttgagtcagatatttgataattgggtagtgatgaagagcaaagtggtcctcctgtgcccatgtgcttctgagagagaatgagcacttcagaattgctgcacttgggtgtgccgtagaataccagacactgtcagtcttctggaccaaatatatggagcgaatacactggactatgaaatgagctttcagttatttaggtgcctccaaattattatgaattattgaggagcatcacgtttctaggtctttagaaaagagagggcatggcggttaaactggttttcccaatttctccaagatatgttgctcaccttgtgtcttgtctgccctatagcttgttatggagttctgtggggctgggtccattacagaccttgtgaagaacaccaaagggaacacactcaaagaagactggatcgcttacatctccagagaaatcctgagggtaaggaaagtgggtggctacagtgctccaactcatgatcctgtgcttccgttttcattttcccagccccaagtacttctttgcattacttatatctatatagattattctctttgacagccaagggttctgtatatctagctagctttgataattttaagctacatcatga

SEQ ID NO: 24161 - DNA, 2300 bp, Homo sapien
catctcccaggcttttctctctgctgcactctccgtggatccctaattgcaaaaaatcaccaagtaaattctcttggttgccttagtttcagcagttacatatctttttgaattttgccatcaaagtggattttggtgaatttgctagtgccctcgggttcttttctcatgtatcaggggctctggatcccctctcgtggtcctgcacgtcctcagcagtacatccccatacaaggttggctcgaatgccgtggaatcagcttttctgtggggagtaaggctgaccagggaatagatgctgtcactatgagaatgtggtgtcttgcccctcctccccaaatcctctatacaagttgctgttttcacagggaacttgtttattttctgccaaggtgctcctgcagatgcttgtctgaacaggcgtgtgtcaggacttgtgaactgtcccatttatcttgtccttttcttcatagatgaaactgagtatgagtacagtgggagtgaggaagaagaggaggaagtgcctgaacaggaaggagagccaaggtaaccacaaagccactgttcagtatcctgctttatgaagggattaagttttatgttgtgccaggactgcagaagactcctgtgtggtacaaagaatcttaaattacttagacagcatcttactatctccattcttctctattcttgacagattcctgtaaacatttttcttccctggatcctcttacccagtgattctttaccaagggttgtattgtgtccccttctccagtcactgaaaaatgtgtgggcctgggcaggggagagtgccccagcatttattgttccagaagccacggatggtgaaggtgccattgaacaccatttcttgtggtatatagaacatggctacacaaaaagaattgtcccgcccatggaccagcaggactgtgttgtgtcctgatttattttacagtctgtgttttagtttatctctggctccccaaagttcagtaaagcagaaggttaaggagtcagatgggttacatgaacctcataataactgatgaatcagagaatagaggatttttggattgtgatgttgggtgtgcctggcagttgtccatgctgcagtatgtggctgatgaagtgaacaaagggagggtggaagggcatctcaagtgacctgtggggagccgtgtgccagagaatgggacttggaacagagagaagagaatttattgaagctactgcataatctctctttcttcttatgtaggagagattttaatccattttagactaagaatttcagaggaatttgaactgatttcataagcaatgtaattgtttttgaataggaggagcactgtatgacgaaaaaggcaatttaaggagatatgtttgccatgctgctctggatgctgtggcagtggagaagtaactcggtggggaggtcagctaggaagggtgtgtttaattgatctgtgtagtggctaattcgtaggacccgcttgggctcagctgctgacctggaaataagaaagtgggagggaattatgacagggcttggtggttgaccagacaaagacaaaggaatggtgtaaacactgaagagtggtctgatggttctgtttgctgaagaaaaaaaaagtggttaaaggactagtgaaatcaaagaaggtgatttcaacctttccttttactgagtttgaattgttacgcgaatcctaaatagaaatgtcttgtcaagcaaacatctaggacagcattttaagatatttactaaataagtaaaagaagatatgggactattgaattgtagatatagtcatttctgtggatgtattagttgtctccctggagtcagaggaactcagagaatgaatgtagaaatgggataatatgctggtgctattgactcacttataggacagtgtgatcggtgcacacccctgaaagccctgctttttccaacagttccattgtgaacgtgcctggtgagtctactcttcgccgagatttcctgagactgcagcaggagaacaaggaacgttccgaggctcttcggagacaacagttactacaggagcaacagctccgggagcaggaagaatataaaaggcaactgctggcagagagacagaagcggattgagcagcagaaagaacagaggcgacggctagaagaggtagcaaaaggaaaatgtccaagttggttggtcttttctctttctgcatttacactggtagttagccactcagaggaatatcctctgtagcttcctggggtaatacttatcccctggcacagct

SEQ ID NO: 24162 - DNA, 2300 bp, Homo sapien
ttttcagtttatgtcaagtacattgatgtaatagatatgtagctatcattttttcagttgccatattgaacaatcattttagaacagtaaaacataatttaatgaaaatattttatggattttttcagagatcattttcccaatttagaagcaaccagataaactcagttgacaagtaattgtcatatttttgtaatttcccaagtggaaggaataccccaacaatagtcaattcagggaatccatggtactgaatatttttaaagaaatcacaattctttattttcatcactaatatgaaagtatatggagatacctgggttatgggtgtttgtagacttgggaaaaataagaaaaattgttggtatatttgaaaaattagctgttcttgagatattatagtctcaaaacgtggggtttgtctttgctcgttgaacgtgccattttgttactcgctctggtgtaaaatgtgacactgcaggtaatgtgaggatggctaggtaggtttgcacatttggcagtgcgctttatcttacaatttttctgcctctctctgcctttccagtctctgctttgacatggatgtgcatgcaacacatcataacccctttgggctctgagagcctctttgtggggaaaaaaaaaataaaaatcttcacattaactgctatctgtaatgtttgtctggatattaaaaagagttttccttgtaaatgtacatttgttcttttctacatactgtgttcccagaccacttcttcactttgaagtgtaactgtttcactgcgtggctgacctaacactgtaccaccccggtgtgtattccgcctctgccagttcctgctttggatttggtattgaccagaaaagccagttttatgcagaacgcattgaatgttttgtgttttgttttcttgtaaggtacagtggtcccacctggcatctctcaagaacaatgtttcccctgtctcgcgatcccattccttcagtgacccttctcccaaatttgcacaccaccatcttcgttctcaggacccatgtccaccttcccgcagtgaggtgctcagtcagagctctgactctaagtcagaggcgcctgaccctacccaaaaggcttggtctagatcagacagtgacgaggtgcctccaagggtaaggagcagaaagacagatgtgtgctgcttttttcctttttgttatttttttttaaagattatttattttaattatgggtatgcaacttgaccaaatttaaaggggcattgaaatttcaaagggactttttactggtgaggataaagttccatagttaggcaattctgtttagccagtggtcagttagcgttttatttttgttaaccctaaataaggtagcaaaatgatgtaagagtaagtctacaaagaataggcttcttaaacaaattcataatctattttagcagttttttatatgtttatacagaagctatgcagttttgcaatattaatgtcaaaatttttagaaaaagtcctataagaaaaattttattttctttttaaatgtaggggattttgttttgtttttgtgtttacataatagtgaaattaaacaaaggagcccatgtcaatttatttttcctcatttggaatttgcttcctctgaatattttcttgcttcctgctagtctttgcttcctgctgatccatttatagaccattgtttggtttctttgagcttattttcctgattctcacattatctcagcaaatgctttgtatgtccctgctaccaagcttcagtccaaacatcatttaaatgttacaggagcatagaaagcctgtttgtactggcttcttggatgcttgtgactaaattttctctccgattgtatcagtgtaggaccagggaaggagttggggtggggagtggaggtgataggaaggactgcttttaaatattaggactgctttaaaaatatattttggtagggaagtattttttttccttttcatgttttcaataatttaattgctatattttctacttaaaggttcctgtgagaacaacatctcgctcccctgttctgtcccgtcgagattccccactgcagggcagtgggcagcagaatagccaggcaggacagagaaactccaccaggtaaaagacaagtgagcactgagaacaggccttctgtgcagtctaccacagccttacattgtctgtttcataaaaatgctcttaaacacagacgttctggggctaagagattatcagttataaaaggaaaagctgccataaaatccatcaacgtggatggcat

SEQ ID NO: 24163 - DNA, 2300 bp, Homo sapien
tttgacttttttttggtgtcttctattttttttttttaatctctctcttgactttatttggtcttttctatcaaaagccataggagctcactttctcatgaaactgggtaactataaaagtcttacaaaactgacattgtggcaatttatggttaaagaacttctcatcttctcctgtccctgctcctgcttgccttactctctcttttctgtcctttgctttaggatctgaccgcactggccaaagagcttcgagcagtggaagatgtacggccacctcacaaagtaacggactactcctcatccagtgaggagtcggggacgacggatgaggaggacgacgatgtggagcaggaaggggctgacgagtccacctcaggaccagaggacaccagagcagcgtcagtccccggtctcttttagagcggatgagagtattctctcagagcctgctttccactgggacctagttgttcctagactattccgtgaccccatgagcacttactatgtagttctcgtggattcagcagcaggtcgccttgtgtttccccttctcttcgttggtgtgtgcatatgtcagtgcttcccccagcaccccagcgtgtactttattttttccttttgatttgaggatatatgatccaggggaaatttcagtttggtataactactttaattagccataattattcattctaagtttttgctcagaaacaaatggcactggaaagaaattctttgttaaagggagaaagctaagcagttgcttttttggaggaggctttatatcggtagcctcatctcatgttttgattttgagaaggcgaaaagcctaaacaggatctccttgactccagagattaaggcctttcacgtctggattttttctccataggtcatctctgaatttgagcaatggtgaaacggaatctgtgaaaaccatgattgtccatgatgatgtagaaagtgagccggccatgaccccatccaaggagggcactctaatcgtccgccaggtacccgtgtcttctctgttgtcagaggctgagcttctcctgtggtcattaacccacttgctcattcactcactcatgctgtttctccatcatcatctgttttcatgttaacaagtcccagagggtcaagtgtcgagtgtcgggggctagggaggcaggtgtgtactgcatgcccagaaggtagcgagtagtctccaccccacatcgctgctcctctgcatgtctgcggcagccctcattcaagcaccgcgctgagtctcacagtctatgtctgagcgggagagaagccacagggagtccttaaacaggctcacagagtgaggaagcaggtctggagtctggcagagcagccaccatggctctgcagagcacgctgggctctgagtgtctgcagtgccacagtgggagcgggtgaggcaggcaggacgagcctcatcacaggcccagagactcggagagcagaagggttcgggaggtttctcttctatgttccaaaatgttagttttctcacttgttgaataattaaatgtgtgccacccagatatgctcagtttggatcactaagctttataactgtctgttcatttcttagcttagacttaattaaagtgatacgcttctcatttaaatagaacagggcacctatttagtattttggactttgccctaagtgtgtttcatgctatggcaatgcattcggatggaaagtaggaagaatgtggaaaagaccaggattcagagaatccacaggtactttctggagctttgcaaagaaagatttaaaaagaaaaaaaaaaggatactggttttggtaacagaagctagcgcaacagataaaccagattaaacactcactgctcgagccgtgcagccaccagattaggtactttgaattctgttggcacaagttaggcatttggtgaggaagtgtgagcagttcaggctaatttctttggtttttccttggtaatttagcagagtttataagtcacacagcaccttaaagcagttatcaatagggccataggcaattttagcagcgcttgagcgagacaagtgtgcctgttttttctacagagtacagttgaccaaaagcgtgccagccatcatgagagcaatggctttgccggtcgcattcacctcttgccagatctcttacagcaaagccattcctcctccacttcctccacctcctcctccccatcctccagccagccgacacccaccatgtccccacagacaccccaggacaagctcactgctaatgaggtatgtctcgc

SEQ ID NO: 24164 - DNA, 2300 bp, Homo sapien
acgcacccggtccagccttggggcatttgttcaggagaatgaaccaaccatttgccagggcttcttccagcaggccatcctgttctttctacctagcacagcggctcctcccctttgccctgactcctcactctttcaagctcaacttcccaagaaaggccaagcatccactgggagtgtgagccttggcaaacctagcagactggggtttgcttgatccagtcaccgcttgcttcgtggtgatttttcctccttgcctaccttgaagggctagagtatgatattctcaggggccaaggtgggtttccatggagaggacattctgttctgagatgatctccagttgatggataactggggcgttcagcctgagccttccaccatccatctaagctgagccagaggtaggcgcagagctcaagagaggcaggcagattagcaggatggctgtggcttcccagagcccccactgaggtaatctccaaggtgatctcacccatgcccctcacttgacagagagagaaactgaggcatagtaactgtgacttatgtctaaagtcctccaaggcttctgacttatcatattcccctccctgtcattgcaaggactgaaagcatcctgcttctggctgatgaagttggaagggagagggacttttaaaaaagtcagtttgtaggctgggcgtggtggctcatgcctataatcccagcactttgggaggccgaggcaggtggatcacctgaggtcaggagttcgagaccagcctggcaaacatggtgaacccctgtctctactaaaaatacaaaaatcagccgggcatggtggcggacacctgtaataccagctactctcctcctgaggctgaggcaggagaattgtttgaacccaggaggtggaggttgaagtgagccgagattgtgccactgccctccagcctgacagagtgagactttgtctcaaaacaaacaaaaacaaacacgtcagtttgtaaaagcagacgccgtgacatgaccactggccttgtatatctggaggttatgcatatccacctgggtgctcccaagggtcctggcaccttcatatctgggagggcaggaattgctggctgtgctgcggtaggtggggacctggagaagctaaatgagtgccccaggacacatagtagcagaagtagcaggtctgggcagttcacagtccctgaacttctgcctcctctcctgccatgtgcctattggctcagcctctgcacttagagtcttctgaaagacagccggtgttttctttggaagtctcgggctctggacccttctctccatgtcctggtgggacctgtgagcttacctcagaatctaaggaatttaggggcctctgggccaacagtcatgcagtggcttggcctaaagcaacatttcccagggtcccctgccacaacctctccctgggagctgggaattgagcgcagccagctggactctggttagtgggtttcataacgtgtttctgttttgcatagcgtaaacagcatgctgtttctcaaccaggcagagaagttctggcattgcttctctgcaagcaaatgactcttaggcaacccctgtgttgaaacacggagcagcttctagaacaaacctggggttctggcttttgtcctggactcagcccttcacacacagacagtgctgcccctcctggtgttgaaggctgaaaggagtcagcgtggagaaaacacgggctgtgccatttgctggtgctgggccttggtcaaatccactcacaccctctgggcctcagtttccaaacctttaacacgggactcaaagcatatgacatgatgaatgttagaaaatggaatgaaataatgtcggagaagcacctatctcagtgcctgcttcctttccaattccccaccctagtgggtccccaggttcctaccccatgggaccccctgtggggttgaggacagtaactcattggcagtttagcaatagccaagcagaattagccaaggtctctgcggggttggggagggaggagacgggagtcagggactgggatgggggtggggattgcatcacacaaaccaaagtcccttgtgaggcagttgagattaatctacaggaggaggagaagaatcatccacaccactcttcgccacccggctgggagcaattccagaaggcagggtctgcttgggcagttgagaggccttggggtgagctgccaaaagctgggtctgggagtcagaggcagcattgcttctggttgtgtggcttggccagagccctcatatccaccaggg

SEQ ID NO: 24165 - DNA, 2300 bp, Homo sapien
agagagaggggttggaaccttgccacaagggttttcagaggattctgctaatctctgaaccagaccagactttggaaaggcctcctgggtctaaaaaatgaggaatcattgcttcaatctttgcaataaacatcctgggtgactttcacctcaaacctcagaggatttcacgatggtacagaacattctgtgcttgtgggtttcccatcagttggtggagaaatcgagccattcaaatgtgctattggtggtggacacagtgcagcatgggccatgaagcggggcggaggggtaaagtagccatggctccatgaggctccggcaggcctggggacttactcttgggtgtctgttgggtctgagcattagttcttgaaaagactatgtaagcaattcttgtgactctatgatcaagttttcccatagaaagaagtgaggttatgtaaattcctccttatagatcacaagatcagcagttaactccagcatggccaagagcagatggcatggttttgcttcctctctttggctgaattaagctgtgggcttcctgtgttatttaatgaaccgaatcctaattgaggcaggtcagctgggggtgatgtgtttagttgagcacagagcgagggtggagacaggggctcaattattggcgtgttctgtatcctgggatgatgatggtatttggtgagattttcctactgggatgaattcccacccttgaaacttactaggcttgactcaaaatttgtgctttgttcttcaatcttgcctcatcaaaataatgggaaaagccccaaatatttcaccttctaatggtccttaaaaagaataaacatgatataatgtaacatttaccctttgctcaacaaactccattttggggcattcacagtttccaaacagtttccataagaatccatccattgtgaagttatacacaccattaaatcaatacagcttactcaccttgctccccatcctcaaatgtctggacttcagttttctcttctttttaaactggaagacaaatttgaccatctctaagtttctacctagctctaacattgtatttttctaagattttatttaaccagttgagatttgactttcgagagttaccatcctttgttagcaaaaggataaaactagggcccatgggcccttctgacttagccatttgttctgggtatgaattccctaagatttctctaaaggagtttctatacctgcctctttacttgtaagaaaatgaagatctgcataaaccaggcagacagtgttatgaaggttaatgccatgggttttaaagtacattttgaaaagcattcttcctttccaaccaccaacaaagggattccaaattacacctcttcctaaacgatgcaacatgagtgagcacataggcgagaggtcgcaggggatgataagagggttctagccctggagcctggctttccagagaggctgtggccaaggttttacgctcccatttggcctcctgttcatatgaaggaaggcccaggaccatgagttctcagatccgcgggctctgagcaaaccgggtgcaccctgactcggcttcatcctctctaactccacggtggcgacttgcatgggagagaggagcaaccaacaacaccttcgggctggttagggggtttaggagacattggttttgtacagacatgacttgatgctggattcccactttcagaagacaaactattcagttctgcaaactccacaatctagaataaggaattagataaccaaccccctccttcacttaacagttaaaaatcatacaggactctgaaaacaaaacaaaacaaaaacttaacctttcttagatcctaaaagcgttccttggatggaaaaccaactcttccactggctaaagatcaaaagcatctttttctctttaatggggccacagttgggcaaaacgcccatcactttaaaaccacctctcggctggaagtacgtaatttttagcgagtcacagaaaaatagggaaacttatgcggcgtttccttggccacttccccatctgggtgatcatgtactcagacccagcactgcagcctgggggtgctccccgtgaggaggaaaaggtgtgtccgctgccacccagtgtgagcgggtgacaccacccggttaggaaatcccagctcccaagagggtataaatccctgctttactgctgagctcctgctggaggtgaaagtctggcctggcagccttccccaggtgagcagcaacaaggtgagagaatgcagagctgcaggtaagaggct

SEQ ID NO: 24166 - DNA, 2300 bp, Homo sapien
ctttcccactagggcaggggaattaagcctgctgctacatgtattgctgtctgagtcggctcaaatctacctctcttgctttcattttgtttcttttggggagatgttcactcttccagtttctcaccagcaccttcttctagccaggaagaagcctgagaagagggggacattgtgtccccagggagtggtgggcagctgatccacacgtgctgacctggggtaggcactggcttctgtggagatgtccctggaccttcctggtcatgaggtgtcctgtggaatctactgctggcgtctgtgactgggaaaacccgaggtctggtgcctcagttgtcagagccagtgctccatccgaggtcaccccgctgtgcctctccctggctccacaggttctctgcatcttggccatgaccttgtttcttctgtggcttagactgtccaggtgatactcaaaatgtttagcaaccagcagggcatgagtaccagcccatcagaaaagatgctacagcacctgttgctgcacctgaagagctccgaggagcaccaggaaagccaagggagcagaaggtggagagctcagggccttggggaagtggttatctaccaagaggtggggcagtcttcccccacttggcctcactgctccttactcactgaatatcctgaagctgtggctacaggtcatcttgtctttcatcatggcagccccatctcagcccagatctcagtttaccttccattctctcctgggagtgcaggggaaggtctgaatctctcccatcagtgaagcacccctttacctaacagccacaccattatttccattcttctttagtgccccttacttcaccaaggtgggattcctccagagatgcaacttggaagcagagcaaaaattcttctgcatccagccctctctcttttacctcttgtccctttgccttcaggtttcaaacccagaataagaagcaggactgcctgcctgattcctcttgtaccttccctcctttagccctggagcccaaagggtctttttcttctactgacacttcctaccaggaaggaacttcccctgcatcatattcacttcctttcctctttctgaggaggcctttgctctctccctttcctggggctgtagtggcagaagaatccagaatatcaaggaggaaaacacattgggaggtaattgcaatattaccttcattgcgtctgtgttgcatgtactgtcccatcctagagaaagaggagtttgaacaaaatttaaactgttctttgtgattcaaggaaatcattaggagcatcaattgttttgtgctttaatgtcctgatatactcagtagggcacagtaacatggaagggactgctggtgtctgcgcttaaaatcccgaaatggctgtgtgctttggttctcgcacctgccttaatggttttcctgtctcctctgttactgggcaatcagctgccgcttttttcagtgtgtgttttcttctcctagccttctccctctttccaatttgccatctggaatctgcttttgattgagcattctgttcacctgttgttgcatgaaaaactatcccaaaacttagtggcttaaaaatgacaactattttatgataactcctagtttctgtatgtcacgaatttgagggctcaactaggtgattcttctgctccatgtgtctgattgagttcaaacagtggtgctcagctggtgaatggactcatctggagggtccacgatggcttcacttacatggctggtgcctttgcagggttcctgggaggctgagcatagctaggattgtcaaccaatgccctacatgtggcctccctagcaaggtggtctcagggcagttggactgtcttcgtggtggctgactttccaaggaagccaggcagaagcaagcaccccttggaaaccaggtggaggctgcatggatttttctgatctagctcaagagttcacacagcatcacttctgctgcattgtattggttacaccaagttacaggccagcccacattcaagggaggtgagttagactccacctcttggtggcagagtggcacagtcacattctagaagaccatgtgggatgggagatactgttgtggtcacctctggaaaatacattctgctactcttaaaaactagtgacgctcatacaaatcaacagaaagagcttctgaaggaagactttaaagctgcttctgtgagtgaaatatgctacatgcctttgtaccaggatctgattggctgtctttcccctactcagatcttcctgtccttg

SEQ ID NO: 24167 - DNA, 2300 bp, Homo sapien
ctacccaggggatggagtgagacaggcaggcacaccagttatccaaggaaaggaaataaagggaaggagaaagtcagtgaaagtggtcaggatggctgagtgagggagaaggtgacttgaaggtcccagatagaacagtggtaataaggtgagaaagaggaggtcttccaattccatttctgtgttgggcgggtgtttgagagtcccacctgggtctagaggcctgcatgtctagcaggacactgggtaggagtggctgaacggggacaacacttaaaaaagacaaaaattacggattttatttctacatggttgcacaaatcaatttcactttctacttgtaaactgcttaaaaaccttcattatgaaaatggaaggacgaatttatgttcaccatcatagtgcttctgggctggttccacagcatggagccaggcccacctgctgtagctttcagaactgccatttggacacgtggttgaagcagccttcagttggaggattcacagtaatggcatcactgtgggagcttagaggaacaactgcttgcaaccccagctgcactggaattacctgggagctttaaaaacactgccttttgggcctcagccccagagactctgacgtgactgatctgaacacaggagtgtcatgtcctccggtgattctgagtggagtcaaggctgtgagaccttctgctgtataaaggaatattgagagctgggattgttaaggaattctcttaatgctacgtcactggcctctgatgtaagcctgctttctcgaggaaaaggaaccataaaagcttctggaaacagattgtttaagaatgagaaattgtcatcatgccaggttgcaagacagcttttagggcagatgagcttctgctgctcattccttcatcttttcctccagcctggatttgtccgggggcagctgaggctcaggttacctcaattcttgagtttctgaagaggcatatccaggggtgggttacgagaacaagagcctgcccagtctgaaagggatgcaggaaggggcggtgtgtactagaaggaaggaagctatcatcatttattaaaactcttcttggaggatggcccatgaagacctccaaacaagctggaggggccagtcacttgctgaagactagcgaagtggagggggaaagcccgagggagctgcagactcgaccactgcgccctcccctcctctccctgcaaggagcccaaggtgtgatcctgccaggcgttcgttcgctgcatgaccttggccatccttccattcccctgggtgtgaattctcattggcaaagtgagctggtgggcataagtgggttttaagtttaaaaatttaaaaaccctgtctgcccccaagtgtggtatcaagattttatagtatgacacttaaattgcttttttcatccgggcgcgtaacagcaacaatgaaaccagcagataacgcgtgagtagtatcagctctgggcctggcactattttatatgtattagctcattttttttaaaaaactgttttcaaccactccatgagatgagtgctcttatgatccctttttcacagaagaggaaacggaggtacaaagaaattagtgcacaaagccagtcggagagagcccctggccaggcaccaagctccagaggtcgctctggcgagcgtttgcttcgggatctgatgccctggagtcgccaactcaattcgcgggtcgcagccaggctccatgggggtagtagagccaggtcgtagtggctaggtgagttgtctcaactaactctagtggagccgccgcagccctggaggagccgggccgcgactcgagagcgcccggcagctctccaatgctttggaaccggcgggacccctgcgggctacccggggcagggcggtgtccgcaggggtctgtccagccgcgcctgctcctccgggtggagagttgggacacccggccagctcgctcgcagcccgcggactggcccagccgagccgtctccgcccgttccccgcccccgcagcggcggggctagagccagagccgcgcccggcagttcccggccgcgagggcgggcgcagcttgtggccggcggccggagccgactcggagcgcgcggcgccggccgggaggagccggagagcggccgggccgggcggtgggggcgccggcctgccccgcgcgccccagggagcggcaggaatgtgacaatcgcgcgcccgcgcaccgaagcactcctcgctcggctcctagggctctcgcccctctgagctgagccgggttccgcccggggc

SEQ ID NO: 24168 - DNA, 2300 bp, Homo sapien
agaggtgcatggaggtggaatggcacggtgcttataaacggcaaggtagggagccagcgctggacacagagccagctgaacagtgaaggcagaagagtagggggcgctgaccctcatcccaggggtcaggcagaaggggccgatgggatgggtcaggtgctgcagagatgttcagtgggctggagacagaggggtcttggcatggagaacctaggagggatagtggcctgggcagtgcatctcagaggagcagtgagcttagagggcacatggtggtcgcttcagcaatggatgagtggtggagacagtaagtatataaattcttaagtgaagtttctggggcagaaaaggagggaaaatgaggccattagaagagtgtgggggccaggtgcagtggctcatgcctgtaatcccagcactttgggaggctgaggtgggtggatcacgaggtcaggagatcgagaccatcctggctaacacggtgaaaccccgtctctactaaaaatacaaaaaattagccgggcgtggtggcaggcacctgtagtcccagctactcaggaggctgaggcaggagaatggcctggatgcgggaggcagagcttgcagtgagcctagatcgcaccactgcactccagcctgggggacagagcaagactccgtctcaaaaaaaaaaaaaaaaaaaaaaaaaaaaaaaaaaaaagaagagtgtggggagtcaccttctctgcaagaagcttcctgggcctcccaaataaatccatccctcccctccccctccccctctcccattccatacattttggtgccattcactatataattcccagcagctgctttcatatctggggcatactcacaggggtcagtcaggagggcactgtcctaggactgggagcgggaggatgtgggggtctcccctttgagtttctgctatgatgtgattccaattgatgggccaacacacctctgataccttgtgttatgctgtgtactgcctcaaagtgaataatagcttgggatttagtttgtgtagtctaaggaaaatactttgtgttgaactagtcaggctgtgttattgatggccattaaaaggccttgtgcttaggtcttacaagcttttcaaaggcccaaagaaatgattcagacaaaaaaaaaaattagactccaaaatactaaaagaaaactgcaaaaacaggtgaattaatggtgaaagatctgtaggacatagcagtaaggctaccacaacccagctttttgaggttgtcttaaattaatgtgatatggggtgtaggtatgttaacatgcttgataatggaagagtgaggatacctgcttcttaaacagggcctgctcatttttttctggcctctagtacatttctttctggcaaaactcaagctctgttttcacggagatgatgcactgagccatggcatccctaggtggtttgattcatttctgcaccccggtgtctagcaaagtgccacgtgcatgtgtttaatcaaaatagcttgtggttgtcaagctctttgtattcttccctccctccctgtgatttgatttcctgaaagtatcctttccccaaggattatggaacatacacttgttaaacactggacccattttcatgatcatttaaatgtcatgacctttctgacaccttgatatggtttggctctgtgtccccacccaaatctcatctaaattataatccccatgtgtccagggagggatctggtgggaggtgattagatcatgggggcagtttttcctatgctgttctcatgatagtgagtgaattctcatgagatctgatggtttaaaagtgtttggcacttccccccttgctctctctcctgctgtcatgtaagacgtgcctacttccacttccaccatgattgtaagtttcctgaggcttccccagccatgcggagctgtaagtcaattaaatcctctttcctttataaattacccagtctcagatatttctttatagcagcgtgaaaatagactaatacatgcctcttgagatcctcacagcaattggtgcctttagacctcttcattcacacttcactcatgtgttcttccttccccaggtagacgcaccctctgaagatggtgactccctcctgagaagctggaccccttggtaaaagacaaggccttctccaaggtaacagggctgagtcaccccagggtcccaaggccggccttttctcacaaatagctgaactcctccactctcagatccaggggccctggactatctcccattgtatgcaaaaatattttatttc

SEQ ID NO: 24169 - DNA, 2300 bp, Homo sapien
tggtagggggatggtgataagcatctattacatattatacaccctgttatggaggctttacaactgccacctctgaaaactgggcataacctctcaatctaaatgtatataaaataaaatcacaggatagcttttacatcagagcagcaaaactggcaaaatttaaaagtctgacattaccaaatattggtaagaacatgaagcaatgaaattcttttcctctaaaggacatagctatggaaaaaaattagggcttttctaatacaattgaggatgtacctacccaatgattctgcaattccgttcactaaatggcctctgaaatactcgcacaaaaggacattaccagaatctttgcagcagcaccgtttataagagcaaaatataaatttggaaaaacttaaatgttcgaaggagatgaatacatttaagtttttttttttcaaggtaattgagaacctgcagtaaatattatggtttcctgttatttttaattgctaagtttacaatacccggaatcagttctgccttcaaagccaagtgttcattttccacgtatcaggaaacacatttggcatagagaccatcccaggaagttaaatttcagattctcagaattagtagcaaagtgcaatgtcagaagtgtccagtgagaggcactgcaggggactgggatggcctgtcttaacttcatacattttggggcaacaatacccattaaacttggcatatatactagtcctcaggctaagaaataagataggacacaaatgcatctattcataaagtgaaaatgaaaaaagatagcataaagatttagaaatacctttcaacactgctcatagaaataattctgaatgcaaatcatatgacttttataaaaatagtaacacttttgttttgttttggatgaggacataaacgctgaagaatatacatatacagaggaacctcgtttactgctgatagtaggggaaataaataataatctctatttatagcttaagaaagaggtcctcaaagagtgggagccctatgggtccctgagagacccttcaaaaagatctgtgaaatcaaaactatgttcatcgtaatattaagaccttatattccttttttattctcattctctcattagtgtatggtggaccttttcagaagctatatgacatattatatcatgacactgattgcagaagcaagtatgagaatccagtcatcttctagtaagccagacatcaaagagatctgcatctatgtagaacaatgccgcttttctcaataagcctgttttagaaagtagagttatttttcataaattgtatgatatttgcgttaacatgtaatgggtttattgtcacttaaataagaaagtaaacgtttaaaaattctccctttaacttctaatgtagtaatattgacaggcataacctacatagacaaaagcactttggaatcctcaatactttttaagagtgtagaaatctacaaaccactgaccttcagcctatcacaggaagctttgctattagcacaattattgcatctctgctcctatggttgcttttgtctcactgtctctgatctttcaaagaccgttgggaagagcttgaccagtaatctattgaatggagattacattttgaaccttttcctacaactcagtgccctgtgggatgactctggggtgtctcctgatggctagggcaacaggtccctgttgacatcaccttatcgggaagttttagacaggaacagtcttcaggctctgaagtacttgaacaccatgggattcctgccttacagaagttaatgagcacgactcaggcagattcataattctccttagaagccatttgggatggcttccactttggggtcattccacataggccaatgcagagcatgcagtaactgctcaaataggatttggaaaggaatgaataattcatttagacgttcaacttggaatagacttaagcagacactcctggtgatgaaggacttagatgccagaaaatcaggctcaaagactttcaagccacttcctagtgtgatgtcacattccttcctacgctccactggggaaggcaggtctgccccgcccacggtggcggggaaatacctaggcatggaagtggcatgacagggctcgtgtccctgtcatattttccactctccacgaggtcctgcgcgcttcaatcctgcaggcaggtagacaccgggccgggagtctggctgagccaggcatgggtggggccctgacagtaggagaggtgtgcaggaaaagacgtggcaac

SEQ ID NO: 24170 - DNA, 2300 bp, Homo sapien
taatcccagctactaaggaggctgaggcaggagaatcacttgaacccgggaggtggaggttgtggtgagctgagattgtgccattgcactccagcctgggcaacaagagtgaaactccatctcaaaaaaaaaaccaaaaaatcttaaatttgcagatttgtaaaatcctacatccctgtccccacctctcttttcccatgatctttagtttagttcctcaaggtcaggaatgagtctcatcttctcttgcacctctcacagtgcctgacacaatattggggacattgataagtattgttttgtgtattacttaggcatattttctgtggttctctagcagtggagaataaatgattgatgatcttatgaagtcatagtccacctaaagactgcgtagtacgcaaatgagtctaccattatctcctcgatgtagattttcatcttttatgtatggtgactctaggtaaggagaagaggtgatctagctcacttggtgggacgagcgtcttgacacaaatccacaaaaaaaggagagtacacacagctgttcatttgtctgtgtgttgaggtgggggtgggggaggtgaggttgtattcacacagagaagacatcttagctctgcacccaaaccaaaacgagcgtcagtgatgttaaagattgaaggtcaggtgctacccaggttttgttagtctcttgacataaacatggtgtctagatatggtacatattatgaatcattccatcttttcaaatacattttgaagggtttttttgtttgtttgtttgtttttgagacagagtttcgctgtgtcaccaaggctggagcaccgtggtgcagtcttggctcactgcaacctttgactcccgggttcaagcaattctcgtgcctcagcctcctgagtagcttggattagaggtgtgcaccatcacacgcagcaaatttttgtattttagtagagacggggtttcaccatgttggccaggatgttgggattacaggcgtgagctaccatgccctgccagaaggtttgtttttattttaaacacaattgtgctgggtgtgataggatgggtatatgatagagcagaaaatcactagtatttcatcaatatggatagcatcctccataggttactgatttaatattgacaacaatacccttcacacgagagagaggttagagaatttgcccaaagtcaagcagctgggaagaggaaaactaggctgtgctctccctaaatctcatgctctattatattagggaagactctggcagatggcacatcctgattatttgaaagtcaccaatatttttagaaattgcatagataattaaggttagtttatccagaattctaataattgcagcacatgtccataaatctctattacaaccacctgagataggccatctcgggcatgtggaaaaagcccaggtatagacactttggatcctggatttcccttgtactggctgctaccttgggtaaggtaattctcctctctgaagctcctgtcagcttctgaggattgcgtgggatagcacataccaaattactgcacacagagcctggtgtacacttaagcacacgagatgtgtcaaagttttcaaaaacattgccaacgaggcatcagttacaaaacttgctgcagagtgagctgatattgtgccactgcactccagcctgggtgacacagtgaggctttgcctcaaaaaaaaaaaaaaaaaaaaaagaaagaaacaccaaataagcaacttgctgcagaaatgggtactcttgttctagaaatgtgactatagggaagttacaactaccaactcgcgttaagggaaatgagtgacctgccacctacatggtgttagggaggttttgctgagaaagtcactcatgaagaaggcaaaatatagttaagacaaaatgtaactatctatagagataaggtaaaaattggaaatagaacttcattaaagatctttcaaatagggagaatgtggtgaaaactgcagttaacatttgttaacagtgtgatcatcgggttcagcttatcagtaacctggttcctgtctcttaactgataaagaaaatgggaggtttttaaagagaggctggctgttgtatttagtaaagctataaagctgtaagagaaattggctttctgagttgtgaaactgtgggcagaaagttgaggaagaaagaactcaagtacaacccaatgagggtaagtggctttggggtatttttcaaaaatacttttatctcaaagggaacaaaattttcacatacgaatttaggtcat

SEQ ID NO: 24171 - DNA, 2300 bp, Homo sapien
atgtattagaagcccttgcctttttgcagtttgtcttaagttgctataaactactctctgttatgttgaatggtgcctgaatagtgagaagccaaaataatttagttcttttcaaagaagaaattatagactagcttattttaataacccagtccaaattataaaaagaaaagctttaccagcctaatctctggtatagagaatgttctctttttttagttgacattggggggagaaaagcttgactttgaagttcagcaagtctggtttcaaccccagccacaactgggtgaactttgtcaaattacttaaacagtcttatccttgggtttttatttgtaactataaaatttgagtgatgttaatgataagtaccacagagtattgtactttgaatgaaaggtcttaattgtcaaatgaacaactgaattattttataggaagagttcaactttaataaatactcctgcagaatttcatcattatgatgttaaaattgatggaagctttattttttaaactgagaaactaatgcttacgtggcctagtttaagaatgaatgctccaacttaatacatgttttaaaaagatgttttgggataccaaatgtaaaagaattccgagtttgtgttattttattgaacaaacctattcagcacttggggaatcgcaggcagcattgcagactcgctggctcctggctgtgatctcacacccaaactgcaataatatcctgataaaacggacttccacaagtaggtcaagaataataatgtgcagacctaattcctctaatttacggcgaacatctcatggtcaatctccccgcggtcaaaggactgtgtatctcttcctctcagagccactccacaggctgaaaggctgactaaacccctgacagataagagattcaagagtagtcccagcccccatggggagcaaagacgctggctcaaaaaacgtactgataactctcccttttgcagctactcctttctgaaccttccacaagcagtggcagttggattctgtgattagtctagtcttcagagccagccttcttgagttcaaattctgacttcaccccttaatgtgaagtgacatgggcaagttgcttaatctctctgtgcctcagtgtccttgtctgtaaaatgggcatcataataatagcgcctgccacattgggtgagtgtgagaatgaaggaattaatacatgtaaatcacttagactgtgtctggcatagaggacattctaaagaaaagttagctattatcattatattattatatgggtctggaattagttcctgaatccttctgagatgtgatgacttataaacgtaggttgagtttactcatgatagggtcatcgcaactatgcatagctaaaatcaaattttgcttttcaagtttgttttacctggagccctagagttcagggttatggttttctttgtcactccccttgagggaagcttcttagtcacactctccttctctttctctgcactctatgcactctagaaaagctcctttttttttttcttcatccaggcagagaggcctactgggacttaaatccaaggagctgaaatctgttttgggatggggtggagtcacattctggaacctagacagagaatttctaagttccagaaagtgctgcttacttcgcatttcctctcccccacctttgcttttgaaactcctggcaccaatgctgccaaggctggcggagctttcctgagtggtgtctgccaaatgaggagtcaaggaatatctggaaaggcagcctccaggtccccgatgtcaagaccatttagaactgaaagtgtcccaatatcggggtacaggcaataagcattagttattaatcagcctgagaagttgattctaaaataggaggaaatgattcaattatttcctctcaagggattactcaatgttgtttttatgtttaaatatttatttgtcaacatcaagaattcttagtacatgatgcaccagcatttttgaacaagtcatagatttggccacaaatcaaatttcaggatgggaggagtgtctcccctttaaaatagaagagagtgagtagtctatgaggagggacctacaaagactggaaactattcttagctccgtcactgactccaagttcatcccctctgtctttcagtttgggtaagcatcaattacttatctaaaatttgtaataagaaaagtcttcataattcatgattgtgtttatctttatgttagtaaatttctatgttggttctattcttccccttatattttaa

SEQ ID NO: 24172 - DNA, 2300 bp, Homo sapien
acaggcatgagccactgtgcccggccaaacatcttaattatgtgacaacatttataaaaagtacaagaaaacatgttaaaatattatacatgttgagattattttcttctttcagtcttcattttgtaaatctcctacattgagtgtaaattgctttggaaatcagaaaaactttaaaaagaaagaaacttaagagttacggaaaagcaaaaatattgatgttaaacataacaattaaaaacccttaaaattcttacatgtgagacatttaatatttatattcttctatgcctattttattaatacttgctagagtatctgttacatttatcagaatatctctttttctggaaatgaattcattatttaatataaccttaatctgttaaattcacacataaaacttaagtacattaaaaattttacatacacacatccacatttgcagaatggtgtgcaaataccagctaatttttgtatactgagatcttaatatgtttcatattgaaactcagagttaacttgtcagtttgctgagccatctcctgataactttgtctcttggtagatattgaatattttttttaaagtggtgctttttataaggttacatcagtcttaatcagagtgacataaaggaaataacattttttattctatccaagataaaagaataggcagagttaataataaaatgtgtgtggaggtagtgggggaggtttcaaaccatagacccagtctaatttgattatgcacagttggtactttccattcatacttgtttctttggcctttacattattgattattatctcttggaaattccaccaaatatttggtgatttttccataaggatgtatgtgaatggtttggcagcttagccattaagctttatcctggattcaggcattgacaactctgtttttaggatggaagatgagtagttgttggtgagaggggcattattctgagctgagaagctgccatgcactcaggaagtctccataagccttagatggtttaatcactcaataattccagaaacaggccttcttatcatctccattttggtaatgaccaaataggctctaagacttgctcaagttttgcacagcttgtcaggactcaaactggagtggcagcccaggtttgtgtgtttctgaaaccagactctgccatcaggctgtgctccctgcactcaggatggtaaacaagggatatggtgttgtttatgcagtatttagactctgaatggtctccactgtgggggatccttcctccactgggctcaaagttgtaatcagaactccgaatgctaggttgcagtaggatcaaagttcaatgcagatcttagttccactgggacacagtcaatgtaaaggaggggtctggagtgtaggagactgtcacttcatctctccatttccctaaagtaaactcatatgggcagccacagacacacgcgaacacatgcatacacacctatgcctcagtgacacatgttagtgagtgctggccatgtgctaggcatcgtgctggattttagtgatacagtgaagagcaaaatagacttagtgcctagaattatgaaagaattatgaaacctacgttctgaaggaggaagatggagttttaaaaattcaaccctaaatgaagatctcattacaattcaggaatgttttgatgtgaaaacacacacacacactctgttacatgggcagaactgccatacatagctcagcatgtcacagattgtttattcatagaatggtaatatttgtagcagtactattgttctgaactttggccttggaagcaggatttagtagaccaggcctgaaattcttcagactctgttgtatcagagaaataaattattagggatttcttccagaagaaaaacttcattgccttgaaattttattaattttatatggctgaaagttctgagaattggttactatattaaggattataaaaatcttctaggttgtttttttaaaaatctgtgtgccagaagatttttaaaccttcataagataggcacacttttgtttgaaagctttggctgaatctgttttattctgttttccagagaagccatttgaagcagaatccaaaccatgaattgtagagaattacccttgaccctttgggtgcttatatctgtaagcactgcaggtaagtgattatacatactctcaaacatatttcatgagtaattgaggaagaatgtcaaagtttttttttttatgtggtggctactgaagatgctgaatttattcagaaaagaaaagat

SEQ ID NO: 24173 - DNA, 2300 bp, Homo sapien
gttagaacagctggggcctggcctagcatctctttctctcctgttctcacaatctgcctagcttaggcttctttacagtaaggtgatctcaggatatttgggcttgttacctggtgtctggctcccaaaagaggaatcggaagctgaagatcttttaaaaactggtctgcaactggcaacagtgtcacttccactgtgttcttttcatcaaaagtgaaccataaagccaggctagattcaaggacagagaaaacacattttatctcttgatgtgagaaacaaaatgcacatggaagtaaatgggaaaaggtgaggagttggtggaagaattgatggcagccatttttagagactagctccacaatgtctacagcaagactttccatctcctgtaagccctgttcaaactctattaaagtgatcaaattcactttaggaggcaactaaatagctgaaatagtttgtatattagttcctgcacaaatctcacgttaaattgtaatttccagtgttggaggtggggcgtggtgggaggtgatctgaccatggggtcaggtttctcatgatggtttggcaccatccctttggtgttgtccacacgatagcgagtgagatctggtagtttaaaagtgtgttgcatccacccgtttctcacacctgctttcaccatgtgatgtgactgctccccttttgccttctgccatgattggaagcttcctaaggcttccccaggaaaagatgccgctctgctttctgtgtggcctgcagaaccatgagccaattaaaccacttttcttagaaattacctggtctcggatatttctttatagcaatgcaagcatggcttatacaataactttagattcagttttgaggtctgcatcaagatctctgaaacttcacaaggacagcttccacaccccaattcacttgaatatagttccattcaatggttattgaacacttaccaaaaacaacaccttattattagcctttttcattcattcaacctcatttctccaaaacttcccgggtctcctgcccttgttcttactactgggcctgttgccacatgacattgtaaacctgaagcatcacatgcctggagtgtctgtttcactgctccttgttaccactgttggaataggcttggaacaaaccctcacatcctcttggaatcctaggtagactcatgaccagtggtggatacatttttggggctccttcctgtctgcagttactaattcttcttgtatcctcctaccctcacctcaggtaaacacttattttgctttcataccaaagtaaatttagttttcatttgtatttcatgttattctctacatatgtgtagaagcagcctggagctttgatgtgctcagctgtgccagctttacctttattagaatactagactcttgacggaggatgttatctagacttcaccaagatggtttctagacaaaactcattacaactattgtggtctcagagtttttgaagtattaaatggtttcagttgctctatcaaaggaacaatggagttttcaattatatgttatattctgagactatctctcaataggaacataaaaactcaagtaactttagactttaaatgtattttcctttatgtattaataaattattgctttataaaattggtgttggagacataatttttctttttcaaaattagaaagttaatcacaaaataggctttagtgtttatctcaaaggtcacacttttagagattagttttacaagaagaaaaccaaaacccacagttgagaaattgagttgaaagttaatattctttacaggaaattcctgtaaaggaaaccagcttactcactctttcaactaaacccaaccacaaactttatctcatcaaggaggttggtcagagaagagtttgagatgcttcttcttcagagcacttcctactgaaagaggtagtttatttgattttcctctgtatgaccatccatttcacaatgtccatggtcatttacaaaataaggttttcctttttcctccagttataatcctttatttttgagctggtgtaacgtggctattgtgtcttctccaggtatctctctggataggaagaaatatagtagaaccctttgaaaatggatattttcacatattttcgttcagatacaaaagctggcagttactgaaataaggacttgaagttccttcctcttttttttatgtcttaagagcaggaaataaaggtaagagagcagtacttcttttttttcactagatttcctaaccagaaaacata

SEQ ID NO: 24174 - DNA, 2300 bp, Homo sapien
cagctaggcactattcctgcagagaggctgcaggactcagaaagacaaactcagttcctgctgggatggaacttatattctagttggggagaagttttaggagtaagatattttcagacaataatatgtgctaagacaaaagtcatttaaaatgagtagcaagagagatggttgatggcaagaagggagagggcgcttctttatccaggtggtcagggaacgactctctgaggaagaaatcagggaagacatgagagagccaaacgctacagcattttgtccatggtgctctggaatctgtgcttcatcacatgggtggtgggagccggtgacgttttgggcatggaaatgaaatgcccaggcttgctgcttaggaagatgtgtctggtggtggagttggaggactgttctttcggagactttgtggacaagggaaaggcaagtggggagaccacatctttaaaggccattgctgatcctgccttgttccttggttgcagtccttgtaagaagagctgtcagttgtcagcaatggggataatgcagtgaccttaacacctatccgtggcattctgcaaggcgcattgcacagaaccccctttctttcttccatgaacacgccttgctctcagcagacagccaggtcagcatcagcagccaggtggtagcatcctgtactttcctgtactttctggctccacctggacaaagtggtctgggcagactttccttttcacctgcatggttctacctgcctcttgtccaagattaatctccccatggtatcagggaccccacttcttctggcttcctgggagaaagcagtccatgcaccctctcctcactctcacttgtatttgtcctcactgacctgctgacgcattcccctcgcagtggaatcctacccaaggccctctcatctccagaaatgagcaaacacttcctcctgtcttcctgcatcatgcagactctagcaggcgtggttcttccccgcttcccacattccctctactcctctctctccaccctgaagctctccgttatctcaccccagctgcacatgctgagcttttggtggccaaaccaagactctttggtggacacttttcagtccttctcatgcccaactcctctgcagcttctgaaactgatgtctagtctctcctccaagctttctctgtctggattgccaaggtggtctctctgctctgctccttgcattccttttaggtttgtcattctttattttccattagccctggcctacttttaaaggttgaggttcctcagggaagttcatctgccctcccttatggggcaacagaaacaatccaggcttgttacagatgccccaggctccctccagctgctgaaactgagaccctgctctgagccatatgcctccccacccctctgccctgggaatgctccagctggatccccaagatatttcaagtaagtggtttgaaaggtcccatgactgccttatcaagagaggggactcaagtcctttggacacagcccagatctgattctctggaggggacctgctccccctttcatatttgagagttgatagtggtgccatccagtgacaattttccctcttgcatgtggggcagggagaggtaggtggcctctattctctaatagaatagactagtatatgcaaacattctcaaattttataaataggagctatatctctagctttcctaaccgtgaaaaatctgacagttttattcaacttgggtcattttttcaggaaaagttaaacataactcttttcaaattactcatggaaatacacatgctaggtgagcacatcaaagaaaaaagattaatgaggggaaaaatggcattaaaagaacacactgcatagagcctagggatattgggagcttgagatgatttgtaagaaatgacacaagtgaaaaggttgctacacaccattggaaatactcacgtaagttataggcaagtgaaggccggtttgggtaggacctgccctttcaaagcttcctgtgtgagatgcactttgttcactggttctgacttcttcatttcccatttcttgatttacagaaatgaaggggatactcagggcagagttctgaatctcaaaacactctactctggcaaaggaatgaagttattggagtgatgacaggaacacgggagaacaatgctctgtttgggctggatatttctttggcttgttgcaggagagcgaattaaaggatttaatatttcaggtaggggttttcacttttcatgttagcactgtgagtctgtggtca

SEQ ID NO: 24175 - DNA, 2300 bp, Homo sapien
tatttagaagatttttttcaatttctgtctgctcttaggacaatttccagagactggatggttgtttttgatttttaatgatctcaccagttatagttgtttcactaggaaatctatggtgcttcttatgctgtcattctagaagagcttctcctttcttccccctttcccctcacttttgctgcccttagtttgcacttctcatggaagctttgtctcacatacactttctggggaccttatactaagaaatcattttagaaagaatgttctgacatctgtaagaaagtactgcatgagtggaagtgatgccgatggttgatgaagtgggctgctacatcttaacctggaccacaagttagtagactgttgcagagctcaagttgttctcttaccatcctcccaagattggcatttttactctgagagggactggactatcagccatcaggtgatcataaggctaaacgggttgccatatactcacaaaatttggaattttagagcaggaaagggttaccaggtatggacagcatctttattttatagatgagaaaactataaaggctcaaactataaggctcaaacaggtaattttccaaagccaatcagataactaatgtctgagtacataagtcttttgattcttcattttggtctttccacaaggcactatgtgagacttgctccctcatttctttttagaaagaaaagtacaataaaatgcaaataaaaataaaacacctattataaagcagctttctattaaaggatattcatatattctttgagaaaaaataatcgactcaatatgtgtacccttcttgtagtccacctgatagtctcatttcagtgactgaatctaatctattctggagtcaaactgaaggaaaaagaaaaaatattcatatgtgaacttttaattctattgcctcactatgaatttgcatctaggtgttagcccttctcaaccattcctttctcaatttcccagtgatgttagctgagtgtgtgtgtgtgtgtgtgtgtgtgtgtgtgtgtgtgtgtgtgtgtgttggctggggggaaatcccctgcactcactaatatgaactaagaaaaaacaaaacacaaagcatcttgcagtttgatgtaaaagagatgttggggtagtatatggatgatgtattattctcattttttactgagtatcagtaatcattgcaaaagtgttgtatcttatcctaaaagtataagaaatgtaatttaaaataaaaactaacatttaagtgccaactacatgccaaattctttacttgctttatctcatttaatgttcctagctactcaatgaggcagatattttcctctctgtttcagataaggaatttctgaaaggtaattaacttcaccaaggtcacctggcaacaagtagaagagcgagaagtaggctcataaaaattatctcaaaattctttcatcaacattctatgatgctgcttctttttaacaacaacaaatgttttttaaatggaaaatctggatgtgccatggagttttacaaatccaggtatttaggtgtatttatggaacttgttctttggcttcctgttttttaaaaattatagtgtaaagttcatagagatctgaacttcattccttctatgaatgactgctcatggagtctggtaacatgcaaaagtttcagtgtttgctaccatccttgttgttaccacctccttcttatcctccttcttcctcatgtatagagaccatataagacagtttgctggacaattctggtttgtgcctatagctttgcataattatcattattattcattccccaaagtgtcctggtttagataatttcatggtcaccttaacgttcataactgaaagtgtcaagggtgttgtattgcaggtgcccactaggtgtcagcagtgtgacctccagagaaccctcagagaaaggatttcattacaaaagtcaaatcaaagcaaataattaagtgtagttccagagctacctgaagccgtggtcattcaaaacaaatgagaggacagggggaggagagaaggaacaagcgcagatcaggtagctccttcttgggatctgatagacagggaaggtttcctttcctcattagaaggactccagtgatctgtggaatgagcactacagtatccttttaaattttcacccacaagacaaagccagtatgcagtgaaatgaggaaatgcctttaagtgaagagatttttatttctttcataaattgctcaagccatgattggatggaggtcctccaggtagctcca

SEQ ID NO: 24176 - DNA, 2300 bp, Homo sapien
aaggctgaaacctatgaagcttctagaaaagaacataggagaaatacttcagaatattgatttgggcaaagaatttttggataatacctcaaaggcataggaaatgaaagcaaaaataggcaaacaggattatatcaaactaaaaaccttctgcacagcaaaggaaaaaacagaatgaagagacaatctaaatgggagaaaatattttcaaattatccacctaaaagtgattaacctccagaatacataagaaactcaaacaacccaacaacaaaaaagcaaaaaattctaattaaaaatgggcaaataatctgaatagatacaaatgtccagtatgtatatgaaaaaatactgagcttcactaattatcagagaaatgtgaatcaaaatcacattgagatataaaaataacaaatgctggcaatgatttagacaaaaagggactcatacactattggtgggaatgtaaattagtactgccattatgaaaagaaatgataaatgtttgagatgatggatttgctactgaacctgacctgatccctttacgccacacatatcaaaacatccctatgtatcccatgaatatgtacaattattatttgtcagttaaaaataaaatttaaaatacctaaaaatagaaataccatgtaatttagcaatccactacttggaacatatccaaaggaaaggaaatcagtatgtcaaagcaatatctccattctcatgtttattgcaacactattcacaatagtcaagatacagaatcaacttaagtgttcatcaatggataaacagataaagaaaatgcggtataggtacataatagaatactatttagccataaaaaagaaatcctattatttggggcaacataaatgagcctggaagacattatgttaagtgaacctaggcacagaaagacaaatactacctgtttttactcatatgtgggagctaaaaatgtaaatcacatacaagtagagagtaaaataatggttaccagatactgggaagtgtagtggggagggggaaataaggagaggttggttaatgggtacaagattacagttagataggagaaacaagctcagttttctatagcacagcaaggtgactgtggttaaccatagttgttgtatatttcaaaatagtgaaaagaggtttttgaatgttctcaacacaaagaaatgctaaatgtttgagttgatggatatgctaattaccctaatttgattattacacattgtatacaaatatccataaatatgtacaattactacatttcaactaaaattgaaatgaaagacgaaacacaattattacatactagagattgtaaaggacataaaagtataataagatggtattatgaacagcctcatgccaataaatttgccaacttagacaaaatagaaaaaggtattgaaatacgcaaatcactaaaagtgatttcagaagaaatagtcaaatggcttaatatctgctagagaaattgagtttattgtttaaaaaccttaccacaaataaactataagtttagatggttttacacacaagtcctatcaaatatttaatgaggagataacaccaaacctatgtgaactctttgaaaagatacagggaaatacatcacatctcattttatgaagccagtataagcttagtatcaaaacatgttaagggcattaccaagcagagataatggtagaccaatattattcatgaacaaagatacatcaatcttcaacaaaaatattagcgataggatccaggaatatattaaaaactactacatgatgatcaagttgggtttatctcaggaatgaaagggtagttcaacattttaaaattaataaaaaagttaatttgtttactacattaacaaaataaaaaataaaaatgatttgattactgtattagattctgataaagcatttgatgtaatatacaatccattaatgtaaaaattcttaaattagaaatagaagagaacttactctgataacaggtgtctattaatccccctccacagttaacttaatgcttactggttaattaatgatgaattttcgggggagagggaggagccaagatggccgaataggaacagctccggtctacagctcccagcgtgagtgacgcagaagacaggtgatttctgcatttccatctgaggtaccgggttcatctcactagggagtgccagacagtgggcgcaggccagtgtgtgtgcgcaccgtgcgcgagccgaagcagggcgagcattgcctcacctgggaagcgcaaggggtcaggga

SEQ ID NO: 24177 - DNA, 2300 bp, Homo sapien
atgtcactaagtttgtagaactgcctgattcacttaccaaaactttatcctgctgtaacttttttgaacaatccctgtaatattctccactgcttattttaaagtagctgagaatatagcgtgctgtttatgggcaactagtcatggggtagagggtgagatgataccagtgttagcctgggcaggcctgggtgtgaattccatccagacacttacttaatatgtaaacttgattaagtctatttgtttatttttacacatttctacactatatttcttcacttataaaatgggtaaaaaatatctgcctctttggatttttacgattgacaaaaaaatgcaagtaaagtgccttgtattgagcttcccatgtagagacagatactcaaaaaatttaaaaatctcttatttgctgccttttcacaggggtatgttaggcacatacctttaataaacgtttccagtgaaaggagaaggggaggctgagttttggatgcccaatgattcttctcaagataatatctttagtttcaattctgtagcgcttttgaaaaactgatgctttgtgaaatatcaaatgaagtagtgctctgtaacatctcccagaattcttctctctttttagcctggacttgtccctccattactttgaagacccaaagaggactgttccttattttcttctatgcaggtggaggatttttttttcttgtaccctctgctgacatctcactgattttctatgttagaactttgaaagaaaaaaaaaaaaaaaacggctttgaaggtcgaactgcctggtgtttgtttaatagtagaagccacgtgttttgacacatcaaagattaagaaaagagaaggattttatttcataaatatcaaagggaaaactttcagttaattgaatggcaactagtcccctttgtgctcatttcggtttctggcgataaagatgctcaaacagtgagatcgcaaccagtgaaggaggcgctctgaaggacaggaaaggttggctctgcatgagaaagcccttttagatccagaagaagaatcacgcttcctttcttttcctgaccacagcctgtcctgtaattagcggagcaagtcaatctgagcgaggcaaatcactggttttccatgaaataattatatttcttatgctcttggacatgtacacctctaagcctaaaagcggagaaagatgttttggttttttttacgtgagctgggggagggagaagaaaagtggcagcgacagtgtagcaaatgggtgaaagcagcacaatgtggcaagaggagagaacaggattccgattccgtgggggcgtgggaacactgagttccgcgcagggagtttccctgttcagagcaccttgtgcgcgagttgataactctcggaaaggaaacaaaatttggctttcctaaactttctgtacgtccagagaatcccatgccttgtcttggcctccgcagcgccaggctggggtgacagcactcctcctccaccggcccgggcttctcctccggaccgcgagcctgtggcgcctccccgcgcgcccagcgcaccggggtgtccccttggaggagcctgcgggggcgggggaggagggaagggcgcgactcgtgggtcgcgctggttccttcactggatggacgtccgacgctgcctccggggcggagacagctccggccaccatgcgcccgttgcggcgattccacccacagttcgctggctctgggggtggcgggtcttggcgcgcggtgcctgcgcgaagggagggcagccatcgcccccgcggtcactggggccccgcgttccccgcgggctcgggcaggtgcgcggtgtgccggccaggtccccttgtcctcctgccctgcggcttgggcgccgcgcccgccccgcccccgcccgcgggccgccctgggcagggcctgccgctgcggctggagagcagcgcaccggcatgggcaggcggccggcggcggagggcggctgagggctgctgagggtacgcgcagcggcctctcgtcgccctgcacgtgcctcgccaggcagtgcgcctgctcgcagcgaggacctagccctctggttgcagagacccggtgccgcagcagcggcgggtggctgtcgctgccctgccctgcacggggcagggcggagcgggctgagcagcccgggcgcgatgcgttgagcgctcggagggccaaccgccggtccccttggcggcaaccggcggcacccatggaaccactgggcaactggaggagcctgcgggcgccactgcctccgatgctgttgc

SEQ ID NO: 24178 - DNA, 2300 bp, Homo sapien
aggctttgctaccctgcttgacaagtcaggggcattgggcaccatctcgagttttgttaaactgcttgcttttaactgactccccaaataaatagagcatcagataactcattttaacatagacgtgatgatcagctgactcacctgggatttccacaccatttctgtggaatatatacttttttcatttactctgaaagtctgtagagttcagcccccccaacattcttaaccatgcctttttgttgactagataaatgctttgtgaaggtctttgcttaaatgtggtcagttgtctttacaaaccccagtaccacacaaaatccaagtgatagccattgtatatgcatctggtgttgagtttattgtctttggtgggcagcatgtctttctatagtataacacactccaccattatgtggtgtgtactgttcataattctaaagaagcagatggggaagatgaataagaacgtagagttgttacaaaatgcattgagatttgtggggaggattaaaatgttttatttaataggaagtgagcctgagcttaagtagtgagagttctcttatatgaaccgtcactatgatcttcacaaatgagagctatatataaaaactcctccttgcccatgtaacctccacagtgttgagtggtctgtgaacaggagcaagccacggggggcttcacagggttctgcttcacaaagtcagttgtggattcagatccttgtgtcctaaaaaggaaccactgacttcaagtcagtgcctgaggtttaagtgcctgagttggacgcctcattttccattccactctgtccaccaccccaacctctgaaagagaagagaagcttaggctgggttgttcacgggatactcttaccacagtcttcgtccctcatgtatgtaaagtgaacctgacatcaatacaatttcaaaaagaatcatagaattcctgcgagacctacggaaatcatgttctggcccagtcctctctgacatttaaggaaacaggtctagggagagtccatctacctaattccaaaagagatttatacatttgctttccaaaaaggctggccgtcaggcacacaaccacactacttttgaggcagagctgggaatagattagtaggacgagtgtgttgaagcactcggcggcagcacagtgatgtgcagagtgagactgcccacgggagatcacagagaaacgctgtgtcacatcacacttgagtgattcatgcagatccgccagccgcatttattcagtttctactatgtgttgatcaaaatagtgggccgctggttaccagaatctgtcagcatgtttgcaagtgtggttgttctgcacgtggggggtctagggacataggagtcaaatccatctgcagagatatgaggagtatagttgtcagttactttaatttcttattaaaagttatatcacagcattcaatttgttcaacaaattcacaggcctcttactggtaggaaatccattggtattggttcagtgatggtgctatcaaatttctactcactccttgtcctctccccagctccgtttctctgttctttggtttatcctcagggtcaaccttagggctggccatagagtaggcatgcagtaaatattggctcaatgagttaatgtgtaaagagtgaaaactcgctttatggaagccaccgtgaaatgcaagcgtaactgggaggcacttgggaggtcatgacaggaggtaggcaagctgagggttaagggacttgattgccagagataaggtgactgactaggatcagagtgctaggccaggagtctaattacggtgggatggaaccggcagacctcagaagttcaaagaaaaagaagatcagatgccgtggtggtatagtggtgagcatagctgccttccaaagaaaccagagatcagaactccatcagggatagaggttaagcacaggatcataagtaagatacttatggtctggaaaaagttacagagcatgtttctcatccccttgcaggtatttttaaacacactctctccatctcaagggctctactttctgatgtggttccagagaaggaacggccgcttgtaatcggacacttcaacacagcctccggtgtgggcttcatcttgggccccgtggtcggtggctatctcactgaattagaggatgggttttatctcacagccttcatctgctttttggtcttcattctcaatgctggtaagttgacaatcatgagaagattgttttgtgtattcatactgaccaatttacctacttttctcttat

SEQ ID NO: 24179 - DNA, 2300 bp, Homo sapien
ataaagaaaacatatgataaattgtgaatattcaaatctgtattggaaggctgaccttaacaaatgatctgcgaattgctttgttttattctaatactaaaactactttgaattctaagtcaaattctctgaaccctagtctggactttccaggtaagggctcaaatgttttcatctggctgaaccagcccaagtcccttctgagacaggacagcagtagcttgggacccataactaaaaaggctggatgtcagccaactcctctccaagaaccacccatactcactggttgtgaattctaggtgcctagactgaaaagtagaagaagcatccccatgctgagaatgaactactagattaaaggaatagtggtcagaaggagtgccagtctctgaagttaaaggcatggagctggagggtggatcctgcaatggcctagaggcagagaaatcctctctaaaaagccgccctccctgaagaccttgtgtttctgggcttgcagcaatttgatgaacatgctttcatggtgatcttaactattaactcaacatagagttgctaccaactgaacgccttgcatggaggtggtggcatggagagtgcatgaaactgggagaagtggtggtcttgatctgcatctgggcagaaaacgatgactccctgccagggcccagtgccatcagatactatcttcaaggcctcaaaggcagccttctcccattgacacttatcgcagcttccttaccctcaagatactggattagctcacactcagggctgaatcaggcctagccttggaaagggaggagtgcagaggtggatctagggttcttgcagataatggcccagaaactaccaacatcagcttacttgtaagactgaattcttctgtggcagaactgtggattacaatagtgaagctccgcagcacctgccacatggcaggtgttcagaaatgccatgaatcagcttactaaactttccattctacgtgggaaattagcactcagggagcaaaccaggacacgcgcgcgcgcacacacacacacacacacacacgatgaaaccaaaccgccattgtgcaatgcacaccctttgtccaaaggtagatgggtacaattcactctgatctgcatttttaaacattcaagtcaaccgagagctctagtgaaaatgcacccaattctgtacaagtggggtcatcaacagcggcttctccagcctggtctggtaaaaaagcaaaccacaggcacacacatcatgatgaaaccaaacctacgctgtgcaatgcgcagtttgtcgaaaggcagatgggtaaaattcactctgatctgcattttttaatatttaagtcaaccaagaatcctagtgaaaatgtgcctaaatctgtccaagcggggtcaagagcggcctcccctgcctgttctggtaaaaaggcttgcgtgtccctacctcaccagcagccgcacagcagctgggcttttccaagcttgcccacacccctgttctccgccctgcaaaagctgcacctgccacagcatttaacacctggtcacacctgaggttggtaccagggcttctcaaaaggcagggaagggaagacgttccgcgaacggggtgcaagagaaagcgcgaggggcaataaagcagtgtggccagatgcagactgaagtgggtgatagggcaagaggagagcttgataggtagtgaggcactcaccaggcggactgcgggttcccactccctgggagctccccggaagctccaagaaccgcctgggtccccaggcccgaacacagtcagcacttgctcccagcccccacgctcgcactcaccaagaagcccaccaagtagagacagagcaggaagcggcgggctccgacggcaccggagtcggcagcctccgcctcggttcctgtcttctgctcctgtttccgctctgcggtctccgagaccagcctcggggccgagttcatgtcccagtgacccccaagctccatacccgcgccggccgggggtcggacgcagcagcagccgcggacctaccccgggagcccagccccgccccgagcggaagcaggaggcgcgcgcctgcgcagagagagggggcgggtgctacctggcagctccgcgggtgcgtggccggtgctggctgggagttctggtctcaggcaaggtggggactgggcacatcatcaatacggtaagcacacaccagtttgtgatgataatgatgatgctctttgtttcctctgggtacagaccctgctgcccctatcgttggaggacaggagggaatt

SEQ ID NO: 24180 - DNA, 2300 bp, Homo sapien
attaggcttgcaagtcatacataataaatccactctgacattgtcatttttccaaaacttttggagtcctttatccacattttgccaggaaaactctggcatctgaacatcattaaatataggccatctttgagtctaaatttcaaccaactgactaaactactagagctgcctccagctgcacaagctaacatattacatcggtatatgttgtaaatgcatctatactagtgaattctgcctaatttagtgttatattattccctttttttgtctgacacccttagaaatctctcccccaggtttctaaagtttacattgattatatattagcagagacttccaaatcttttattattattatttttacacagagtctccctctgttgccaggctggagtgcagtggggcgatctcagctcactgcaacctctgcctcccgggttcaagctctcctgcctcagcctcccaagtagctgggactacaggcgcgcaccaccacgcccagctaaattttttgtatttttagtagagacagggtttcaccatgttggccaggatagtctcgatctcttgaccttgtgatctgcccaccctggcttcccaaagtcctgggattacaggtgtgagccaccgcgcctggccgtgacttccaattcttttggcgtgtatgagatgtcctcctaggttataatgtgtacctgtcaccagagcatgctaaaatttcaccctagctatgtatttagtagccacagtgagtggttttaatgggttaacatgagcagccctttcaaggcgcctttcccagatgagttactcacaaaatttcaagcacaaaaagactagtttcctcagctataggagagcaaactagttctcctgcaaaggagtctcagaataacttgggggttcacgattgacagtttcacctggattcaattatatgtcttaattctaagtatcagtattccacttctccctattcagtgccacctcccatgagaaactttgcaacactgaatttaacagatctcagaattagcaacctacacaagtaaattgagattttgagcaaaatctcagtaaaatgtcagagtcttcttgatcccacagtgaaagaggaataaataacaagttctaaagaaaagaggggctagtcactattgttaacatttattacttaccatgtgtcatgggctttgctaagtaatttaaaggcatcttttggtgtcatgcactcacttaattcctttcactgcactcagaataaaccccaaatctctgttatggccttctgggtcctaaatggtctgcactcctgctgacctctcagtttgatgaggaagtttcagccacacatatcttctttccactcttctcagcttacatgtcacctcctccaaactgcttttctaaagtagctcactccccacctcattactttccacatcaagaccgtgcttctttatattatcaccatattattttacttattttatgctttttcattgcatgtttagtatttttatttatgtttatttactgcgtgcttattatttttactccatgagactgtaatctcaactcaggcatagaccatctatggtttgttcacattgcactgcaccagaaaggatcttaagaagcatgtgtagaattctcacacctctagaagttggactacattatttcctactgctttttaaataggcaaacgaaagcttggagagccacgttaacgtatcctaggtctgtcacaaccaactggtggccagggtctgtggatcttcaagctggagttggtcacctcctagcacaactccataggaggaagtgaagctcaatacaattccctcctgtcctccaacgataggggcagcagggtctgtacccagaggaaacaaagagcatcatcattatcatcacaaactggtgtgtgcttaccgtattgatgatgtgcccagtccccaccttgcctgagaccagaactcccagccagcaccggccacgcacccgcggagctgccaggtagcacccgccccctctctctgcgcaggcgcgcgcctcctgcttccgctcggggcggggctgggctcccggggtaggtccgcggctgctgctgcgtccgacccccggccggcgcgggtatggagcttgggggtcactgggacatgaactcggccccgaggctggtctcggagaccgcagagcggaaacaggagcagaagacaggaaccgaggcggaggctgccgactccggtgccgtcggagcccgccgcttcctgctctgtctctacttg

SEQ ID NO: 24181 - DNA, 2300 bp, Homo sapien
catgtaaggtttcctgtaataagattgggaccacttgtgtaatccaggatattgccatgtaaaataacatattcatagattaggattagggcatgaacattgttgtgaggccattattactcttagccagcatccaggtaagaacggctagaatatacccagaatattttactatgtctcacttcaatcaagcacttgaaaattgtaggaaaaaaccagaacggagaggaggaggtctggagttataccaatctcaaggcgtttaaaggaagagagtgtttggcttagaaaaatatagcttagacctctatataggggtagggaaggagtgtgattgatgaggcgtgggtgatggctatctttaaaatatcagaaggttctgtcacagacagaggattgaaacttgtgcttcacaatctcaaaggacagaatagaataaatatctggaaactcctaggatgcagcttttggcagaaaatcaggcagagctattatggctgttactgatgtccttaaatgccacaggctggaaatgtcatagcttgatggtgtgggaagtcttataaaaaatatttaagcattagatgagggattagctcagatgaccccttaacttaaatctaatccttaatgattgtgtaacattctatatggcttagaattctattcatgtttttttttgtttgtttgttttttgttttttttgagagttttgctcttgttgcccaggctggagtgcaatggcacgatctcggctcactgcaacctcaacctcccgggttcaagcgtttcttctgtctcagcctcctgagtagctgggattacaggggcccgccaccatgcccagctaattttttgtatttttagtagacatggggtttcaccatgttggctaggctcctggtctccacccgcctcggcctcccaaagtgctgggattacaggtgtgagccaccgcgcctggccttattcatagcttttgaatacctctgattgcatatagctacatcctaacagggcccttcatctttattgagaatctttttgttctcacagaatccattgtaaggatctatcccatgccacaaaaaagaaggcgtgaagaaagctggtagagttgagatgcccccttggaagattaagtattccagattattgttgagaatataaaaacaataaccaaaggaacggtgcaagattttaaatgcacacaaatacttagaaaaatactctcctctggcatatcagacagaaaaacaaaacaaacaaataagctgtaaagagttaagccttgaagaaagtgtagattcattgctattaggtggtctgtgtgagtattaagtatgattcatattttgaggaagtgagatattttaaaatgaaggaaaaagaagtcgatcaggttatttcatcttaattcaggaaataatacatttttgagacttttttcatcagtccactttggggatgattatttggaataacttgtataagactcatgaggctgctgcagaaagtgttgtttttatgtcactagtgtatgctgcataaaagctcttctttatactttcaacaattatgttaccatgaacattcttgaccttttaagtatacctctgaatgtttagattataaacgtgaactgtactgtgttatgttagactatttgaccaaaaacgtattttctaccacaaaaaaagtccaaaaggaattaagttaattacaacttcaattgtgttcaagatcggtctttgtggttctttatatctgtgatttatatatcttcaaagagagtcttaagtgtctttgggattgtaatgggcattctagactaagaggagcttgttcagacacaagatttggggccaatgctttcaatgacttcataaccattccatcttctttctacttctgtggattacccaacagcaataatgataatctgagccagttcctgatacttctctctatagtcaagagaaggtcagctattttttgatccccatgggagaaagacagctcctcaatcactatcttaaaatagccagcaattctcagctgctgggctggagttcctccaggggcgagcaaagggaatatgaatctgccggtggggcgtgagcgagaagccaccaaaacatgagctaggacagccttctcaagaagattctgccaactcaaaaatattattcttttttttttttttttgctgttgtttctgagaaactaggtgtcttaccattttaaaatttcatattttatttaaaaggaaaccagtgaattgaaaatgagactaaata

SEQ ID NO: 24182 - DNA, 2300 bp, Homo sapien
tgtgcaacttgggggtgtgcttggtatttgtgtaggttcaaacgtggaattttagagtcttttctttagctcttttctctgtgggattttctttacaccctctggctcctcggactctttttcccagtttctctggccagaaaggttgaattctgagttctggcctcctgcgctgtggcacagttccatgcagccatgacacatagcaagcagcaagagaaaggagaaaaaacataaccatgattcctccctcctctttgcacaatgagggttcctttttgtgattcctctatctagagggttgggtcatcatttgggattttaagtgcccacgcctccactggggcagcagtgcagacctgtatttaaagctgatctggaggcaggactaagggaataaaaagaggaaaaaataaacatggggatttactctggctttagggggctattttcctagatttctaggaaatgaattcaactaaagatttttgctattcgcaccttttacacagttccccattcgcttgccttcaggccaaatccatgaggaaaaaagaagaaaatcagataactttgcaacttgatctctgttaagacttgactttccttctcactccacttgctattatttactttcagtccttatatggttgcttgtcatacttacctagttttagttgtgatcagtacagtcgtagaatggatttcttattctctgagctgcttcttgttgttaatgattatacccctagcacttggcacagaagctgtcctgtgaaagataacctcaacctatttctaaatgaaataaatgaaaatgtaaaatgtgagactcaccaattgcctaataaactatggtaggacaaggacagcaaatatttggccacactctgcaactcgtaatttccatactcaaagctgacattagtatctcttcactgccctgttccctgctgagcctgaatacaactgcagaatattgtctaacacagcagccctggaaaccatgccaagtggccagcactggtatgggaagtgaaagcctatcatgtattcctgttttcaggacttggttattcacataaaaatccgagccttccttttccatttaactgaagtgactcctcttctcaaatttccatcctcccatcctctttcctgtaaaactccagttgattgatagatttcttctttgccaggaaggcttcttgagaaaaaaaaatattcttttccttcttatcaagttgtatattttcttaaaatataacttgactaatatgtttcactgagcgttcccccatctatactatcaagaatttattttagctttttatccttttggaaatgatgaaattggttaagattggtaattatccaactcaaaaatgatcgttagaattcctttttgtttgattaccatatatcaccaaacctactatttcttaccagctgtttccattaatttagccttgcttgtccttgactcctatagactcctatacttctcattttgaatctaagtgaaaatattaatagaaagaggtaagccttaaatacatctgatttaaattatcagatttgcttggaaagcatagctaaacgaacttcttttatggttttgcttgtcattttttattgccttagactgttttctatagagccaacaatctaaatagaagtggatatttttgttgtggttaggggcttggggtgactattatcagctctcagagataatcatggtacaaatatatcttagaagaagatgtgaggtagtgtttgtaaataatgtgaatgcatttacatgtgtttggacattcggtatgaaacacttctaggctacccaactgggtacttaaatgggagaactctttagaagcaagaaccttaggtcttcttgcttctaaaatggaaaatcgtgatggaaaaaagagctcccacagtatattaagcatgtgtgtggtacaaacattgagcaagaggagttgattgaaggtcaccagcttggacatcactgattccaaggtcatctgataagatctcctgtttgttcagacccatccctggcattctatctagcagtgccatagctgaaattagaaaaatgaagatgaaagcaactgactgtgacaatctgctgtgtacacaatctaagtgtatttttctttcttttctcttttcctcctggggtctccagtttaccgtggtttctgggcagtcctgatgctcctgggggtagttgctgtagtcatcgcaagctttttgatcatctgtgcagcccccttcgccagccattttct

SEQ ID NO: 24183 - DNA, 2300 bp, Homo sapien
cctgggtaagctctcaggcttggtctcctcagggctgaagcagcacttcttgttcagaaattcatgactttttaattttatcaatagtcctttttacctgaattttgcatttcctgaccctggcagctaacttgtattttcttctctcctgaattttctctctagtgcgataaatacacctctcctctttagtctgtgaccttttcccttctgtggaatgcctccccgccaactttgttttgttttttatttttcttttctgatcaataatcacgacagagacccaccagaatcaccaaagaattaactgcgtgtatgtcccacttcaaaatgaaagtaaagaaagccggtcgtatatttttgttcattggatttagattaaaatttatctgggagaacccactcacacagtcatgcccagtagtaattaaatcacagttccccatactttccattcctccgcaaccccctcctttcttagagatgccttaagccttggatagaaaaataacacttccccaaaatccagtccagcctgaagctggaaagccttgctcttcaatgacaaagctcgcagtaagtgggcttcttggtcactttcagagcctttctttatggttctcactgtggtcttgcagaaagagcttggagggggagggtagttaagacagaagaacaaagctggggggtacgctttgggcccgaaaccgagagaaaagtgatcctttcattaagacgagtgttcttttgtacctgcactgtatccttttgatgtgttgaggtagaaaggatatgaggaaagaagaaacaatgagagttgctactgtatgaattccttctccttatacttaatcctgtccttattggggccttgggtggaaagctgataattttggtgagccctaaaaggaaggcagtggcttgaattcctgccaccatccccttgataatgaacaagcctaatgaatgtgggtaagtggtaagaatctgtgaccagctgcatcggggcaggtaatacagctcagatttaattgggagcaggtattggaaggctgtattactttaattggtgaggggttttctaaatggaaaggacaaagtataatggacaaattgtgtagtacaatagcacttaagctgggattgtatgcattcgttaatctgctgaggaatgaggcaattctaaacaattttctcagtgaaaccaactccagaaagcttgtcccttttgttctcccttgggaaaatgcaagattgaaacagaaaatacctttaccgaggcaatcatttgccacgtgtggaaagcggatacagctgtaaactatgaaaaagggatctttgtagtacaataaaggatggaaaaagagataaagcttgggataagagtgggcctgtcagtgcatctataggaggaataaagtgatggcatttacagtgacagatgagactctaaagagaaggcaggacagtttagagagggaaatttgatatttaaaagaaagggctgtgataattaaaagtagcattacattaagctcttatgcatatcattaatgacagaaggaaactggtggcttttaaaaagttaatgattcctataaaaccattctggataccttacattttttaaaaagtctgtatgaacataaacctggcctctcagtttgtatttctgattcccaaatttgcttaaaaatataaaacgcaatgaagttagaattaaactccagtaactgtgtgtcattgtccacggaagagtgctcaagcactgctcagttaagaaaaggatggactgagaccagccgcgtacacattgctgcaaagggctctcttattaagatgtgggcctgaaatgagcccaagggacattcattgtcaaacgcgcattagtgccttgtttcttttgataatttatatttgacaaaatccaatagcatatctatggaatggcattaaaactgcttccagatttgtggttcaatgatgagtgagctctgacgaggttgcttaacaggattctcaacaggttgaaacgtaagagtagaagagcaattgtattgaaattcttaatggggcttttacacttgtatatttcattacaggtgggaaaactggaaagattgaatgtcctttggagttcacagaggtttggcagtgggaggagaaaaacaaaacgaagcatagtgggagtgttgaacagactttcccaagatccccaggtgggtttcatgtattgcctaatgggaagagtgggaccgattcagcttttcacactggctgaattatcttacctgggctat

SEQ ID NO: 24184 - DNA, 2300 bp, Homo sapien
ggaatagataggacaacctgtttgtctgctggcttaaaattagaatttggtagaaatcaaactacagtaaggaagatagtgttctcatttgtacacattaggaagtttttttgttaggttgtgtgttttaggttgtgtgttttttgttgtgtattcttttccaatgttttcagggtggatggtggagttccaggattaaagaatgctcgaaggttgctgcactatcaaatctgtttttacaaaaatagtgatgtattagactgtatctacccattaccagttcagcaaagaattcaggctcttcatgtacaaatcattccaacaactgcctgaaatattgacgaaatcgctcagatatttttgatactcatatttatatttcaagacaggaagtgtcttcctcctccaaactttacagcaaactttttggggcaactgtcacctctgtaggcaagtgttcaagtgtacatcatttgaattttgtcttgctcttttgcaactattttcttgaataagattgtccataaagaatgcatgctgaacagtggacaccgatgactgggcagagccaccacaggtaggcaacagggaatggccggctggtccgcttcactcccaccatccgcctccagagctagaatttcttgtggctcacaaattgatgagtactgaggaacactaccgactgcaaacgttcttgtcagtcccctcctgaagaacaaaggagatttgggttactttttaattctaccctctcagctcatcaacacttggtttgcattaaaatgtaagaacattacactcaacactctgctaatcatcagaaagtactgctttgaagtttccctgtttctcagctactacccatgacagatgtttgccagagaacaactcagggggcattttcttgcaagcattttggctgagaacgataaccattgtgccacttaatatttcagcaatctctagagaaatcggggaatagcagttacttatttatctcacgtattgctccttgctacctccccaccaccaccggcacgacctctgaaggcacacattaatttcacctcagtatttccatagcatcaatgaataaaaactgactacattttcaacaaacgcacatgtcctgataaatgagggtcctgacttaattgctctgtaaattaagagctcaccgtagtgacaatagagaagagttttaatatttaaaaactcattaaatttgtgtactttgtgaataattaaagtcgcaggaccactttaaggggctaatgtaagtttcattcttaaatgtatatcacggatgaggataattcatctaccaaaaaaaagccaattttttaaattgctaaatttggttacttttttttgtcctaattggttacttttggtcctaatttgtctgtggctttttcctcatccttttttttttttttccaaatgacaatgactgaattaaaatgttgtggtctgcgggtttaaaagtcagttatctgtttatacaaaaaaaaacgatctgtttatacaaaaaagaaccaggcaaaacacacctggttggcttcaccttttttcttatacatgaactaaactttttcatttgcatttgattgttttcatttgaagtgtgctctaatttgaactattcccccccccaaaaaaaagttctgttgtttttgtttatgacttacagctgtgtaaagatctaaatgtgtaagtatgtgtgacgatgacaagatttgaaaagatttgtgcaaaccacaaatcctggtgattacaaaagggaggctctcttgaaagagttcacgtcaaaacccctgaataaccactaaacatagagagcagagattctttctcctttatatcaaaactttgtctttaaaagtgatgactgctctaagaatgatctatgattttccagcctggtgttcacagttgggaaagggtctagttctgggtcaacgaggcttctgtgtcatctttgtatttttcacatctcttactcctcctgtccacatgtcaatgttagtattgtcatcgatatttagtcaataattaagctgacactcttggtctgctcagttttcggagatcactggacattttgaagtgtgagctctctgtggaaggcaagcatacggaactccgtctggtatttcttcctggaaacgtacgtaccatttttgaaagaatcactttcttgtgaactcgatacttctgaaaataaaaatgaaaaaaaaaaaagctggggctgggccttgggggttcactttaattaaattggaacattgatctgt

SEQ ID NO: 24185 - DNA, 2300 bp, Homo sapien
agccatttgccagaaacattgactccatcacctctacagctgactagaacctctcgtaggtgttttcttccccaagactgactttgttattggaaggaacagagatggcagacgttatttatttatcataattgatttcttatcattgttttggggatattccccaaggagagaaagcttctctggttccttttaacagtgtggttctgattgccctgatgtctgcccacgacatctgactcaacatctattagtacctagcagctgtatacacgccaagatgccacagagcttgctacctgaaaagcccattcaggtggttttgcccatctccaatttcacttacgaaaaaaaaaaagtccagttccacaaaaatattgacttcctatctccctgagggtttctggtattagtttgctctaagtagctcatgatttagagtacaaaggcatttccagagtgcatgtttaacaaaatgacatagcagataattgaaatttatttgcaattttcaaactacaataaacacaattctccttttctttcattaataatcgcacggctaatgcatagcaatccctctgcagcttttacaagcaaacttgagctgctgtgttgtaatagctggaaaagttaatgtagcttgaacaaggtttctaattgtccctgtctctgtcatatttgtctacttgaatggtcctaaataccacagcgattaattactgcagagcaggtattacaagatgttatcatccttccccaactgtctgggtgaatggagagaagcgggagattgttacagtgtttcatctttgctcttcctgtaaggcactttaaccagaagatttaacgtgtcaaagttaactgcgttctctagcagatattcacattctaattaaagattaagaacgtagtacattacactgtgatttgtcatacatggcttgttaaataggaaacctaccgggattccctaacattttataaacattattcagggcttttaatgtgggcaaagcgaaagattattcaactgcattgctgtatggaaagcaggttgccctctgctccccactccccccacccccgccaacccccagtaaataataaaataagacaacttgggcagtttggaaactgttttgttgtggagattttgttcaagccatggatcacctctggttcgtgtttggtggtggagggaagatcttaattactaaccctacgcatttctctttttttctttctttctttttttttttttttctggttttgcttttggctgtcagctaagtagaggaaggtaagagtctttgtttgaattagagtgccaaaagacggaataaagatgaaacagtgtttcagtatgcagcctgagctttcagctgattctcgtagccctgatcctaccatatccagtactagtggcacaggaccgcttcacattctatgattgcctgaggaataaattaatgaggttactgagacactgaacatttgcatattcacggatgcttattaggtagaaagtgaaagccaggtgcactgaatttgggggatagagaatttgttaagaagtcacatctttccgtcctccagaaaaggggtgtcctgtcactaaaaataataggcaggcaaaactcctgcttagtgaatatctgaacaattatgatataatggaaagataaggcaaaagagggtcttgcttgaaagcaacagagaaaccaaggcactgcccttgttataaggagacctggacgtggtggttctggagcataaaggaggcacatgttatttgctgtctttggattttatgctttaattatgctggtggtgtacacagctgaacatgatgcctttgtacctaatgcaaaattaccaatttaagaagacctttacatttgtaaatattattattgacaggccacccatccaaactggaacggggaaaagcttttctaagaaaatggtgtcgaaacctgaatcacagaattaggcttgactgtctctctaagggacatcagtacatggttctgctgttggtgatttctgctggggctgtgtgtggaagcacattgtttgagctatttgtatctcattattgtgagaagtttttatgctgctctgggtcatggcttggagactgcctcctcagagcttaaatgggcagatttcatattcttcccatccttgggaatacttcataaaacagaattacaagagtccatgtttttttcggagcaccgtgcagtgggagagcctgtcttgccttttttttttttttttttttttgctgtcgt

SEQ ID NO: 24186 - DNA, 2300 bp, Homo sapien
cccagtaaataataaaataagacaacttgggcagtttggaaactgttttgttgtggagattttgttcaagccatggatcacctctggttcgtgtttggtggtggagggaagatcttaattactaaccctacgcatttctctttttttctttctttctttttttttttttttctggttttgcttttggctgtcagctaagtagaggaaggtaagagtctttgtttgaattagagtgccaaaagacggaataaagatgaaacagtgtttcagtatgcagcctgagctttcagctgattctcgtagccctgatcctaccatatccagtactagtggcacaggaccgcttcacattctatgattgcctgaggaataaattaatgaggttactgagacactgaacatttgcatattcacggatgcttattaggtagaaagtgaaagccaggtgcactgaatttgggggatagagaatttgttaagaagtcacatctttccgtcctccagaaaaggggtgtcctgtcactaaaaataataggcaggcaaaactcctgcttagtgaatatctgaacaattatgatataatggaaagataaggcaaaagagggtcttgcttgaaagcaacagagaaaccaaggcactgcccttgttataaggagacctggacgtggtggttctggagcataaaggaggcacatgttatttgctgtctttggattttatgctttaattatgctggtggtgtacacagctgaacatgatgcctttgtacctaatgcaaaattaccaatttaagaagacctttacatttgtaaatattattattgacaggccacccatccaaactggaacggggaaaagcttttctaagaaaatggtgtcgaaacctgaatcacagaattaggcttgactgtctctctaagggacatcagtacatggttctgctgttggtgatttctgctggggctgtgtgtggaagcacattgtttgagctatttgtatctcattattgtgagaagtttttatgctgctctgggtcatggcttggagactgcctcctcagagcttaaatgggcagatttcatattcttcccatccttgggaatacttcataaaacagaattacaagagtccatgtttttttcggagcaccgtgcagtgggagagcctgtcttgccttttttttttttttttttttttgctgtcgttttatacaggtatttttttttctttctatttcttttttcttttactttttatttcctctttaaagaaaatgattggcagcactcaacctcaaggaactgatctatcaaaaccaagctgggataagtatttctttgagaaataatatatatttaccaacaggctctattctgcccccttgtttcacagcaccttgaatatcacttccttttcctgcccaaagcaggaggtaaccctgtattaaaagcatagtaggtgtgtgtgtgtacaatacacacatacagcacacatgtctctatttagagattccatgatatgtgttctatatacactttacagtcccttttcttaatgtcaaaaatataatttccagcgtctaaagagtgttttcaaagacttttgccctattttttaaaatagtgtctaaatatgattaagtgtcttcccagagaaaagtcaaagaggctcctagtgttaatttccatattgcttaagacttaagcttttaatttattttatcaaggttgagggagtatagtaattgttggaacaacgcccttccaaaagaaatcgcctgcacttgtttttaagttcaatttgttttctcacacagatttttgatacactcttaaataaactagaaatcacaattattttaatgtggcagagttgtaaccaggaaattgcatatattttcataaactaggctgttatagatttattaatatttattaataacattattttaagaaatttttttaacgtctttcaaccctgaaagggcctgcttgaaacatacacggcagcaaaatcactggagtccagggtttttgtcacacacacacacagcacagatttttttgattatgtagatttcttttcctactgcagtttcatatgcaaagcatgcatcagccacatccatgctatctcctaaagcagtcattctgaaacccaatctggggacagtgcagactaaataaaatttcattttgatttggcctcccgctgcgaatgggactgctttgtctcagccgacagaaccagcaagccagaaaggtatgtcctgttttgcatggctgatggtgtgtcttgcg

SEQ ID NO: 24187 - DNA, 2300 bp, Homo sapien
ttctatagagaataggatattcttaggatccctgtgaaaagattagcaagtgctgatctgcgtgtggtaggattacaggtgattttgttttacttttatgtgcacgaaggcattgcctaaatttttagaaagaacatgggttgtttttattataatataaacaagagtatgaatcctcaaaaaatgaagtatctccttaacatgcttcatagttttacaaggaaacagaatacacaggacacgttgctgctgtttttgtggcctctgctctcttctgcattccttgcttctctgtttctctcctctccccccgcttttttttttcttttccaaaacgtcaccggtggcagccttggcctgaacttggtgagatgtggttcgcatttgcacaaaggtggaatgcttcctattggatatttcaagtatttaggcatcggtgtccttattaccacatctctgctaatctggactcctgtccatcattgaccagctcctcctcatggtcaatgtgtcccaaagtcgtggtggcaagaatgctggagaggatttctagggaagcagtttatcctaaaaggggaatgtcagagtcagtcatttatttgtttcaagacacatggtaccagtttctcctaaggaggtcgagtggctggttcaccaaactaaaatgaaggaacccagccagactccctacacgcctccttccaacagctaagtgtgtcctgagccgtcctttgaagcatgaaagcaacacctctgtccacgatggggctgagaagagtccaccccataaaatgttgttgatgggctagtccttctcagttccactcaatgggcctttcattcatatgaaacttagcaaatcctcttaaatagcaatgcaatattgaatgtttttttcataagtctacttatacatattgaggaaaattggtacactagtctaatagtattaaagatgatctagaaaaagacatactgacacttggaacacactagccttctgcatttataacagcatcaggggactgtggtcttctgtcttgatgatgaggttaaacgggctaaatcaattaaattcaacaaacatctagtgggtacctaataatttaaggtaccatagtgggggtttggagaatacaactggaatgaaacatgatccctgccgtcaaggtgcctagaaaggaactgtgatataaatgctcttctccttgactatagctcagtacaaaaacatgtttatttccattcattagattattttattttagctgatatttattctcatccccttcttaaaaatttcagtaacttggccaggccaagtaatcccagcactttggctcacgcctgtaatctcagcactttgggagtccgaggtgggtggatcacgaggtcaggaaatcgagaccattctggctaacacggtgaaaccctgtctctactaaaaatacaaaaaattagtcaggcatagtggtggacacctgtagtcccagatattcgggaggctgaggcaggagaatggcatgaacctgggaggcagagcttgcagtgagccgagatcatgccactgcactctagcctgcactcagagcgaaactctgtctcacaaagaaaaaaaaaaaaaaattcagtacttacaaactacattatctatacattttaagcaagcttctatttgttcattgatgccatttattaatgtcttcatacaacaaatatttatttaatgctactatgtgtcaggaactgttctagaagcttagagacgtagtgacgaacacgatatgtgttcaatacacacacacacatttatttatttatttatttattttttattattattttactttaagttatagagtacatgtgcacaacgtgcaggcttgttacatatgtatacatgttggtgtgctgcacccgttaacttgccatttgcgttaggtatatctcctaatgctatccctccccgcttccctgacccccgggcaggccccggtgtgtgatgttccccaccctgtgtccatgtgttctcattgttcagttcccacctatgagtgagaacatgcgcatacacgcacattttttattacagagttgacccttgagcatcacaggtttgaagtttatgggtccacttatagatggattttcttccatctctgccacccgtgagatagcaagacccactcctcttcttcctcctcccaagcagcctactcaacgtgaagactacaaagatgaagacctttatgatgatcctcttccacttaatgaatggtaaatgttattttcttgtcctt

SEQ ID NO: 24188 - DNA, 2300 bp, Homo sapien
gtttttgctaccagaacacacttccttcaaccctactcgtggcaagaacaaagcatcaatacctaatgaaaatacacttgctattgttttggcatgggaactcctttcttgtaactcttctgcatggtcagcttgtttacgatgcccccaaagagctggcgaagatctcaggattggctttggagggtcttggcagtgctactatattcttattatgaataaaaattttaaacccaagctgataaacatattttttttcacactgaattcatcaggaatacattaacattttctaaaaggtaaagacagcaaaaatgaaagaattgaaaggagaacattaggatgtatttggccactaggactctgtttccatcagctcctgcatatgagccagaacttcaccccatataactaatgcgcagggaattagcctatggaataatgatcattcctgatgaaaagaataagatcttgttcccgtgtatgtgcagagccattcatcctaagaaagaaatctggagtgaaagcgcacagcatattttgcataggttctgtaaaaggatccaggcaaaacaggctttgcaacattagttatgatcatatatggaaaaagcagttactttctggggtgacatatggctgaattggtacaatgcccaggaatctcaatgtcccccttagaagggtgagccctggcttcatccttcacccacatcatcagtgggacaaactgcacagctcgtggacagatcaccggtaaagaaaatcacatccacctgtgctgagaccaaggctgctgttgggctctggcagttggcaagcgctaaggtccccttctgtgatcataactttttctaaagcaggaaaattatgaatggagcccaagcccgtctgcttaagattcaagcatggtgacattccatagtaaacaacaacagcgacaatgctgacaaaaacaacacgtttattgtgagggtgattccacccttaaatgtggaaaatttaaccttgctctgatactattctgtaaccagtatacctatgtccaacattcctaacatagccaaaccaatcaattgagccttattgtggaagagacaggaaatgtgatcacttgaatgtgtgatattcattcatccactcattcattttgctgaccattaattaattcaattaaccctcctgagtacagctctgtgctaagcattagggactcaagatgattcttatcttcaaggcatccagcctggggagaaaaacagacgtacaactaagctgcagacggacacatcctttagtgatggggacacctggaagggattgagaaactccttgcagttggccttgggaagctggggaggacttgaaacttctaagtggccctgggagcaaccggaggtggggtgggccagtgcctgtaggcctgggcctgcctggctgaggatcccagctggactactgccttgctgtctacaaatgatggagcccttccagtctcagcttcctcacaagtaaaatgcagacggcaatgcctctttccagtgacgttgtgaggattcgatgggaagtttcatgaaagcacttagcagggtttttgttgagtgctcagaaggtgatagtttggtgttgctaggggaacagaagcctgggctgagaacaggccgtggagagtcacaaatggtcttcagccgtcggaaggcactgttagatttactcttcacaaagaacattttgggacatcttggtgtacggattagaaggaaggacagaagctggtgagctgtgggccacagggtcagcagggaggatactgaagcagtccacagacgcagctgtgagggtgtcctggagctggggagagggagaggagtggattagagacgtgtttggaaagtgttaataagataggcagggctgaggggagagaacaagagagggagaagggggtagattttgatgaggaggtgacggcagtgacagtgactgagaggagcaataaagccaggagcaggctgtgggaagagggagtggcttccctcagaagaggcgccgcctccctagcagtgagcaaatgtgtttaggaacatgttcttcctcccaatccagagacggattgctgagatgattcctgctttccggctccccgacacccgctgttctttagatccgctcagcggcgctttttcctgtgccacgtgcccagatctgagcgaggcttgggaagacgcgaacgggctgtaaaatctgtccccagaactggagagtaagaatgagcggtgtggggctgagctgagtccagg

SEQ ID NO: 24189 - DNA, 2300 bp, Homo sapien
ggtaggtaccatggtttttcagatgagtagaaaaagcagggagtggatttgtggtagaagtaggagcagcatccatggcctcatgagcaacattcttcccattcactgttttttttttttttttttttttttttttgcctccaggcaggatgtgtgagtaagtgatgagtttgtgtgtgtgtgtgtgtgtgtgtgtgtgtgtgtgtatctagccacagcctgaattggtacatggagagctaccctgcttgagatgaattgcactggatttcttcgggtctttgtttttgtttttgctttgaggcagagtctcgctcttttgcccaggctggagtgcagtggcacgatcttggttcacagcaacctccacctcccaggttcaagccattctcctgcctcagcttctccagtagctgggattacaggcatgtgccaccatacccagctaagttttgtatttttagtagagatggggtttcaccatgttggccaggctggtctcgaactcctgccttcaagtgatccacctacctcagcctcccaaaatgctgggattacaggcatgagccaccacacctggcccgggtctgtctttcacttgctctccttcccatctctatcactccccactgtcaagctgatggccatgtccctccatgccagcagtacatgcgcctccgtcattctcaagggtaatagcagcttacaaccattccataggtagtatagacagttgtttaattatattattcatgcctctcttaaaagtaacaactgtatatcttttaataaaaaagcattcataattcaatataattggaaacatttctggatatttcttgaaaactcttaaggattattcagggtgcgtggtgtggggcaaaaccaaggctggctgtcagagggttaaaaacgcctgaagattgcagctcatctgagggaacttgcccagccctgagcattaaagcaggaagccacctagaatggtaaggaccaccccaaactcaggaggctttagaatttattttttcattaatgagtgcttcagaaagtgcactgtccctaattcccttctttgaaagatggaaactttaatgtgcagttaattaaatgttgtgttgatttgcaagccctcagctctcagaggccttggggaggtggaggcaggtttagaaatcaaacaacaggggggaccggttgtccctgatctgaccacagtgcaggtggcactgtttgctgcagatgcccgggaggcgtctgaggcacccctgtggccagacccgccgttctgagccttggtgattcgtgaaccgctctgtttactgttgagaggagaagagcccaggcaacaggtccaggccccggcagggaggaggctggcccgagcctacacctctctcctggctgcctggctttcagaagcattctttaaaaaattttttttcctagtgcttcagcatgtctttgtgctgagaggagctgtgtcatgctggaattcttttcacaacaaactaaagaacccagctgtggcgctggctgcagcctgagaatctgcagggtttctgtatgcagttatttactaaggggagcagtgaagctgctgaggtgggtttacttgtgcaaatcctcagcaggctttgcaatgctggcagggctggggtgggggactgtggacatccatcccctgggtggggtggggtggggtggggtggggtggggcggggctggatggaaatgcaaaggcacttagagattgcagagtgcaaaagggccacagagcttatcttccctctctcccattttatagatgaggaaacgcagtcaagaaattgagtgtgtgattttgcaagaaaaagtgtggattgctccaaataactagagactgttaacagtggcaagtttatcatccatttggccctggctaaaggcacaacttatgcagttaccaaatgacaacttgcagggtttttgctaccagaacacacttccttcaaccctactcgtggcaagaacaaagcatcaatacctaatgaaaatacacttgctattgttttggcatgggaactcctttcttgtaactcttctgcatggtcagcttgtttacgatgcccccaaagagctggcgaagatctcaggattggctttggagggtcttggcagtgctactatattcttattatgaataaaaattttaaacccaagctgataaacatattttttttcacactgaattcatcaggaatacattaacattttctaaaaggtaaagacagcaaaaatgaaagaattgaaaggagaac

SEQ ID NO: 24190 - DNA, 2300 bp, Homo sapien
tgtgtccccagtggtttcaaagtttcctcttcccttcaccagccggcccccttctctgatcggcgggggtgggaagcgggggctcgcatcgccaagagctctggtcgtggccacgctccttggaaatccgccaccgcaactttccgcagccgttgcgcgccggcggcagccccctttgtttaagttctcggatgccatcatctgggaaacctgcagcccaggaccagcgcggtgcccgcgcgtgcgagacggaccgctcgctgccgccgctccctggctcctccaccccctctctccctccttcgctctccctcccttcctccctcctccctcctctgggattcgtgcaagtagcgtgcgtgcccttgtgagtttggagggtgccggtcagcggagccgtgcgatgtatttgaaaagcaatcagtccgaccttcccccatagattcatcgtaagtgtattcgaccccaatggctttaggaattccctgtggcagcaggagccgggcgaaagaaccgggatcggctagccgcgcccttctctgctccaccgcttcctcgtgtgtgtgtgtgtgtgtgtgtgtgtgtgtgtgtgtgattagcggtgggggggtttgctcgctctctattcttaggcatggtggtgcttttttttctttcctttctgtctcagatggatttgcgtggtggatggggctggcggcgacaaatgctttctcagctctaacccagctgaaagagttaagggggatgggagggggagtgcacccggtaggcgagagaagcgggggtggggtggggtggggtggggggacgcggccaagcggaaacgctgcacagaggaacctcagcgaaccaagaaaaaagagaaagtggcaacgaaaacaagggcaaattgagccctcctcggggatttccaatgaactaacccaactcggacattcaataaatacatggctcttaatgagcgtgcgtgtgcgtgcaccccgcacccctagctgcgggtgcgcccgcttgcgcccgccgcccccagccagagcctgcatctggcagtcccgagcccgagcggcagcccaggacgcagccgaggagcggccgccggtgcgctccgattaaaatgtgaacgggcctgcccttctctcccgctgtatcgtgcctctgccgagcgcagttaagtgaactcagtgaaagcaggagttctcctgcccagccgcagccaggcagcccccgcgtgatctcaagattaacactagacgcgtagaatttatgtaggctcttgtccagctcctgcttgccgggtgagataccatcgtaggtaggttttagcaaagccattattgccaaggtatagataccaaaggcggtggtaaccaaaccccaaacagaacggatttttttcctctgcggcccccaaaggttgctttttatatttacgtatgcgtatatgtatatataaaagatggaacacagatttcattgaatcaatctgagatctccaggtgcagacgtttgaatagtcggtgccagcaccccgtgttttcctttcctgccgattttgcttggatccggctcaaaaaccgagagagtctcgtggttttgtttacactgaatggggaggataggaacagagccatggggccgcctttcattaatatacagtgaggattttgtctaaattactgctatgaatttcacagtacacgctttcaaaagcagtctcaggtggcctgatgaaacgtgatagcgcctctgcaaacagatccactttctttcttttcaagagggtgtgtgtgcgcgtatgggaagccccccaaaacgttgtgctcctcgataacagaaacacacttctgttccgaggtctgtccccttcttcctccccccctttcgtcgtacttaattctcgaatcgctccccggcctctctcccccctccacgctgccccaccccatccgccccctccctttgcgagtgtgattgttttgtctggaaaaaaaaaatccaaagtatataacaaggggagaacagttagtgctgattttcatttgcatacattttcatatattttggtgaaaataatagactagtggagagctgggcttcgaggcgtcagtgtgaagggaaggctaaggacgcatcggtgctggagagttgagaatatgccttcccctccacccccaacccagtcaccttatttgaaaaaaaattaaaaaacaccttttatttaaaaacctaaccctggaagtttgctcggtaagtgttttttcattttctttccctgctttcctcttctttttcccctcctt

SEQ ID NO: 24191 - DNA, 2300 bp, Homo sapien
ggaaaggaaaacacggggtgctggcaccgactattcaaacgtctgcacctggagatctcagattgattcaatgaaatctgtgttccatcttttatatatacatatacgcatacgtaaatataaaaagcaacctttgggggccgcagaggaaaaaaatccgttctgtttggggtttggttaccaccgcctttggtatctataccttggcaataatggctttgctaaaacctacctacgatggtatctcacccggcaagcaggagctggacaagagcctacataaattctacgcgtctagtgttaatcttgagatcacgcgggggctgcctggctgcggctgggcaggagaactcctgctttcactgagttcacttaactgcgctcggcagaggcacgatacagcgggagagaagggcaggcccgttcacattttaatcggagcgcaccggcggccgctcctcggctgcgtcctgggctgccgctcgggctcgggactgccagatgcaggctctggctgggggcggcgggcgcaagcgggcgcacccgcagctaggggtgcggggtgcacgcacacgcacgctcattaagagccatgtatttattgaatgtccgagttgggttagttcattggaaatccccgaggagggctcaatttgcccttgttttcgttgccactttctcttttttcttggttcgctgaggttcctctgtgcagcgtttccgcttggccgcgtccccccaccccaccccaccccacccccgcttctctcgcctaccgggtgcactccccctcccatcccccttaactctttcagctgggttagagctgagaaagcatttgtcgccgccagccccatccaccacgcaaatccatctgagacagaaaggaaagaaaaaaaagcaccaccatgcctaagaatagagagcgagcaaacccccccaccgctaatcacacacacacacacacacacacacacacacacacacgaggaagcggtggagcagagaagggcgcggctagccgatcccggttctttcgcccggctcctgctgccacagggaattcctaaagccattggggtcgaatacacttacgatgaatctatgggggaaggtcggactgattgcttttcaaatacatcgcacggctccgctgaccggcaccctccaaactcacaagggcacgcacgctacttgcacgaatcccagaggagggaggagggaggaagggagggagagcgaaggagggagagagggggtggaggagccagggagcggcggcagcgagcggtccgtctcgcacgcgcgggcaccgcgctggtcctgggctgcaggtttcccagatgatggcatccgagaacttaaacaaagggggctgccgccggcgcgcaacggctgcggaaagttgcggtggcggatttccaaggagcgtggccacgaccagagctcttggcgatgcgagcccccgcttcccacccccgccgatcagagaagggggccggctggtgaagggaagaggaaactttgaaaccactggggacacatctgtctataggtattagcttgaatggtacatccgtgccgcgcgctttacaaatctctggcggggcgggggtaagggggtgagcaacccgacgcgtactaggtggggtgggcaggttgctatttttcatgtttcccccttcgttttccttctgattctcttcccccctctcgtccctccctcccttttatctcccctttcttccccccgcccagacctattgcgaacgcccagagccgccgagggaacgccaacgtctgggccggacactaagagttaagatgtggcggagggggcggcgggggaggggcggggaggggaaagtggtgagggggagggaggctggaggacgacagatttccagcttctacgacgctctgcctaaattaaaaagcaaccaatcggaacggccggaaggggggcctcgcgtcctgagccagtcattccgagcctgccaatcacccagcgggtagccaatcagcgggggccctggtgctcgacttccttgtatttgggaaagtgtggtggtgggtgcgcgctcgcggcggagggtaaacattcgacagtccccgctctgagagggagggacagagagcgaactgtcagatcggagcgagagcgggcgcccgagagagggagagagagagagggagggagaggaaaagtgagagagggaaagagagcgcgaacgagggcgcagagcgagctcctgctgcaactctgctccagcacggccagcgccagcgcccgccgtcgg

SEQ ID NO: 24192 - DNA, 2300 bp, Homo sapien
cggcggtggggtggcgggagcggagcggcatggccacggcggcttctaacccctacctgccggggaacagcctgctcgcggccggctctattgtgcactcggacgcggcaggggctggcggcggcgggggtggcggcggcggcggcggcgggggcggcgcagggggcgggggcggcggcatgcagccgggcagcgccgccgtgacctcgggcgcctaccggggggacccgtcctctgtcaagatggtccagagcgacttcatgcagggggccatggccgccagcaacggcggccatatgctgagccacgcgcaccagtgggtcacagccctgccccacgccgccgccgccgccgccgctgccgccgccgccgccgtggaggcgagctcgccgtggtcgggcagcgccgtgggcatggctggcagcccccagcagccaccgcagccgccgccgccaccgccgcagggccccgacgtgaagggcggcgccgggcgcgacgacctgcacgcgggcacagcgctgcaccaccgcgggccgccgcacctcggacccccgccgccgcccccacaccagggccaccctgggggctggggggcggccgccgctgccgcagccgcagccgccgccgccgccgccgccgcgcacctcccgtccatggccgggggccagcagccgccgccgcagagtctgctctactcgcagcccggaggcttcacggtgaacggcatgctgagcgcgccaccggggcccggcggcggcggcggcggcgcgggcggtggagcccagagcttggtgcacccggggctggtgcgcggggacacgccagagctggccgagcaccaccaccaccaccaccaccacgcgcatcctcacccgccgcacccgcaccacgcgcagggacccccgcaccacggcggcggcggcggcggcgcggggcctggactcaacagccacgacccgcactcggacgaggacacgccgacgtcggacgacctggagcagttcgccaagcagttcaagcagcggcgcatcaagctgggcttcacgcaggccgacgtggggttggcgctgggcacactctacggcaacgtgttctcgcagaccaccatctgccgcttcgaggccctgcagctgagcttcaagaacatgtgcaagctcaagccgctgctgaacaagtggctggaggaggcggactcaagcaccggcagccccacaagcatcgacaagatcgcggcgcagggccgcaagcgcaagaagcggacctctatcgaggtgagcgtcaagggcgcgctggagagccacttcctcaagtgccccaagccctccgcgcaggagatcaccaacctggccgacagcctgcagctcgagaaggaggtggtgcgggtctggttctgcaatcggcgccaaaaggagaagcgcatgacgccgcccgggatccaacagcagacgcccgacgacgtctactcgcaggtgggcaccgtgagcgccgacacgccgccgcctcaccacgggctgcagacgagcgttcagtgaagccagggcgcagagcgaagagggccgccgccgccgccgcctccgcagccgccgtcagcaccgccgccgcccctgccgccgccgccgccgccgccgccgccgctgccgccgccgcgccgaccctgcacctgggccgctccgggctccagcccaggcccatccgccgccctcccctccacccagagacaggcatgcccgcccttggaggagaaaacgcgggagaaacggaccaaggaggcatttttgcagtccaaggaaggaggggccaaaaaataaaaagcataataaacacccagactgttttgtatacatatataacaaacaaaaccggaagagaaaaagggggcgatcatgagatctcgttcatactgtggtggtgtttcgtttttgtttttgtttttaaagaagggtgaagatgcctgacgcacgaaaactgcactcgtgaggtttttccaccctgagatgacctacacggcagcggtggacagcacctgcctcgtcttctcctctttgaaaaaaagagagagagagagtcccctttcctttcactttctccctccaaaacagctgcctaaagagatccacggaaactttatttcctgggagcgacctgagagaaaacagaggcaccaggttccatcaggggacgacaccgtgctctgggaccctgtttttcttggccatattaaagtcatttggaaacaaatcaactctgaaatgggaaggaggggggaaaaacagtctccaagaaaaaaataattatattga

SEQ ID NO: 24193 - DNA, 2300 bp, Homo sapien
ccaggggcactcccattctgctagcttctcagactccacccagttctcctaatccaacaggagtgcatgttcccgattacctcccatgaccactggctctcacggtggctgggaaccctggcggggaggcctgcgcctcctcaagctccagtccctctggatgggtgagtccctccggtgcctttgtcctgtgtccaacttcctttgtcctctccagaggtctctcctgggcttcaccactggtcatggtcctccaaacagcagctcccaatccccaggacagttcttcaggacactaccccttcctcccaggagacccgcaggtttcagctctcctggggccactgctggaccaagtcctcaattgcttccttgccattatcctctttgaactccctctctctcctctaaaagcccctctggctgcagactccttaattgcgtggctgttcctttccagaagcaggtgcgcctgcctcgggcctcttcggactttccatcacaggccaaaggaaaaccagcgagagcttgcatgacaccgggtccgtattaagacaggcgcaaaacgatccttcctcttctgtgcgccttagggaacgcccgaaggcatgcaaggctggggctcaggggagggtccccgagcgggcagtcagggctgccctcaggccctgggcaaggaggtttccggaggcccctcagttctcgagtgtgtgtgtatgtttttggtggtggtaattgggaagcagggggtcaagacccaggagtgcagagagtgggagagaggatctcctccgcccatcctgggctcctgtcgggcctaacctccacccagcgtcaactttttgctgctcccgttagatggcgcccaagactttctaaccacttgtgaaagtgctcctggcccggaacaaaaagaaccgtggggtgtgagtatgagtgtgtgtgagtgcgagtgcgcgcgcggggctggccacagggcacaggagttgcctggcactacgcgtggccccgtcgcgggtcgggtcgggccggcccagggctggggcgcgctcacgggaggagctgcgcgcggccggcggagaactttcttcttttcccttcgctctccctcttgagcgagcgcctaggccctggccactctcccggagagaagccgggcgacccggccgcgggctcaagcagccagcgccggctgcaagtgaccgcggtgcgcgggcggaaaggggtcccggacgtgcgggtcggagagctgggacgcacacgacagcccctttctctgcccttacttaccggcccagcgctcacagccgctgccctgtttttaagagaatggcgcaggtgcaagtttggttgttgcggttttagccgctccaaggaaattgttcagtgtaaggttacctaagcgtactgcgtgggcgtgtttccagaaacaaagggcaaactttctcgctcccaaagccagtgaagttaaacagactcccttatgaaaaggcccttggggaccctagggcgtcagatgcgacagctaattttaaaataactgtttaacaggtgattagggagcgcgctttctctccaccaccaagttcacctcttctccaaacccctctaaaataagtgacttgacgataggtgatcccattccctagtcctctccttaatgccagtctggaggcgcactgtcaagaagggatgcgtctcctcgcccttgagaaccagcgcggagaccttcttttgtgcctctccttggctgtgaactttcccgcgcggtaggttctcctttaagaaagtagcatccctatgaatatttaatgctgcacgcgggccggcggggcggaggggagcccgcggcctgggtttccgcgcgcgccgagacccgggcgcagagcgagtgcgtccccaccagcctggccgccgcgggaactcggggaccgggagggcgggggttagcgggaggaaagggtaagctgaagaggggctgggaacgggagggaggctcggggcgaacgggccgtcgcgttcatttccataagaaagctgaaatcgcagttggaagcaggatttctcgcccctgcagcccttcccccatacccggttttctgcaagaagcgggctccagagctcagagcccgaagtgtgtgctctggtctttgatgatgttgataaaatgtggtttcaaatgttgtcccgaagaggccggtttcctgtctgtatgtggaatggaaggaccgtgccgggtgagtccagaacgccggggagcggacaggaggagcagggctgaggagagggagggcgcagcc

SEQ ID NO: 24194 - DNA, 2300 bp, Homo sapien
taaagacatctattttaatgagctataaagtcttggttctctgctgcaagcggtggctcacgtctgtaatcctagcactttgggagaccaaggcgggcagatcacctgaggtcaggagttcaagaccagcctggccaacacggcgaaaccctgtctctactaaaaacacaaaaattagctgggcatggtggtgggcacctataatcccagctactcgggaggctgaggcaggagaatcgcttgaacccgggaggcagaaggtgcagtgagccgagatcacatcactgcactgcagcctggacgacaagagcgaacttccatctcaaaataaataaaataaataaataaataaagtcttgattcccaaatgctagtttatccatccgttgacaaaaagagtcgaactctgtaaaatattttgaagagatttattctgagacaaatatgagtgatcatggcccatgacacagtcctcagcaggtcctgagaatttgtgcccaaggtggtcagggcgcaacttgattttatacattttagggaggcatgagacatcaatcaaacacatttaagaaatacattggtttggtccagaaagacctgggactgatagaaagggaatgttcagtttaagataaagattgtggagaccaaagttctctgtaagtcttacagtggctgcccttagagacaatggatgacaaatgtttcctattcagatcttagttaatctctttaggattgggagggtctggaagaaaaagatctagctatgttaatacagattctttacagatgcatatcccacccctccaaggacagctttgcagggccatttcaagatatggcaaagaaacatgttttggggtaaaatattttgattttcttccttgtcttgtaatgttatgccagagtcaggttggaaagtaagtcaccatatatagggttaagtaaaacccatctaataagaatttatgatttgtagggcatgactccccaaatcctgtagataggaatcttgggcaagataaaaaaatcagagtttagtcctccgacctctgccaatttctcaagatatcttttgctagtctaaaagctaataacaaaaagaacaacaggatgagcattttatacaagtaaatgtattccatttaaaagatttttctttattgtgaaattctgccattctacctttttaatgctaaaaagttctgtttcgtgaaatgatggtgatagtagacggcatttatttgcttgacaactttgtatgatctcagattttctgtgtgttttacttttactgacccttcaaatctaagtgtgtgtaaacccttttaaagtgcgttactacatcatttagtatgtgtttcgtagaaagcaacctgggagttaactgccaggagcacgcaagtttcagaaagcaagacatactcatctctattcaacaattaatcagttctgattgggtttcaagtaaggcttagtaccaacgcttagggaggggcgtgcaaaaacgagaaaggtagtgtttgaccttaccggtttaaggtttatcctgtgcattatacagttaagaaacaacgcaggagagtgccagggaaccgagaggggcttgacagttgctgcaggagagtcttgacttggaaccagacgaacgtggaaagttagaggaggggaaaacccctactaggataaggcagacaggaatcaaggcttggagcgcatctggggccccggccgccctgcccaggtggaggaagagccggctcgaggtgcagcaagggggctgggaaggaagggctggctaaagcgccacgtggatgtgagtgccaaagagactaggagagcgtggaagtgagtcccgaagagactgagttcaggacgtgaagagaaagaggccgagaaaaacgacccaccagcgatccttcttgaggtcgacaccgagcaggggtggagtcggatacgccccgcggacaccatgcacccaatcagcgacgagctgtcgcggatcgcgggacacgccccctgatccaaaggcccgagaagctcttgcacaggacagcctctggaaccccgcgccattagcgcctgcgccgtctctaggccccgccccctcacccctccggtcctggagctcccacagctaacatggcggcgccctgtgtgtcctacggcggagcagtttcgtaccggcttcttctctggggtaggggtagcctcgcccggaagcaaggcctctggaaaaccgcggcccctgagttgcaaacaaatgtcagatcccaggtaaggcctgggaagactgg

SEQ ID NO: 24195 - DNA, 2300 bp, Homo sapien
tagtaatatattttagaaggatgtgatctcctaagtaaaaataaactcaagtttcagagaattttaaattgcccttttcttactcattaaaaagtaagaagaaactctatttttactatcttaatttggaagagtttaaaaacatatatttttttcattaattgggtattgttacatttctcctgtattttttcttatattttcttgtgtaactttagtgacaaattactgtagaggcatctgaatttaggactcttggaagggaaggggatggaggtaggagggatggtgccagtgaatgatgtctgtctgagagagatttatgtttatgaaaaaggaagtgagtggattcctaagattgtggttttaaggcctgaatattgctttaagagtgtttagaattgttggggccaggatgaaggttgagaactacaggtttgagatcttaagaaaagccaggaccagaaagatctgttctagttatttccagctacgggatgcagctgaatgtcatttgaaaacatttttctcgttttttagcatctttgactgaaggcgaaatcttcatgccttggagggaaattcctagtgccacagcataaaaggaccagcagcagcaagtgtgatataattactgatgcctttaaaagatatgcgagccctttgggtatatacccagtaatgggatggctgggtcaaatagtatttctagttctagatcactgaggaatcgccacactgacttccacaatggttgaactagtttacggtcccaccaacagtgtaaaagtgttcctatttctccacatcctctccataaagacacatgcacacgtatgtttattgcggcactattcacaatagcaaagacttggaaccaacccaaatgtccaacaatgatagactggattaagaaaatgtggcacatatacaccatggaatactatgcagccataaaaaaatgatgagttcatgtcctttgcagggacatggatgaaattggaaatcatcattctcagtaaactattgcaaggacaaaaaaccaaacaccacatgttctcactcataggtaggaattgaacaatgagaacacatggacacaggaaggggaacatcacactctggggactgttgtgggatggggggaggggagagggatagcgttaggagatatacctaatgctaaatgacgagttaatgggtgcagcacaccagcatggcacatgtatacatatgtaactaacctgcacattgtgcacatgtaccctaaaacttaaagtataataataattttaaaaaaaagaaaaataaaagatatgcgagcccttatttctgcagttagcatgttgagccaaattaataaatcttctcaatgttcagtcaagcaattttttctttttatcactttaatataaggaccatggaataaagtcttaagctaagccaaaagatggttaaagataggacgtatttttacccacaaataaggtgaataccgacagtgtaaggtgctcttcctcaggccatgccgtttgctgtcgtgttttctgcttgctggtttctggtgcgtgtgtatttgcctccttaagggagtagccttttgctctttatcccatgtgtcaaatatcaaaactcactgacattgaccaatcattatcaaaagtggatgtttaaaatagatcaggaggtagcataccacttacaggtatttttggttttaatgtattgaaatgctagtagcttaaactgcattgtaagcaaggctttgagtaggggacacattctaacaactttcttagcaggtcctttaaacttgctttttggactcctgtcacttgaataccgtaataaaaaaagataactacttgcatatactattttatttaaggacaatggcctagaagatcacagtttaatttattttcttttctttccatctatattttctgttagatattaaggctaagacatactgcatttgtaataccaaagaaaaacgttcctacctcaaaacgtgaaacttacacagaggattttattaaaaagcagattgaagagttcaacataggaaagagacatttagccaacatgatgggagaagatccagaaactttcactcaagaagatattgacgtaagtacagttactctgttgaaaaagtaattgctgtagagttttagatattaaaagcacttttcttcatgagccccttagctctgtgttttaatcaagctgtcagaataaggaaaaatgctgctatacattgtttaagttggagccatggtttcaaagacaaatgt

SEQ ID NO: 24196 - DNA, 2300 bp, Homo sapien
ccattagggcttcctacatgcatgtcatggttcctgccatgaacaaatttgcagtttaatccaagagacagaaacccctaaacttgaaacagtgagggagatggagttaatttattaatgcccttcttttaccagacattgcacattatatttaccaactctggaggtaaatatgtaattacctccatttcacagatcagaaaattgagatgaagaagggtcataattttggtctgaatgagagataattcccacttataaattaacacaccaggtttctgatttttatagctcagaaaaagtttggatactggtgcccaccactgagagatgaacccattctgggtgtgtttgggaaggaagaccaaggattggttgggtctaaactgaagtatagcatcaccaagacactgccactcccaggtcctctaagcctgctctgaggcctcctggcttcttacattgcccacattcctctcagtgtgagttatctgtaacaatgaccacaaggaatttagaaaagagaaatttcttacaagaagaggtgcatccaacagccagatgtccagggtggataaatggcgcaggctggatttcccccagcccaggcgatgtgacttcagacctgagctactgaacacactcttgccacatcagtgagacaaaattaaaattatatttatctttttgaaagtgaaagcaagtttatcaagaatgtaaggaataaaagctcatttcatttactttttttttaagagacagggtctcactctgttacccaggctggagtacagtgacaccttcttagctcacgacagcctcgaacttctgtgcttgagcaatcctcctgcctcggcctcctgagtagcagggactatagatggaagcctggctcatttttttgtgtgtgtagagatgggatctctctatgttgcccaggcaggtcttgaactcctggcctcaagcaatcctcctgtctctgcctctcaaagtgctgggattataggcatgagccactgcacccagctaacattgtattttaaaaggccttacctttggggaaagttcccttctcccagtctgtgcttccagaagtaatagtatagcagccccacagttatccaagatgttaccattagggaaaactgggtgaaggacacacagaatttcaccatagtatttattattataactccatgtgaatttacacttatccatgtgaatttacacttatcaaataaagttaaacaaacagacttacaatttcttttaaaaaattaaaacttaaaaatgtatacttaaaatttgctaagagggcagatcttaggtgaagtattcttaccaccaaaacaaaatgataatactagaaaaatggcaggagagagctttggcagggggagtgggatatgtttttggccttggtggtgatgggtttctggtatattgagatgtaaatttgtacagcttttgacatgtcagtcattcctcgatgaagtggggttttttaaagctaaacaaatattatagcagcagcatcaactatcacttattcatctactcaacaagcatccaagtgtcctcaacaaggacacttactgcatgccagccactgttgtcagtactgggagatagcagagaatgaaacaagcaaaacctttctcttgtggagcaggattctaacgttagttggctagaccaaggcttcattccgacaggttgctgaaaactcaagttattacataaacactaactacaaagtgtacttcctcagtttcctcagaagatagctgattaggtttttctgggctgcttgacaagactcagacagtatttgtgaatatcaagctttgtcccacgtggtaaataaacttgtttagaaacacctgtaaagcttaaacgcgtgctttcttcaacgcgtttggaaactctaacccccttctcttttgtacttttgcttgctgtccactacagagggtccaagcacgaagctgtgcacagagtcgctctccacagagatgcttaggatgtgatccatgaatcgcaaatcccagctagtgctcacaaagacggacatttctccccaagaccattccagtgccccagaggtccacagacatccaggaagatgcagccagcagacaaagaatggcagccacccaagtgctgaggggagccctcccggccatttctgtcccagctccaagggtctctccacgatggcctgcaacagcacgtcccttgaggcttacacatacctgctgctgaacaccagcaacgcctcagactcggggtccacccag

SEQ ID NO: 24197 - DNA, 2300 bp, Homo sapien
agtttgggttctttgaggacagggaacttcatttctttatctcagtgtctgtagggctaagcctgccatgtcgaaggcatctaatccgtgtttgtggaatgactgatgcaactaaggagtgcaggatgaatcgctaagttgctgcttgatcctgccaatagaccaacctgcctcggttgacacgagtgaattgtgtagaaaaactttataactttcagaactcaagtcctgttgatcagacagggaccgatggcattaagactcagtttcaccagttacctctaaggaaacggaagggtgtctcccaggaccaaccaggaatatgccacttgttagctgtgtaactttgactacatcccttatttgtttgtgctttacttttcttatttgcaaatgagagaaccctggagttacactattatatggtctcattcagcattaacattcatgactttctaacaggccttgcttgaaatgatcagagccagagaatgttggagagaggatcttaagtagaaatgcctcagccagacaagcaacaattacttttgtgaaataagaaaagcaattgtgtaactttcttccttgtccagttactaaggatggttttatttacacctttagcatttcatttcaagaagttgatattaaagaaatcctcatcataataataacccatggagtaatgcatgtcaactctgcaaaactagaacgtagccactttaaatatacttaacacatgacagcattctcagtcttggtttcttcttgcagatgaagttgaaaggaagctcaatccaactctcagacaaaaagctttgtcagatatgccaaaatcccttttgtgagcctgtgtttgttagatacccaaatggtggtcttgtgcacacccactgtgccgccagcagacacacaaaccccagctcatccagtcctggcactcggacttgaaaagcttggcccaagggtgcgaggggaactccgagttctttctgagcctgctggacatgaagagcagatgaccaccatgctctgtgtcagccaggacgaagggagacatctgggtgccagggagccttccgtccatacgcaacaaggactcctcgctgctgaccaggctctatgaatgtacatggaatgaccaggctctatgaatgtacatggaaaacccctaaaaatccccaaaacagaaacatacaagagttcacctgtccaggtacatagtaatccaagacagaggtctactttgaaaaaaaaaaaaagggagtcttcctcatgcagtccagacccaggtgggggatcccccaccacccccacactccaacctttagactcatgtttgcactggaaacgtggcttcaccatggctggcgacaaagtcctctcttgcctgggtgagtggcgagggcacagagcctcatgggggtcagccttgccctcctgcagaaacacgttctccatccacgccgctcactcatgggcccatttcccagggttacctcgtgggctctgcctttgccctcagaaacggctgaccctggagaagtacctttgttccttctttcttcctctccggctctcagctcccaaaagattctgccttgtgtacccaagcactcactcttgggtgaactaatgcttctggctgcctagcaagtgaagatctgttgagaaactgagaacgctccaagagagaagctgctctcccctccttgaagaagccgcggacacgggaaacccacggcgggcaagggcccagctgtgtgctcctttcctgtcatggcatctgctgatttgaaactccatgacgaacacgttgaactaaacatttttatttaaatttgtatcatgttcgtagttgctctcttgttgagagagtcatctgtcctgtttgttaggggtattttttcttgttaaaatgtatctcctgttgaatactcgggaaattcaaagggaagtgtggtcagcacacactgagcgttcttttctggagaggccggttttagcctcgtacctttagcaggaccgacagcgggtggaagggcccgtgtgctggatgggggtgtcgcctcctggatggcacaccctcccgaggacatccagacaggctgtgtcaccctccagcactttatgtgcctgctctgaggtgtcctgaacacacagcaacggcctctccttcatcacaggccggggattccttttgtgtttctgtataacatcgatgacgagctgaagctgttgtcacttcactgccctctttggaatttcttcattgtgctgactgattctattaggggcta

SEQ ID NO: 24198 - DNA, 2300 bp, Homo sapien
tcgagaccagcctggccaacgtggcgaaaccccgtctctactaacaatacaaaaattagccaggcatggtggtgcatgtctgtaatcccagctactcaggagcctgaggcaggagaatcgcttgaacccgggaggcagaggttgcagtgagccgagatggtgccactgcactccagcctgggcaacagagcgagactgtctcggaaaaaaaaaaaaaaaaaaaagattttactccattatcctatgttggttgtagtgttaggattgatgggaaataatagtcaataatctttatgatgcactgtgtctcagctacatgggcatctggctaaatgaaccaaccttcttaagttttgttctgcttgtaactggcacaattataagcaaattgaaagattacttgtaacgcctatcacacagtacctatatacagattctatcttcagcatagtaaccaccagactttaaaccagaggtttatagtcttaaaccctgtcctatgacagtgcttcttgaagaaggtaaataattcagctactcttcaccacacatggttccctctccttctcccagcttagataagggggtggatgaaacataaagggtacacgattgaaaataatggttttaaaaggtgtgccatttacacatttgttacatgtgcctgttgacagcagttgcactcctgcagcactacagaaacaatagactttatcacctatttggcaagaatagaattagtttgtgggtgttgatcacagtcccctctgttcccaagtggggcttcgaggcttctcctagtgcttgtcctggactcctcttttgccagttactgcttgcttttttattctagtgaaagctttgctttgctttttgcgtggatgcctttgttactgactcctcatcctttgccctttatttatttattttgaggtggggtctcactatgttgcccaggctggttttgaacttctgggctcaagcaatcttcctgtgtcagcctcccaagtagctgggattatagacacgcaccactgccccaggtccttgccctttttattttaaaaacattcatcagggcctctgtgctgcatagttctctggttgggcgatgttcagccttaagcaggtaaatgcagtgaccctctttgacctccagggtgaggctgggcgatgttattggtgtccatgtgaccatgagagctgtgctgtctagagcatgttacttgagcagaaattcagcagaatcctcaggattacgccctatttgaaagtcactttgtcctcacgtgaggacacatgctttgtcaatcttcatgtggcttatatggaaatgtatttttaacctcatttttattttattttacttacttatttttagacaggttctcactctgtcgcccaggctggagtacagtggcgtgatcacggctcactgcagccttgaccttcagggctcaagtgatctttccaccttagcctcccgagtagctgggactacagatgtgcaccaccacacctggctaatttttatattttttgtaagggtgaggttttgccatgttgcccaggctagtcttgaactcctgagctcaagcaccatctgcccgcctctgtctcccaacatgttgggattacaggtgtgagccaccacgtccggcctattttattttttattttgctaagtttgtggtaatattattacaacttcatttttaattggaagtaaatatcagatatacattctgggtaaggtagttctcttcacagaaataaattcctgtagggctcttcacacatacagcatattatattgtttttccttccttgaaatataagactgtacaggaaaattgctggtgggcaggggtcggtctgcatccagacatagctacaggaaaatgacaccatgcttatttggaagcctacctaactctttcttcttacttctaggcatgtttgccacagtcgcagggatatcccagcgcgcccccgtgcactggtcggagaatgtgattggggcggctgtgtcctttccatacgtcatagcgctcgatgacgaattcatcacagtccacagcatgttggatcagcaacagaagcagacgctgccctttaaggagggccatatcctacaggactttgaaggtactcattcacatagaagtcttagtgaaatttacttaactcttttatgatatttcttcggtaaatatcatttaggaactgggccttgcgctaagcataaaagatacacagatgactccaatacagtctctgtgcttcaggggctgcacagt

SEQ ID NO: 24199 - DNA, 2300 bp, Homo sapien
tgaaagccatatggttgatatttcttcttaaatgtaaccaatagaaacaacataaggaatttggcctgtgcatatatttgcacatttatggtacaggcatttacatggaggtgcctgtcatttgtgacacagacttctcatcaagtttcagaaggaacagatgtttctagatggaataatatggagcttgccattgtaagaatcctgtaataaatcctttcataaaataaatatatctgaattatctcttgttatacattttcactcctggatcatctaaagtagaacacaaagattgttcataaactattcattcaaaacaactttatataaaaagaattactgttgctgaattctggattcttattgttgctctttcttactagcatggggtttgggacaagtcacctttttaaatttttttatttatattttcctaagtgaattaacacaggaagtcattcacctttctttgcctcaaagaattaaatttattctttgacgctattaagtaaattaatagcgtctacttcattgctcagtcactagcagtttctgaagtcactgtctggcagtcagtagatatcacctctgtaactagtcttgtgcagctctctgtgatgtgatctggtagaggactaagatacaaaagcacaagggtgaattctaggaccacctgagccagtgattagttgatgacaagtcacatagtctctgtgagcctgggtaaaatgaagagactggatttgctcttgtaccttcccaatccctggctccactagctgttggccaccttagacttgaaggtccattcactgctgcttgcccttgaagctcaattgctggtcagagctttacactcctgggaagccagtcccctacctggaggctgagccggtgacactggttccactgggtcacagctgaagcaccactggggatggggcatttatgtggccatgagtcacactagggtaggggtagagggcaagtcacaggaagattgttgggttttttttttttttttttttttttggccagtttcttttctttctttttttatccctttgaaacagaagaccatggcgtacaatctggtatctgccttcagggttgggataatatctttgttttacaatactcagagtggctggaagaaagctgaggccacaggtcactagcaggttctaaagtctgaaaatccctgggaaaatttgactttttatatgctaataattgagtactgacaactctggagggagctttccaattcttccgtcatgaaagtggactttgtatactaaagaggggttcatggattcatggtaacctacaattcttccttgcggcctgaaccaaaggaatagcagctacagttgggttttcctaaaaggagtaagatagtcccaggcctcccttctcaaataagtgtatcaagcaggtggactctgccagtcgggggtcccggtcaatccctagggccctggggcgccatgggcctcgtgggagggctgcgcatcccaaccatgccttcgtctcctggtggggcaccggcggtacgtccgatcctccagcccgcgtggtcaggcggccgcgggcccaagcatttcccagggcccaagcatttcattcatttattcattcacgcagcaggtatttcccgggcgccctcctcctgtgtaggtgacagaaactgggtggcgagcgagccaggcaaagcccggcttccctgaagctccccgcagcggcgggggcggagaagagacctcagccccgcgggctcgcacagctggcgcggaccacgctctcgcccggggccggcggcctcagcgccccccgaatgaacaccttccgcccgctggccgccccgcgaggcgggccgtgtcgtggccccggtgcacggagggggacgccgaggcccggagcagggcccgtctcggcctgtgctcggagccaggcggcagggcccgcgggccggcgggcggcgcggagacggctgcgctcccgccctccgccagcgcctggcggccgccccacgtgacgggaagcggcggctgcggggtcgggccagcccaggagccgcgggccggagcggggcggcggggccccaggccgcggggcggcgcgggacggcgggcgccggcgccggtgagtgaggagggcggcggggcgcggggtgcggggctcagggcgcggggcgcgtggggcaggagggcggggagcaggagtggggggtaggcggcggggcggggtggagggcgagcccgtgcgtgtgcgctggggcaggtgtagtgggggct

SEQ ID NO: 24200 - DNA, 2300 bp, Homo sapien
acagctaaagagagaatgtatgtcctaggtgagtaaagaagccaaggttataatacaactgagctactccaaagcctgcccttttctctaaactgccttctatgacccataactttgtaaaaatcagctaccagttcttaaacacttactgtgtcaagtgtgtttataatctccataatctccactcctttgatcattcttcacagaaagtgctaacacagcattttcctgatgaggggactgaggctgagaaactaactcacccaaggttttggtgcaacaagagtaaaacttgaaatgaagtcaggtttctagccccggattctcccaaggtagctgcttttgatactaaaacaatgtgcctcccggtgaaggaaatggggataatactaatcacacttatttctctattgtaatgaaaatcaaatcagatttgagagatatggaatatgatgatgttaatactatgacgctaatacatttaactccaatttaagacattcagacgcctgcctcagctcagatttaagactattcaattttgggcaagtcatttaatctctttctgatcagctttcttggcactaacatgaaagaactggactaacttttaagttccctcccagctctgaaattcagtttctagacataaagtattacatacataaatgagtaagaaaaattgggaaacacttctcagctttatctttttgaggagctcacttctagtactctttcacggtttatcttttggcatcttcagagttcttcatatttttgtagacaatgcaataatttccaataaaatgatacctcatagaggatgcatacaataaacattcagaacatacctgcaagttttattttttatttattttttcagacatggtcccattctgccgctcaggctgaagtgcagtgtggtaatcctaactgcaggctggaattgctgggcgccagtgatcctaccacctcagcctcccgagtagctagtactacagagacactaccatgcccggttaattttttttttattttttgtagatacggggtcttactatgtggcccaggctggcctggaactcctggactcaagcaatcctcccacctgagcctcccaaaacgccgtgattacaggcataagccaccatacccaagtttaagttttaaatgtgcaaaatatttagggatatgtatctctcccatgaatgatgaaagagaagcagaaaatatttcttagtaagtgaattactgggaattaagactatgattgatacctacagcaatttaaaaagttacttcattgtacctattaatacatgcagaaaaaaatgtacttggattttatgcttgctacttcctcgctcttgagtaaattatcctttctatgcatcagtttcctcatctgaaaaataggcattctagtaatatatacctcattaggctgttctgaggaatgtgataatacacgtaaaatgcagtccctggcacactgtaaatgtctaacaaacgtttggcggctattactggcgtttcccagcccgttattattttttacatgtgagcaagttaattcagaggattacttcaagaaacaaatacttgaatacctatctgtccaagcagccggggttacagggaattcactacataaagcctctggtcttacattatatagaaaggcgatgaagagacaagaaacaggttaaacagaaaaacacgataatttcacacataaccactgccatatttaaagcactgtacaccggccctcggagccagaattctttccctcgaggttgccccaggaatccctttgacctctgccattggacgtcacagaaggcgcgactaatcgtggctggctcccggagcttcactcttccctctcttcctgcgaaacttgacacgccatttgtttctacgtctgacatcctcctcttttctctggtccgtgggagcttttgcaagcgggaccaggccccaacacccgaaccagcagcgagagaaggagcccggcatgcggcgactcagagtgacgacacacgcgagtctccgcccgagtacgtcacttccgcaacgcttccttcgcggggctttgtgggtagccgactggggtctcctggcgacgaccatggcgggggatgtgggcggtcgcagctgcacggactcggaactgctgctgcacccggagctgctgtcccaggagttccttctcctcactctggagcaggttgggcgcgccggatcggagggtgggcgggtgggccttcccaggtgaggcgcttgcacccgagctt

SEQ ID NO: 24201 - DNA, 2300 bp, Homo sapien
aactttcaagttcgtgacatatgttaattgcacttaaatagacagtgagagaaagatttataaaggcatcattcaaaaggatttttacatttgggtgtgccttactcgattacaaaaatttcaaaccatcttcccacctagggcctagggcgagttttctctttccctgggactgaactatcacaaagcactaaagggtttaagcaaacgtgagtatcactgaaaagcactagaagaaagtctcaatgtggctggaagaaaccagaaggcaagattgcctgggtgagaaagaaaacataaaaatctgtgtgtgagatcacaagcagcaacttctctgtgttgaattcagatgtctttcccacagtcggggcacaggatgtcgtccctctctgtgaggaagccacgccccaccagtgagagggagcacttcttacagttaaagcagtcgttatgccactgccgttcctcaaaggagatgtattttgtgccaccaagtcctgttaacagagagaaaataataccggatgaagaaagttagaatcaggcaactgggactgaagaaggaattctggtttgatccatttcaaagtttggattgtgtaatatggataatgtgaatttctagtgactgggtgttgggaatccatatgtaaatcagattctatgcacagcctggaggatctcgtgaatatcagaagagatatataaactggttccaaaacgatgggataagtgcgatcaaagaatgctgactgtgtatttgttatgtgttttcccacaaaatgaaactccatgagaagagggagcagatttctcttatgtcttcactaggtgcctcacgttgcctggtgctcaaatttttatgacttaatgattgaagcagtgaagggagtgtagaagaggaaaaggttaatcctccctgggatggccaggaaaggcctcacagataaagtgcgatgtgggtgggaatgaggggagagggatattgtcgcagtgggaagatcctgagaaagctgcagacagatagaatggaatcaaatatttaaggtacattggtccgtgattataatacagttggtttttacctagtgttttttctcagtgccacaataaccacaattcacattcatatctaatgttttacatttaaaagtgcttttatatagattgtatcactttataaagcttaatgttataaacatttacctcaacagaagttactgctgaaaacagcattaaagatgaatatgttctggcaaaagattacattttccccctaaaagattccaagggaaatctggtatataaatgaccagaaacagatattttaacataggtaaagtgtaaatactgtgcttttcttcatattttaatttcacatggaaatgtaatgagctctgcattacacatgagagtactgttttagcgacctgggaaggtgagttagctgagttaggtgaacttggttctaggcctaagggaaaggaaagtcaaggacaagtacacagggggtgtatagatgtgtttctgtagttacactgaaaagccacacaggaaagccaggccaccgggtactccaagtgtctgccaccttcctctgataggaacgaaccagtcaactgaatgcaacgggattgcaaatcccacatcataaaacttctcctgtgttattacagaacacacacttttctctccccacccagtcactcatttgtgtagcgatatgtggtgaccatttaaaggactttagtgtgaactcctctgttctccacactgaatttctccagcctgcttaatagtctagtccagaagcctggtctgccagccagccagattttgggctctcacttagctgaattctttgggggaatacaatatgaaaaactccttagaatgtaccctctgccctcatatagctatggccttgtggtagaagtttcccattaagatgttttggagtacaaccgtcccactaagatgctaggggacacttctaagaacacagcacagctgctaagcctgaaaaggccagtttttattgtgcttttgtgatgtcacaggctcacagactgcagttttagcgataatccaacccaaagcagaaactaaactggagcactggccatatggttgtgatcaggtgggctgcagaggaaggaatcattacttgctgaagcatagccagtgcaccaaggagaggaaagcagataggcagaaaagtctgctgtgttcagagccttagggaggtctggggagttgagggatatagacagggtcacaggctaaaatgctaggccttg

SEQ ID NO: 24202 - DNA, 2300 bp, Homo sapien
tccaataagatccaaaaaaaaaaaaaaaaaagaatccaataagatccatacatggcagttggctaagtctttttttaatctcttggttctgtctccatctctcttgtttttctttgtgcatcgttgttgtagaaactgggtatgtttgtttccagagtccggattttactgaccctatcgaatgaccacagggtcatttaaaatgttctgctacccattaggtcaaaaattaaacacaaaattaaattgcagaatttcttaataataaaacacaacatagctgaacctatgtgacacagctaaagcagttattagaagaaaaataacagaactaaataactctatcagtaaaaaagcaaagctaaatggattacacccgtaagtcagaaagctaaaaaaaaaaaaaaaattaaaatataagacaaaaggaatcagaaagaagataaatgcagaattaatgtttcatcattttagggcttgtttttacaaactgaagcttaagactcaccatttgagaactaggagaccatttcctaatttgtaacgatatcaacaacacatctaggtagctgtcaggggctgggagccttttctacacaaactttgctctgaatttcaaaatactagcctgtcttgacacttagtggaaattcaggtagggtggccttaactcaggttcttcaggaaagcgtcctgtttcagggacacagtggggtggggtcgggggagggctgtattccgcacatctagttctggctgggcttatggcaagtctcagtcctctggagtcacctgagtgactgagggatgagaggcatttctgatcccgtaatatacttacatggctttgccatctaccacatcccagttcaaatctcagctggcacagttaccgttcacgtggcctggagcaaatctgagctgaactttcctcaccgtaaatctggtaaaaatctttaccttaaaggagtgtggatcaaatgagataccaggtagagctagtgctcaccgagtggaagctaaggtgatgaagcccctttattctcaagttctgtgattccatgatggagacccatgaggcctaccagacggagagtatcaattaaaagaaagcaatcacggagttcttcccgccttctctggaggatgtattcctatgagctgccccgaatgttaaaaataatacacctgcccccaaagtgccgaggacgcctttgtggtccacctactcatcgtccaccggtttctgcaagtggaccggttacctgctcaggagcaaatgtttccatcacgacgcaccctctcccagggatgggctcaacctgtgctctccctgcgacaatgctgaacagtgccatctgtccctacccagcgtcagcgtcacgcagagggcccgggcttggaatgtgggaggcacgctcccagctcactttggttttcccgccctggaggggaatccaagatgtctaactagtcttctggccccgagagggagaggtggggataggaccttcctttagtcccctccgtagtggaacgaaggattctttatggtcatctgtggtgttcatttcgtaaagaagcatctgcagggtaagaaggaaaaacgtccaccttgcaaatatatcccaggcacatgcctcctgagaagtgaccccctcctccctccgcctcccccggcacgtcctggggcttctccagtctcccgctcctgggaccaggcagagatcccggcgtgggcagacccctgccaccgcgcccaggcctcgtccgaaactcgcgcccgagagcccacgccggaggcgacgctcccgataactactgtgctcccaagacccggagggcacgaagaaaggagccctggcaaacaaagggtacgggccgggaccgccgcagcccggggcgggggcacggcaaccgcgaggcctgggggcgcccgccccccgcgccccacgcccggtgccagcgagccgaggcgtgcatctccttatatggtcaaatgacacggcggggtttctcgagggcgggagctgcgcagcgctccactcggccggcagcggagccgcagccaccagccgcccgcgccctccagccccgtccgggagtccccggcccgctgcggtgccgtgagtacctccaaccccctgcgccccggagggaggccgaggggcttagccaccagggctcggaagtgggggccgaatccggtgcgagacccaaggagaggggagcagagccggagttggggagactggtgagaggagagcagagctgtgggtccgggaagaccactgggagag

SEQ ID NO: 24203 - DNA, 2300 bp, Homo sapien
ctcagttgatttatcttggagatcatgccaaatcagtaaatatagttacctcgttcattttaacagccgcatatgtaaataattctaaaatgcaccatactgtatttaactaagcccttgttgacgaacacataacatggcccagtatttttctattacaaacaattctacaatgactactcttgtgtgtctatcgttttacacaggagcaagtatatctacaagataatttcctataaagggaaatgctgggtaaagagaaaatggtatgttcatctgtaatttaaaaatgttttcattatggaatttttcaagcattacaaaaggagacagactagtaagatgaactgctgcatatccatcatcaagcttcagcgattatccacaatccatggctgatagtatttcgtatatatataggccctatccatttccccaccccaaattattttgaaacaactccaggcataatgttatttcactaggaaatattttggcactgttcttgaaaagcaaggacttaagaaaagaaaaatatatgtgtgtgtgtaatcacattatcacccctaacataaattgttcattaatactagaaaatatcctgtcagtgtcatattttccaaggttgtctcataaaaattgattttctactagtttattctttgattagaatccaataagatccaaaaaaaaaaaaaaaaaagaatccaataagatccatacatggcagttggctaagtctttttttaatctcttggttctgtctccatctctcttgtttttctttgtgcatcgttgttgtagaaactgggtatgtttgtttccagagtccggattttactgaccctatcgaatgaccacagggtcatttaaaatgttctgctacccattaggtcaaaaattaaacacaaaattaaattgcagaatttcttaataataaaacacaacatagctgaacctatgtgacacagctaaagcagttattagaagaaaaataacagaactaaataactctatcagtaaaaaagcaaagctaaatggattacacccgtaagtcagaaagctaaaaaaaaaaaaaaaattaaaatataagacaaaaggaatcagaaagaagataaatgcagaattaatgtttcatcattttagggcttgtttttacaaactgaagcttaagactcaccatttgagaactaggagaccatttcctaatttgtaacgatatcaacaacacatctaggtagctgtcaggggctgggagccttttctacacaaactttgctctgaatttcaaaatactagcctgtcttgacacttagtggaaattcaggtagggtggccttaactcaggttcttcaggaaagcgtcctgtttcagggacacagtggggtggggtcgggggagggctgtattccgcacatctagttctggctgggcttatggcaagtctcagtcctctggagtcacctgagtgactgagggatgagaggcatttctgatcccgtaatatacttacatggctttgccatctaccacatcccagttcaaatctcagctggcacagttaccgttcacgtggcctggagcaaatctgagctgaactttcctcaccgtaaatctggtaaaaatctttaccttaaaggagtgtggatcaaatgagataccaggtagagctagtgctcaccgagtggaagctaaggtgatgaagcccctttattctcaagttctgtgattccatgatggagacccatgaggcctaccagacggagagtatcaattaaaagaaagcaatcacggagttcttcccgccttctctggaggatgtattcctatgagctgccccgaatgttaaaaataatacacctgcccccaaagtgccgaggacgcctttgtggtccacctactcatcgtccaccggtttctgcaagtggaccggttacctgctcaggagcaaatgtttccatcacgacgcaccctctcccagggatgggctcaacctgtgctctccctgcgacaatgctgaacagtgccatctgtccctacccagcgtcagcgtcacgcagagggcccgggcttggaatgtgggaggcacgctcccagctcactttggttttcccgccctggaggggaatccaagatgtctaactagtcttctggccccgagagggagaggtggggataggaccttcctttagtcccctccgtagtggaacgaaggattctttatggtcatctgtggtgttcatttcgtaaagaagcatctgcagggtaagaaggaaaaacgtccaccttgcaaatatatc

SEQ ID NO: 24204 - DNA, 2300 bp, Homo sapien
gtgtgataaaattatacattatgattacatatattatattgtttattttctgtttccttctttttctcttagtgtttttttttcttttctttctcttttcttgccttgcctttgccttgacagggacacttagaggatttgacaggtccagctacatcagatcattggaattggcatgaaaaagagcttctgggccttacataggtttttccaaagagtggggaaaccccaaggaattctgtaaccttaaaataaactgagattcattagtgcagaaacacagaaagctgtcttctgagtctcggaaactaagattttagatgaagttaattttcttataaaagaatacaatattattgtaaataatttagagattgcatataagacaaagaagaaaataaaatgagctatatccgttcctccagccatcaacaccttccacatttgtggcacatcctttcaggatgtatgtgtgtgtgtgggaggggggtgcttacctgtgtgtagtaacttcatgttatacatatgcctttttccctcaagggtgaccactgttgttgcccaggctggagtgcaatggcgcgatcttggctcaccacaacctctgcctcctggattcaagcgattctgctgcctcagcctcccaagtagctgggattacaggtgcccactaccacacctggctaatttttttgtatttttaatagaaacagggtttcaccatgttggtcaggctggtctcgaactcctgaactcatgtgatctgcccccccctcacccgccccttggcctcccaaagtgctaggattacaggcgtgggccatgacctgctttttattatcaatctataattatatgtattgttcctatatcattaaatattctcctttgacatttctaaaggttgcagcgtgttttgctttgctttatttttgattttatttttagagacagagccttgctttgttgcccaggctggagtgcagtgacacgttcataactcactgcagccttgaactccagggctcaagtgatcctcctgcctcagcctctcaaaatgctgggattacaggcataagccactgtgattggtctgttctgcttttttatatactatttctcatttaatcagcccccttttgatagccatttaggttgtttccaacttttcctaattccaagataaaaagagcttcgagaaatgtccttgcagctgtatctctgcccacatccactattctttcctcgggataaatctgcaggcttagaattgttgtggtaatgcagacagctgtcgccaaatagtcctcagaagaagttggccctcgccatgggtgagtgccttttcagcatactcgtaagtaagacattaaggaagaatcaggagctgttggtcccccaaatcagtttctcttcctctcccagcatatggctttaaaaatgctctgggaagatttcactgttttaattctatagagaaaacagtgtatggctcaagaaacccttataatcatgcatgagcagggaggatagggagggagagaactttctgcgaatgtattccactccacggcttcacaaatgcctggcatttattaagccgattgttcgatcttcccaacatcctctcacccaagcaaatgcccttgtaagctagagagctcgttccaaaggcagcactagaaatccacatttcccagctcacagaggtgctgtgtagcctgggggaagtgtcctttcactcctgggcctccatgccagttacctaatctggggggtgcacagaggtggagctgagcagcctgttggaggctctgcctcttgtatgacaaagtgaggtccctttctggtgctggtggccttcccagtttagccaccctttggattcctggaaaatatgaggcctcgtgtgtccttgaagcaggcaggacaaacgaggacatggcagccccttcccatctgggagctgaggcttctttaatctggagaccttaaaaggcacgtgggagccaggggctgggttcttatctcctaggcctggccaatgtccagacgtgccttatttatagcgccactgacaagggcagcgcagctggctggcagctgcacagaaggttggggccatccaaccaggcagtccgcctgcacagcagctgtccctgctcatcgggctggaggacagaagacagaaccctaaaaccacaggtaagggccactggttcccctgtgcccttctctcacccttgccatccttcccagcctgtctctgcagcagctctgtaggcatcttgttgcatgca

SEQ ID NO: 24205 - DNA, 2300 bp, Homo sapien
tccatgttatgtccaatcttttctaagctggaaactgagcaattttcagaaaaaaaaaaaaaaaaaaaaaaaaaaaatgaacctagctggggagggtggtgggctcacatgtctagcacccccagacagaaagtcttagcattatacaggctggtttctgtctctataatctcatcccctgtatttttccacagatgctgtacttcagattctagaattaggagaatttgaccagcttaataagtgtccaaataagtgatttctactcccacttccttaacatgcaattgccgaataaacaaacccacaaaggcaaggcagcaatgtgtattctgaaaccaggtttttaaggcctgatttggagttgtcttcctattggaccccagctcttgggttcaaagtcgacgatcatttgtacgaatgccatggtatatttaagtgagtggttacagctgtttcagtttcttcctcgccagtgtttggggatcggtgagtgggccaagccaggactcaccccctgcaagttcacagaggcctcaaactctgacaagcagaagtttccatcttaaagactgacaggtatacctagagattgaaaattaacatccagaatattgctttcccaaacattatatgtttatttaagactctgaatgctatgttggctctagccttgaatctctgcacatttcaagggattctgtacttcttgattactaaaacatatggaaattgtacaaatccagcatgaaaggcattctttttctttttaaagggactgcttctatattccacatttcaaaaacctcatctgggttagaaatgtaggtatgtccttcactgatgaggtttggaaacattttgaaatctcatttttaaacaataaagaaatatttttacgacactttaaaaagttttaattctaattgttcattatgtcactaatgtgtcattcgcttggctatagtagttggatttttctgaaacgttttggtatattattttcttcacatttgtgacttcaacatagtaaccagattgtcctatattttgttgggttcctttgttgtagtctctgaaggcacattttttttttcttgttctctagactcaccttttactccaaatttccatatttctctttatctctgatcctcttcttgggaaacgtgatagagggagcaaagtctgacaggctgatttagacatctcagagggttgattcaaaacagtagttctgtctgtcaaacacacttcaatggtgctgcctgcaaatacagaagagggatatggaatgggagggccgggaagggatgggagcccaaagcccggcagtgaccacagaaggatgaattgcagtgaatcctttattttgctgacctctttgcacagatcatttgtgtgttggttctggtttaatattccaggtgactcatgcttgggcagattccctcatccctggtgccagcttcctctgaaatatgctgagcatcggcctcacaggtgtgaagaggaaaggaataattagagattatccaacagactgtgcagagtgctccatgaatgtaaggtacacaaataaaacaaaattagccaaatcctctctgcaaataaaaaagtcatccctccaatatttgcctagagaggaggcaggcctgacgggagaagcaggcggctttgtctgcggagcgtcctctcccaccgaccacagcaaatatttcctgtgctttccgtctccagggtcaatttcagccctcttacaaaggctcaatttacgttagcaaattccaactcatgaaagctcagttgttccccttgcaaactaaaaatggaaacctctagtttgctgctttgggctgtttagttgaaggacggcgtcatggggtttgctctgtgttctgcggtgtttgaagcaaaaaccgccacaggaccctcgtgcttctggaaggagcaggcttgctctatctaagctgtctccttccggttcatatgacggcagcaaagaagtcaggccaagttcattcacacccagactgaggcccttatcatctgggctttaagaactctgtttcttgttgccattattcatcctgggaggcatccggctgcacctcggctccttgcttcctccgcctccccatctcttttaagcaggttagaaacaaatcaaaagactcatccttcagaaatctagacacgagggaaacagtgcaaagctagtctaacctggccttaggatttgttctgctcagagcaccaccaggcctacttcatctgtctgctatgttcttcattctgtg

SEQ ID NO: 24206 - DNA, 2300 bp, Homo sapien
aggagctggtctggggagcagatgagtttcattttgaacatggtgacctagaagagatgctgcgccatgtttagggggtgcagattagctggggagctctgcagattagcaggggagctctctaaggctacaggtctgggggttaatcaatgaaggtttagacagggagtgtacaaaaaacaatcaactctctctttaaaaaaaaaaggtgcgtatcagaataaaaacaaagggccaccatctgccttggggatatcacttttacagggtgggaagacaacaacctctctagaggaggcagatgggcaggtcagaaaggtaagagaatcagaactggctgtgtttgatgaatgaaaagatgatggtgtttcaggaaatagcagaaatgccacatatttcagaaaactccacaggataaagattgataaagggccactggatttagatagagaatgacatcggtgacttctaaagaatcagagaaagaagaggcatgcaagaaccacgattcagtgaaagtttacaaagcaaacaagctacaaactgggtcaatattgctatacttattttgagtaaattaatctaaaattgggcagactgatgactagaattcttcttttcttattgtaaagctagatattagtaacacaaaacttgcacaaaaggatgaactgaagtagcttctttcacaaggtcaaaacaaggaaaaatgaggctgttctgattccctgagcttgtacctgattcctgctcagtgtactgtgcttccttccacttactgagctattgagggctacctactgccagggtacttcacataggaggtaagtaaatattatctccccatatgacagattttagaaaggctgaggaccacctgtgcaacgttacacagttcaggaagtcaacagtcaaacactcacctgtctgacttcaaagctacgctgactctagttacctatccttgggtacttcccttctggaaggaagcaggagatgagtgaatcaaataatacagccttgtaaccttgggtaaattattattgccttaatagtaagcagagaccaggagcctaagaaagaatctcattaacatggatgcaggctatcctgccaggaaatcagaatcatttgaatattaggatttcctttgggaaaccatatggggaggagaaaagacatccggatgcatgtgtctgtgaaagggaaacttgtgtctttccccttgctcttgggttttcatcttccaagtttgtttataggctagccacaactcgaggctgggtgagctgaacggtcccatcattagcgacactccttctaggggcacattcgggcagctcctcttcgggttctgcccccacgggtgtgcaaccaggattccacaggctggggctggcctggatgcctgggaggcaacagaggtcgagtttcttcttcttttaggaagtgcctcggacagggatgatggactaaaaatgtgtctggttgggaaagtaaatagatgcaaagcaaataaataaaaatgcccacaagcaattacagggaggaagtgacatttttatttaagtcacttttctgatggacaacaggcctgcttagctgagtgccgtgggaatgcttccgggaggggggcggctgcccagcaactagagcttcgtgataagaacaacgaacaaacaaaaaagaggacgcaaagcccacccggcagtcatcccaggctggaagttgccgtctgtgttttcactctcctccccacccacctaccctgccccccaccgcccgcacgcaatttcgggcgtggggaccctttcctgcccccggcgcccggcccgtgctgcgcctccagagcggagcgtcccgcagccccgcgctatcccggcgcccgtaccgggacccgggcgcggagcctggcgacgacggggggcgccccaggtgggtctcgggtccccgccccgcgcgcccgggcctgggccggcccctgggcggcgtcacggcgcggccggggaggagcgcgggaggaggaggaagagcgcggaggaggcgggcgctgcgcgccgggggagggtcgccgccgccgccgccgccgccgccgccgctgccgcggggatcgtcaggccggagccgcgcggccgagcgggcggcgggcggaggggagggcttggcggccgggaggctcgcggcgcccgggccggcagggtccgcccgggccggcagcgtccgcccggcggcgggaggagggagcggcgcagacaaagagcggcgcctgggcgggcgcagcgcggccaccgccccgggac

SEQ ID NO: 24207 - DNA, 2300 bp, Homo sapien
caatttcatccagtgtttcatgaccaacccccctgaatgtttatgaagcaggaaagaagctcagaatccaggcgaggcctccgggacaggaagtgggccaggcacctccacagcttcctatgcctaaagttctccatttcagcctcaagtagccgccagaagaccactaagattccgccaccttctccaatcaaaactacatctaaccaacctccagggcagaatatactgaggtaggattttccctcgtgttcacttcttcacaagcaggttaacacttgcttctcaggaaacccctgttccaaacgtcaaaaaacctccatgtctagcccaatctccaggtgaagtcaatttcttctccacgtgtccgatgactgccattctctttacgtaaaactcgcaaggcttgaatcctgttactaattcacctgcttatctatgaagcttgcaaagtgaattgagggagtgttcacacgcacagttccgttttggtaagttaaagcggcccaggttaatttcattttcagtcacttttgagacttgataactacatctaaaacagaggcatgaaaaacaccctgaatcactttcattcctacacaaaatcccttccgagaagcggggactgcgcctgggccaggaagggactcccctacctgtaggtcccagcaagccacgcccaccggcctctcagggttgtttctttctgggtcgagggacggagctggcccttgcgatattttaggccccctcctgcccacactggggcctgctcatcccattatgcagatgcaaacttggcagaagcagccttaaacctgttggcaaaataaacaaagccaaataaagaggaatctgccaacctgaattgtgtgaagtggccaaggccgactccacgcacgctcggctttgtccctgaagctgttacaatactagtttaagtcaggtgcctggggtccaccagccaatgacccctagcatccaccgcagaccttcacagagatccccattgtctacaaattaaagcgttttgcaaattaaacccctccacacaatgccaagctaactgtgctcataaggcagttaccctccatgccttaaaactcacatatcaaatttttccaaaagcactcggtgattaaatcgccctgaaaaaaaccgagagagccgagcgattgtgagaaactttggttcattcaggtggctgttagagtcctgtaaatctggggcagggcgcagagcctgaagccgggcacaaaagctcccttcgccgaagcgaggacctcctttatgcaatgtgacagcagctttgtgcgcgaacataaatagttgtaataaacacggttaagttctcccggccgatcgcggcctcccccgtccctgcgccggggccctgcgatccgcggctattcttccccggcacacgcgccctggcgaccctggccaccgcacggtcccacgctagccccgagctccgtgccggccgcccgcctgcaggccaggcgcagcctgcgcacccgggggtctccagtccccgggccccgcagccgggccccctgccctgatcctcgcccgcgcccttggctggcgtccccgcccctgggccggcccccgatggtgggggttagggatgggaaggcgggcaggaaggtgcagagccgggaggtgcccggcagtccgcggtcgggggcgcccaggccgcggcagggccgagagcaccggaggggcgcggaggggacccgctctcctggccccttcccgggcgcaccccggcccgcgagccccgccgcgctcccaactccgcccaacggccccaagtttgtggcccccgccccacgcccgcctagccgcgcttacctcgccgtgggccgcccgcggagccggagggcagcggcgcgggtcccggggcggtggccgcgctgcgcccgcccaggcgccgctctttgtctgcgccgctccctcctcccgccgccgggcggacgctgccggcccgggcggaccctgccggcccgggcgccgcgagcctcccggccgccaagccctcccctccgcccgccgcccgctcggccgcgcggctccggcctgacgatccccgcggcagcggcggcggcggcggcggcggcggcggcgaccctcccccggcgcgcagcgcccgcctcctccgcgctcttcctcctcctcccgcgctcctccccggccgcgccgtgacgccgcccaggggccggcccaggcccgggcgcgcggggcggggacccgagacccacctggggcgccccccgtcgtcgccaggctccgcgccc

SEQ ID NO: 24208 - DNA, 2300 bp, Homo sapien
ttctgacttgcccactgtgcctagtatcaaaggactcaagttctaaatccagctcattgttcttttgcggggtctggtagagaagctgctcaggcttttggtttgctgttggcataaggagtctctcctctgttcgcatgcagaagagattagagatgtgcaaagcccactcatccggagtccaaggcctaagtgattcctcactctccagtcggttgggaaaaacctttagtgtcactgagaaagtgaactcctctgtacatttgggcattagaatccatcctggcagtgtatcagaaggattaaatcatattactcatgagacacagggcacacaggggggaggcctgtatttggacagcccaaacaactgcataaaacaattccttgcatttgcctgtggaaggcagactctgggcaaattcacttcccagttaaaatcttaacaacacaacttaacgtttataatagcccctgaaaatgacacatacagaggtggtgtttggggcatggtacccagcacattgccctttgctgatgttcagtggtgtcagcatgagaaacaagaactcttggtcaagaactgagttcagattccaatacttccatctcgagaggacctgtcattttattataaacacttaacagagagaagggcaatctgcctagtatacgtttgaacttcttgcccaaagatgtattcccactgtgtttggccatcaccttttccttgccttaaattatatctgtattaaaatgatgcggcctttaaaacagtgctagagaatacataaaaaggaattaatttttaaatcaaaatttatgaacttgccttataacatttttatgatagccctatttgaattatcttcttatctttgactaaaatagaattcgatttttctatggggtatttaacattttggatcataatcatgctagggatgaattaatagatcttctgtgagtgaactgtcaagacagatccccattgggtttgaaatgtaattaaaaatgtcagtgaactcacttgaagtccacagagtgctccagggtcccctcgaaaacgttagtcaaggactgaaaatacttaccaagtgcagtgaacataacgcagctgccagctctccacaaccaggagggcgctggtcacctttgtcaggtgcctctcatcttaacttccttctagttttggagtgttcgtctcagaagtcttgaaactaggggtgctttttagcccaaggctatgggtccggttggtggcttctcaacaaatggctggtgcaacagacctccaagagaggaacgagtctctaaacaatatccatgccctttgtaacccttctccgtcattagactctcagactggccacctttccaatgggcagactcccttttatttctgggaggcttttaaaggtggggctcattgggaggaggaagtctggaagagactgggagctcaggtcccttgattatgggctggctgttcccccacaccccatcacctccttccacctgctgttcaccgggtgtgtggttggccctccccaacccgagtgtcggagcttgcccagggaatgaaaggtgggaagagggagtacatgtgtgttgatggaggtctttaggcacagagcagctttaatctgggatatatttaaaacattggtttcaaaatacataaaattagccaggggtggtggcatgcctgtggtcccagctaatggggagacttaggcaggaggatcacttgagctcaggaggtgcaagttgccgtgaagtaagatcgtacaaccacactccagcctgggtgacagaggagaccctgtctcaaaaaaataaataaataacaaaaaaacccattagttttaggcaaataaataaccagttatttttaaaagtggttacttaaaatcaaagaagcaagcagacctaatatatgcttctttctttttagatttcatgtgttctttgtatacaagcgacgtcccagattataattctctgctgagatttgagttggatttgaggatttggagaatccctgcagctttgtaacttcagaggtgtaattagctgaaaacatcatcgttttgaagagttctgcgttttgccagtcacctctcaactgtgtgccaaaggtaagtctgcagttttctgcttaaaacagaagttgcagctttttgcttcaaatgcttaatttggacagtaagtttagtaaaatatcagtcagtgtagccttgatttgttgaatcacattaaatttaagctttcaatgagggagaaaattagattatctc

SEQ ID NO: 24209 - DNA, 2300 bp, Homo sapien
ctgcaaggaacctggtgcttagaaaactcagtaaatcctagttaaatgaagcagagatgggtagaacatggcccctcctgacaggtatgacataaatattcagagggtattcattatgactgtagttgccattcttaagtctctcttaatgctggcacatccggcctcaggactttgtttacaagctcctcatgaggtattaccctgggctattgaagaggcagctgggctaaggtggcagtaaggcccacacctatataaatgttaaaccttgccctctaaagcactttgtattcatgtctctcctgagcatcagaagtatcttccgaggcaggtggcggtgtcccattttacagaagaaactgaaatccaaggagaacatacaaatggttcagctaagcttgaatctcagacccttaactcctttcttctgtaatatttggttcaccttgatccccgtgacctctttggaaatctctatgaccattttttaatgttgtaggggcactggctactatcaggagtgtgttaacccagcaagatacggttcataggattgtctttagaaagaaaatagggtcttagagtaggattgctcgtattttaggcgttagtgaaaactgttgagctgagaaagtttttatacctatcctatttgtttttaaacccattcccatccaagacttgaaaaggcagcttagctcatgaggttctgagagctgtttttccagcataacttgggggtcttgctaagctgtgttttagagtggtcacatgacatacaagatgtaatctggctatataatatcaaatttgtagcccttctctctttgggctagacctgagtaataaacttaactagctgtagtaatgaagccaaaaattaggtttccttgaactgctaagctagagagaaaaacatgcgttgttctttggatcagacttctatgatggtcttgcctagactaaatcagaataccatctctgacttaaaatttcagtagtcaattagctggaatgcattttttttcagactttcttctgttgaggctttttcacattggaaatttgtcagtttgtatgtctaattttattgtagaataatgggtcatctgcagtctctttctgttcaaatccatcctgcaccatagcaaattactcttaactgaaaataccacatggtcctgttgggttttaagaaacagcgtccaagggatgcaacttcaactctcggccaacaagaccctccagatgggcttccagccagcctttccaacctgtgttggcaaagagagaaaagaccgaagcctgtgaggatacagggtgatggggcactcttccttcccacttgttttggggtctctgagggcagcagcccagcccggctgtgtaaatgagggagccattgttgtatcagtgcatggccataactcagcttcagaacaaaaaactgtagggggtgcctccttcattgaggataccgggctgctaagtcggtgtccggcacagagctgagcttttttttttttttctgagacggagtctcgctctgtcgcctaggctggagtgcagtggcgcgatctcggctcactgcaacatccgcctcccgggttcaagcgattctcctgcctcagcctccggagtagctgggactacaggagcgtgccaccacccccggctgctctttttgtattagagacaggtttcaccgtgttagccaggatggtttccatctcctgacctcgtgaagcgcctgcctggggctcccaaagtgctgggattacaggcgtgagccaccgcacccggccagagctgagctttctaagggtcttgggaagtgtggcttccagtgctccaggagtttcagaagcggaagcgttcagggattggttaacctttagctactgaggcgtgattacgccaatggagctgtcattgattggctgtccctctgaagcagtctcactgcagtgaggcagttgttgattggctggccgtctggtgtgacttagtttttgattgctggatttcactggagtgaagtggtcgtttattggctggccctctgatatgaggtggtggtgaattggtgggcgtcagtgcagtaagtgagcgagccggacgtcgattgactggtcttcagaagcaggttcggttttgttttgttttggtttggtttaaattgatgggggctgtcattgagccattaaaatagggttaaacccattgctatggctaaccaataggcagtcatttcctagttgtatgggaacttttaattttcacgtgtcctagaatct

SEQ ID NO: 24210 - DNA, 2300 bp, Homo sapien
ctctctggtcatatcccgattaagtgaagataatttatttttttttagatagtgtctcgctttgtcacccaggctggagtgcagtggcgcaatctcggctcactgcaacctccgcctcctggattcaagtgattctcctgcctcagcctcccaagtagctggaactacaggcacgcaccaccacgcctggctaatttttgcatttttgtagagagggagtttcaccatgttggtcaggctggtctcaaactcctgacctcaagtgatctgccctcctcagcctcccaaagtgctgggattacaggcgtgagccaccatgatcccccttaagtgaagagaatttgaatgtcatattagaagtagatattggtagcaatttggggtaagggggatgatctccacaggataaataagattacagccattatgtttaatgtatgttctaaaccaatccaaacagaatattggctttttatgtgctttgatttttctttctaatgataaatttcttgtcctcaggcaaaagtaaatatatgcctggttacttttaaaactcctatcccctattctacagtttcctcaagggtttagaagcacttccccaagatagctagatgtgtaacattatccttctgattctctctgacaccctgggcagtatcatgatctaactcagacccactttgcacttttttctttggttggccaccatctgtctttactagctcaatgttagaagacttctttctccttcctgctggagaaattcaactgcattgcatggagagctaattatatggagagacagtaagtgcttaccactggagggtataaaaatactggccggtgtggtggctcacacctgtaatcctaacactttgggaggccgatgcgggtgaatcatttgagttcaggagttcaagaccagcctggccaacatggtaaaatcccttctctactaaaaatacaaaattagctgggcctcgtggcacatgccttgtaatcccagctactcaggaggctgaggcaggagaatcgcttgaaccccggagttggaggttgcagtgactgagatcccatcactgcactccagcctgggcaacaagagtgaaactccgtctcagggaggggaaaataagtgagaaccttggtgaaggaaagaggtaatcagctcagttcagggcagatctgagatgggaagacaggaaaggtaatctcacatctccatccttttgtagcccaggcctggagagaataattaggtgacccgctcagagtccgttgggataaagttgttctagtttttgttcactacgcctcctttcacgtgtcctctacagttgaacaggccagttactgggatgcagttctgcgtttcccttgggtctcaccttaacatcgctcgctgaagtgtgcccagattacagagcgggcaaagggaagcagtggttttgctcacagctgcagggcaccaggttcctggtttctcaaaggcttttctattggagaagtttgggtgagacgatttcccggactgcagctctgaacccagactgtggaatctttcaaactatctcaaaaacagccccgcctaaggcatccttaagagcagctctgaactaaggaaattccaaagcccactttacaaaccaggcagaagcaaggcccccaagcagggagggagggagatagggaagaaaggggtgaggagtaaggggaacagtggcgcggctggggcgggcggaggaagtgggggagccaaggagacaccccagcgctgggatccggcaagtcctccctctgagtggccagggggcctcgtcccttctcccgatgccttctgcccttccttgggtctccggaacccagcttgtcctaaccgctttcgctgcgggcagcgctggccacgcggcccccgccgccggcggttctccgtggccaagcatccttggccttggagcccaggggctgcgttccccttggggccggggcgggagagaggacctcggtggtactcgcccgtgcgctgggcgcagccgcttggccctcagccctctggcgcggcgcccacccgctgggtcccgccccggcagcgacgcagggataacccgcggccgcgcctgcccgctcgcacccctctcccgcgcccggttctccctcgcagcacctcgaagtgcgcccctcgccctcctgctcgcgccccgccgccatggctgcctcccccgcgcggcctgctgtcctggccctgaccgggctggcgctgctcctgctcctgtgctggggcccaggtgagcggggcg

SEQ ID NO: 24211 - DNA, 2300 bp, Homo sapien
taccaggtgcacactttaggtattgctgccaccatctcactgtcaaggcatggtctcgaagtagagtgcgggatgtggtgctagatgctttgagtcagcatcactgccccctgggatcagtttcaaggtcggactgtgtcccctggagtttcaaggacacctacgcaggacgggtgtggttttatcaggaggcctaactgttggtttccttccaggtatacggatccgggtctcagacaagggcgttccagtacgtcaggtaagactgtcctgccctgccccagccttagcagtgctttggagcaggggtcatgccaacttgacagacagttcagtgtcttgtatatgttaaccatttccacaacgctaacactatatattgattaaaaatttttaattttatgatgggaaaacttgctgttctctgtttaaaagttaaaatttgcattcatctccatgactatcgtgactcatgtgctaatcttttactgccacctagcggtgtgtgggtgaagttgcccagctctgagggtgacttgggtgatttcagcgcaggtggagttaagagatggccttttgcatccagcagacctgtgaatgccagaatctgacccattgcaaacatggctcgcggggtggaggagatagtccttgtggagggcacaaggtagatagtgttcttatgttgaatttcacgctgaaactaaatgcagataaaaatatattttttgaatagattcacgtggtgatttttattgctttcttggcagcccttataaacccactgttctgttgttccattccgttggtgattaattttagaaggcagtgtggattctcagagtagttaggatagaagcagttgtgtatgccaaagtgcatccaccagtatgtggctattgtaaattctgtgaaagtttctggtatcctgaattgttgtaaaacccagttctatattttgaacccacatattttcactcttcattgcaaataccccagtatgcctgtcaatcaggaagtgttattcctgctgtcttagggccatcccaggggcactagggtgagatggtggctgttgtgcaggtcggggcagcccccaagtcccacctcagccaaagcaaccacataaaattgtacctacccaggacccttaggtaggggtcctgggtaggagtcccgtggagaaatggaactggtagtaaaataaaattttaaaaagaaatcaaaataaccactgtagatttttgctgaaagtatttgtgaatttccatttactccaaaagaaagctgtgagtaaacatttacacagccagtagttttttcctccccacccattaatatcttgcctcaaggggcaaaagcccagaagtgtactataaccaactttgtggcccaaataggcatgcatattctaaaaagcgatttaacagggaaatggcagctgcccccgctttgggactgtgttcatttcaaagcacttaacgtaggcactatgtccctggaggaaactatcatggcacacttctgtatggggaccaaattgtgggcctcccttggattgagtaccgtctttccatagtgacgcgttcttatcccatcctcctccactcacccagctgtgcccttttctgagggagtcttgctgtcctcggttatgtgtgcctgcctcgggctgcctcaccagtggcgcccaggcttctccagcccccacaccacatggaatatcaatgagatgttgtgcggtaaaaggaaaccagtcaggacccattcttctttctgctctcattatctcaagggcattgtgtgcaaaattcatttaaaatagcctcagagacttttctttttgctaggactaaaatattttgagcattcagtgatgcctgtgctatgtgctgtcccagctcaggacaaaatgcaccctggcccgctctgatggcctggtcactgtcctgtgcctgctttgatggtcgtggctcatgctcctagctgccatcacatgcatcgtcctctcccacaccacttgactacttgaaaagagggcatgagcagtttccctagacacatggttgttaacccttttagaaaacccatttcataacacttcagtagtatttatttactccccactctggtgatcctctctggtttcacattagcagagtctgagatgatgaggcttcagggactttgccatacttgggcaagggtttcctgacttaaactttttagttattgaggactcagatgagttcattaactgaccaaagttttgatgtttttcacaagcaattttttaggaa

SEQ ID NO: 24212 - DNA, 2300 bp, Homo sapien
ggctttcccagggtcctgctacagagcacctgtgcttccctgaaatgctgtcccaatttacttttccaccgtctgtataaacagggatcttgagaccagcttttccatggggaacaggaaaaggcagaaatgtgcattgtgtcgtgggaagaccagtaccgggaacttgtagtatctctgttgaagaggtccaggaaaataaaagaagaaagtgaccatagctaacacttaactatattccaaatgctattctaatcgctgtttatggttggcaagtttaattatgtcaatacccgtgcgaagtaggcagctattttcttcattttataggtgaggaaaccaaggcatggagccctttccattacctgccttttacctggatgctcagttgctatggagggccgggggtgggggcaccaggagagggaagatgggagagccaagccatcaaccctgggcacccaccctaaagaggaggggtggaaacagtgtttgccaaggggattgagtccatgtttatgtagacatttaaagcatgcagctctgattagaatatttttgttgaagtatcatttagaaatttttttctcagctttcagtttatattgcaaatgtaaataaaactgcagtggtggctcttagagatcgccctctgtttaatttggagctgttggaggcttcctatggagcagcctaggacactgaaaattctttcccctgcggtggcttcacagggaaggtgagcccctcgctcagaacagtcgacagcactggcgggcaaccccagctcccgggggctgagccagtctctagtgtgtgcagcctttgccctaagtaaatacatttgacatgaaatgaagggaaaatcttgctgttctgcttctttgtgccgagagaaatttggtctttatactttgagaagttctgtatcttcttcattcctgttttccatcctaaatactggttctagagacaaagactagggccatgctgtgagacttcacattgcagagagggacatctcgttggggagtatttctgtaagacctctgactcaagtgtagaaaaagagaattctactgtaagtatcttttatgatgggaatttagtatgtgctaaataatcgcgtgagttatcacagaaagaactaacccactgttttgcgttttagtgtttctatagtctttagtttcatggtacaaatcctgaactggtccttggcagtttcatacagcatgggtgtggcacagaatgaggcttgacacagactatgtcactaacttaagacaaaattaaaaaagaaaatcaacaaaggagtggaagctacagtcagtttttatgtggatttcccctttggtagaagaaaatgtcgatttctccgatgtgttctgaacagtggtttcaggttatcccgagttgttctcctcctatggtgatttttttcttccctatgtatgtgtcatttatgtgggttttgggcacagtgaaattcaacctaagaccctttagggagttcatttgtggtttgactggttgagtttccccagtcaggattcatagaagggccgagtaagtcgcagctgtgccctcacccagccacttcccaacataagattaccctgcatgctctctggtaggaatgctgctgatcattaattggagctcttttaggctcatttcttgagacttctatttttctagctgagctcccagcacgtggccttgtaaatgtgaaaggtcgtggcagggtctctagcggtctctggagcaactgtgggcacccatgaatgggctgcctttctgtccccctttgacttcctctccccacctcagcttggattttggaacgtcaggctcatgcttggtgtactctgaactgtgcagttgacatgttcccagggcctttgtcctgggctgtgagggttaaccttgctgctttatttatattccgaagccggttgttattaatgttacttactgtttacctagcacctctcattgctggttatttgtccctgctctgaatttcccctcttctctccccttcagaatttctcaccagattatttaaccaacagactctgctgcagtgccctttttaggataggaactggagttattgttaatgttacaggaagaacacattctcaaaggagaggggggtggtgggaaactttgattttcatagggttttcagtttcctctcaaatgggaggatgcagcagtgccgctacttaactgaacgtctcgacagtctgatggggcggccctcagccttccggagcagcagtgggactgac

SEQ ID NO: 24213 - DNA, 2300 bp, Homo sapien
ggaagaaacaagggggtctgggaagaaacaagagaggcaaggagcacagggaaatggtgctgcctacgcccaagatccccggaggagcttggagggtctctttggcatctccctccctcaggccttcttacctccactgggtgcacacttactattgcttactttttaattctggctgcggctgagcaagacaccagtgtcctgggacaccaaccgccttctgggtggcaataatgacagcagcagctatttcaactgcagctgctaacggtatttccatatacttaatcccacagggcagaagttggcagtagtgtccagcagcagaaaaaaatgctaactgggaatgctgggcttaaggagtttagtacagaaatggcaaataccccacaatttctgacctttgtcgtctaataggatacctatcaactaaaccctacctaaaacctaaaatgcttgaaatccgcctagaagcttcagtctgattttgcccataggtcaaatgttaatgaactattattttcttccatttctgctcctcatctttaatctaaaaaccacggagtcatggaatgggaaaggcctagagctccacttgctctagttctcttttcaaaaaccatagccagaaagccacgaggaaatgcagacttacaaacaaaatcgatttgttccaaactggtgtgctctgggggcctggcccctctgggaacccaggactcaggctcccatgccaggtgttttgtcacttggcagcctccttggacacgtcagagtcagggagctgggcttctcgaaagaagtccactccatctatgggcagcatgcatagcaggggcaatccgccttagcaaaccgctcagtgtttcctcctagtcagggattctcaacaggtttaggggaggggtaggatggaggtaggttttatcagaatcacatcatttgcactatagtttgaaagatgtaacataaagctgctgctttagtaccagctgccatatttccttttcttggaggtttctaataaatctaaaggagggtgatctattaagttttgcaaaatggcctgaggttccaagaggtaggagagccgctgctgacttcaacttctccgtatagctgaagatgacctcttgaagcctgcagatcccaaatccgggatctctcttaatgtggcatcacacacatctgtgtgtacctgtctttttttcctccatgggaccagctctctccagatccaatgacaagcttccgattatctgtggatcttctgatacatctccttgcttgtaatcatcattcagtaaatgctttttaaacacaggtacctcctatgcaatcagtacagcactcataaaacagatatactcaacaaaaagattgaatgaaacacacacgacaacatggtcagggtttttctctaggcagagacagcgcaatttcatcttttcttttccaagtctatcctaaattaatatacttagcactgctttttaaaataataataaaagactattattaaaacaaaggcaccccagttgatcatagccaaggaaaaaaaacgcagccagtttttacttcggcaaggtttaggggatttatcattttcgctgccgatattctaactaaaaaaagccaactaaacagcccagagaacgaggcaactttctgaggcaggcattcaacttctaaggctcggccaagtttagcaaataagtttcgtttcactgcaacaccggaatgcccaccgcgtgcccccctccgggcggggctcggaaactggccactgcagtcgtgcccttgggttggggacgcacctcagcgaaacgaatccagccgcacctcccggctggcacccgcgcgctttaactcagggaaaacagaccggaacgcgcatgcgccgcggcgcgccgcaccgcccaccagccctccaggtcacattcttcgaaaaccaaggcaagaaaggcggcaactgcgcctgcgggtagagaagccggaggggcgggggcggagccggaggaagggggtggaggcgcgcctgcgcggtgatcccgccagcaggaagcaggcgcgcgggggcgggggcgcgcggcggcaggaggcggggctctcggggccgctgccgccgccgccgccgcgcattgtgcagcaggcgggcccccgcgcggtagggccctggacccgcgcggctcccggggatggtgagcaaggcgctgctgcgcctcgtgtctgccgtcaaccgcaggaggatgaagctgctgctgggcatcgccttgctggcctacgtcgcctgtgagtgc

SEQ ID NO: 24214 - DNA, 2300 bp, Homo sapien
gaagcataataacatgacacagagaacttaattgaagggggaaataaatggaagttttctttttttgaatatcaattgtagcctgctctgctatacttcaaaaaaactcttcagaaagtttaactgaactcaccgtaggacacactttgtggatttattgtgtgttttgaagtcacgctgtgagctatagaattaaccaaaacacaactcctcttggaaatgagagttcaagttggcagaaagtgcggggtaaagacatggatatgggcctaaagcatctatttctttgtgatcttttgatacatctctcaagtgctttttagtggattaggtttagaatgcatcagccaactcctgctcaataatccatttttccagcctggaatgtcttaaattgaggaaggacaaagtccaagaggtggggaacagggggactttggccgaggactttgcatgaatcgatgagcatgcatcctcctccctgtcctgccccttgtgctctgtgtaccctcaggaggtcaggacgggcctttctgagaatgagaatctgttcatttgccttcctactggatatttgtcatcagcatacaaaccaatgcgctctgcagtgtgtcgtctttcagaacctcccctgaccgcatgttccctggagggctcgctgtcttcagagccaggcttgtctcctgctgccgcctccactgctctcctagtcactctataacccactccctctgcctgcggcccccaccacgcccctcaaagtggtcaaggttgtcctgttgtctaattccatggagcttggatatcttcattttattagcctcttttggcctcttacccctgtgaaagtcactagcattctgtgcaaaggatggcgctggcatctccaggcttggaatagacctgccaaagctcagccagatgtccggaagagcctcaggacaagggaacaccctgtagccttgtggtgggagcacagctgaggcccccttggccaccctctgccacgaccaggcagaaagcagctttcggacagattcgttgtctcagatttgatctcaaagaaaaaccaaaaccagtatttgtcccaggttctgcttttttacaatttcctccgaaatccagatacctatcaacaccttggaaaaactgatttctccccagttagtagtgttgtgtgactgtcatcagcccagtacaaaaatggccttctttgttggggagcttcttaccctccagtgttttgcccaatttttgtccaaggtggcagcataatttagttcagttcttgtttatttccaccatcatctatgcaccaaaatttatgtgtctcaaggagggaccattcagaggatgcttcccaccagttcaagtgacagtgtcagaaccaaagcgcatattgtaggaaatcaaacaatggcctccaagttccatttctacccagggatgaacaaatcaacatcaatcttggtaacacaactgccactgatggtgccttactcttctctcatgacatggaacaattgatagcaaacataaaatttgttcttgtttaaggatttatatccactaatatggtaacatagtagtggttccatagttctaacctgtttatcaatccagttaatcttttactatcttgcaatctgttaatgaaactgtttttctttgttttataatttcaacttttagagtcaggggtacatgtgcaggtttgttacatcactaaattgcgtgacactgagctttggggtacaaatgattcccatcacccaggtagtgagctaaatacctactaaataggtagtttttcagcccttgcctcgctccctctctcccttctctggtagtccccagtgtctttagttgccatctttatttatgtccacatgcccaactgtgtgttcttaactaaacattttgattcatagctacccattctacttccagtaaacagcaagttttatttggttaatggaaaccaaatagattaaaaggaagtcatgacaattagacatcggcattgatttactgaccatttattccacttggatctcccacctctaggtcaaggagagcctctggatgactatgtaaatgcccagggggcttcactgttcagtgtcactaagaagcagctgggggcaggaagcagagaagaatgtgcagcaaaatgtgaggaggacaaagaattcacctgcaggtattttcatcgtcgttgcacctacccagaaatctgtaattcagatggcaagtaatttactcacaaatttattaacgatttaagaggaaagagaaat

SEQ ID NO: 24215 - DNA, 2300 bp, Homo sapien
atgcatacttagtcttttaattttctttaaggctgttgttatacataaatttgagtttagattcagactctgtcatataataaatagtgaaaattattagtattaaatttgattccatctacatatcaattttcctaagagttaataatagtacttagcaatacacaaacacctgaagaataaatttcttcatactttgcaaaagagaactaggtagatgtcaatgtttggacatacataacaatagctcttacatggttcagaatggggtaggtggggagtagatactgcaggcagacaggacggggacaggattagggaagaatagagtctttaagtgctgtttgaggcctcctcaattaaattcaacatctatcaagctgaccacggtactaatcattggcaatttagagcacctttctttaaaaaggtaaagatattaaataaaactaaagatttcacctttaaatttaaagacagtagaaggcccatgaccattcttaggatggcttgaagaaagtatcctaaacgtcatactgagaaaaatgtttatgaactaccaccagatctcttctgcaatgccccaatgctgagccttgtcattcacaaatgactaccaacagcacacagctctcaaatgaactctgagtcaccaccattaaggtcctgtgtcagttcccaacacacccctaggttcaatgattcaataggaagacccagaatctagcatagggttttactcacgatgatgatttatacaaaatgatacgaagcaaaatcaccacaaggaagaagtgtacagggtaaaaagtccaggggaaccaggtgcgagcttcaagaatccactcccagggagtggcacagggactgaattcccccagcaatgagttgtgaccactgctacgaactgaatgtgtctccatccccactcacaggttgagatccttcctaatccttaatgtgatggtattaggaagtgaggccttgggaagtgattaggtcacgtgagtggagccctcatgaatgggattagcgcctttgtaagaagagatgttgtggagatgatttctctctgcaataacaccatgtgtggaaccagcaagaaggctccgtctctgaatcaggaagagaggccaaactgaccagcgcctgctctctaacgtctcacctccagaaccatgagagagaaatttctgttgtttaacacatccagtctatggtatttcttatagcagccagaaataatggagacaacaacacaaatgaaattttgccaaccagggaagcttttgagagactcagtactcagtgtttctatttgaaactggtcatgtcagcagtctctgcctggcatgtactaaaattccagactctcggaaggaaagcaagtatccagcataaaccacatttcttgcataaacagcacacacatagtgaaccacgcttatcagttagaggggtgggaaccttcccaaaaaatccaagttcccagacatcagccaagggccagtcttataagcaggccttcctgaggataagcagtcaagctggcggtgttgtcttttctgcccggataccatatatgcacaaattcaaagtatcacattactttgtaatcatttccccatgccagactgatgtggggaatttacatctggttatgctaaaaatgttattgattctttttttatttcctctcttatgtctgctcaggactacataaaatgcaagaagaatacaaatcatctaataacatgcaattcagtaaaggacagcttttaaaaagcatttaagaaacttttatgttaagtaattttgtttaagaactacaaaaaattaacaactttatcactaatgaaagttttactgctttcaacatgaggctggactttttgataggcagatcaagatttagacacgttttaatgtattttttcaagccaatcaaatgggtatggggccagctgttttgaatctttaaacagtatgaatgttaagtttcttatatggccagttttttttttttttttgagatggagtctcactctgtcgtccaggctggagtgcagtcgcgtgatctcggctcactgcaagctctgatatggccaatttttacaaatgagcctatatgagggattcatttgaagaaaataagtattagtattttctaggcaattgtgactcaagaggcattcatttgctgaactgtatgcttttaaacatcatataacgcaagataattatcaaaccatttaaaaagcatttctactggttttgataaaatgtcatgttatatgatt

SEQ ID NO: 24216 - DNA, 2300 bp, Homo sapien
acattgttcattcaggcagttccgcagaattccatgtgtcagacataattaatacaattggggaaatactgagtaagcgttttcggcccacacttttgtttgaacacagtgcattatacccactcgattttagtttaattcccgtgctgttttacatttctgtaaactctttgagggagttctgggcgcccactgtctagctcagagttccaggctaaggtaggcactaatgaatgctgaatgaattgggtagccagttaattgctttttcccccctaaaaaaaaagtctaaattacttgaataaaagtatttgcggatttttaaataatacatttaatggcagatctctgtctccaaaacgtgtgtccttctagcgactgagggtgtggggtggggtgaggggtgactaaccagtccccctgagatgggcccaaccttagcaatattatccatctacctgggattcccctacacctgaacagctctttgggtccgcgagagaaccagcggggtggggcacccaatgccaggagtgcgcgcggagagacacgctgaagttcacaggagagtatttaccagcaaacaaagggcggcgcggtttggggtcctaggaccagctgccgccgtctcgagaaaacgcaagggccgcggtgacaagtggacattccgcacgcgaccagaccgacactcgatgggcacctccccgcggccccgcccgcaggctccagctgcccagctcgcagccgcccactggctccggaggctgcttcaaccacttgtcccgccggcttctaccccaagaactttccgtccctcttggggttggggaccggcagtgtggaggggcgggcaggtgggggtctccagggagcaccgtcaccggacttggcgagctacccttcccaaatgaaaggtggcccgctcccaagtccatcccatatccttagagaagctctgggagcgagggccaggcggcagtgcggagcctggttgagcgagatgaacaaagggagctagcgagccggggaggatgctgcgctcccctgcgccccacccagccggctgccaggcgctgccaggcgcgcaggtagcccggccttccgcgctggcggggggaggtgttggacagggtacacaaagactcacttccgccggggcaggcgccgggactccctcctggccgcccacagcctgtgcgcattcctgcattcctgccgccgcccgggacccgagtgccccggaggtgtccaggcgcggtgccaggcgggtactgtgcaggtaaccttcggaagaactagggctggatggaggcggcggccggggagaaacacgcctttttaggcagccgtgctgccccgcaccgccccacgcagcccaagtctgcagtcactctccgcgacaagcagaaatccgcgcgcagccagggagcgccccgcctgcgctcgccggcgggccgagctgccgggccgggggcgcggggagggggcagcccaacttcccagtgcccggctcccgccagctaggtgagcctggagcgggaaggatgaaagggatcgcggagagggagggggctctggggcgagcggagctcgggggcggggcgcggcgcagcctcggtgcgtgggccgggaaccgccgcctctccccggggctcggggccgcggttcctctggccgcgggagccgccgccgcgctgcccgaaacaatgaggcgtgcagcgcggggctgagcgtagcctcccgccggctttgaggccgagccacccgctgtgccccgccgcccgcgcttgcagctgccgccggcgcggagcagcgctggccccggagaggtgatcccgcaggccgcctgggacgggagcgcggggcagctccgagaccccacggtggcaggaggaggactcgagcctgcggcaggacgactcccgccgcgcactcgccttctgcagcccccaagttccgcggcgtgagtcggggaccccggccagggtcccagctctagcgggcgccagcgtgagtgtgggagcgcgtagcgcgcgcacccgagcggctgccggggaataaaatgtgacacgcacgccttggactccagtgccgcgctgccagggggagcaccgagcaccacggtgtcgtgcgcttcgaggcgcggcgtgggaagaaggctggtaagggagggcactgggtaagggttggcgacgcctttcttggtggcgctgcagcctccgcgctgctgtgcgcggagttacactccgtgtttaggagcgagacccgtgtgtggggaatgttgaaggtggtttggggaa

SEQ ID NO: 24217 - DNA, 2300 bp, Homo sapien
agatgcttttaacacatgctctctacttacaacaaaccttgaagatagatactatataattttttttttttttttttttttgagagggagtctctctctgtcacccaggctggagtgcagtggcaccagcttggctcactgcaacctccgcctcccaggttcaagcgattctcctgcctcagcctctcgagtagctgggactactggcgcttgccaccacgcccggttcatttttgtatttttagtagagacaggtttcaacattatggccaggctggtctcgaactcctgacctcgtgatccgcccgcctcggcctcccaaagtactgggattacaggtgtgagccaccgcgccaggctgaaggtaggtactattacatccattatacagaagagaaacagaagcccacagactttgcaaccccctctgcgcccctctactattaagaaggtgagtctttctgcagtatttcctttctctatccccaccagctatgggtctctatcaggttgtttgtttctgttttgttttggtcacttttaaccacactgtatgtatttcacatttataaaatataatttttcttttttttttttttttttttttttttttttttgagacggagtctcgctctgtcgcccaggccggactgcggactgcagtggcgcaatctcggctcactgcaagctccgcttcccgggttcacgccattctcctgcctcagcctcccgagtagctgggactacaggcgcctgccaccgcgcccggctaattttttgtatttttagtagagacggggtttcaccttgttagccaggatggtctcgatctcctgacctcatgatccacccgcctcggcctcccaaagtgctgggattacaggcgtgagccaccgcgcccggccataatttttctttttttaaaaaatatctgtgtaacacattgttcattcaggcagttccgcagaattccatgtgtcagacataattaatacaattggggaaatactgagtaagcgttttcggcccacacttttgtttgaacacagtgcattatacccactcgattttagtttaattcccgtgctgttttacatttctgtaaactctttgagggagttctgggcgcccactgtctagctcagagttccaggctaaggtaggcactaatgaatgctgaatgaattgggtagccagttaattgctttttcccccctaaaaaaaaagtctaaattacttgaataaaagtatttgcggatttttaaataatacatttaatggcagatctctgtctccaaaacgtgtgtccttctagcgactgagggtgtggggtggggtgaggggtgactaaccagtccccctgagatgggcccaaccttagcaatattatccatctacctgggattcccctacacctgaacagctctttgggtccgcgagagaaccagcggggtggggcacccaatgccaggagtgcgcgcggagagacacgctgaagttcacaggagagtatttaccagcaaacaaagggcggcgcggtttggggtcctaggaccagctgccgccgtctcgagaaaacgcaagggccgcggtgacaagtggacattccgcacgcgaccagaccgacactcgatgggcacctccccgcggccccgcccgcaggctccagctgcccagctcgcagccgcccactggctccggaggctgcttcaaccacttgtcccgccggcttctaccccaagaactttccgtccctcttggggttggggaccggcagtgtggaggggcgggcaggtgggggtctccagggagcaccgtcaccggacttggcgagctacccttcccaaatgaaaggtggcccgctcccaagtccatcccatatccttagagaagctctgggagcgagggccaggcggcagtgcggagcctggttgagcgagatgaacaaagggagctagcgagccggggaggatgctgcgctcccctgcgccccacccagccggctgccaggcgctgccaggcgcgcaggtagcccggccttccgcgctggcggggggaggtgttggacagggtacacaaagactcacttccgccggggcaggcgccgggactccctcctggccgcccacagcctgtgcgcattcctgcattcctgccgccgcccgggacccgagtgccccggaggtgtccaggcgcggtgccaggcgggtactgtgcaggtaaccttcggaagaactagggctggatggaggcggcggccggggagaaacacgcctttttaggcagccgtgctgccccgc

SEQ ID NO: 24218 - DNA, 2300 bp, Homo sapien
ccaggttcaagcgattctcctgcctcagccttcaagtagctgtgattataggcacctgccaccaggcctggctaatttttgtacttttagtagagatgaagtttcaccacgttggccaggctggtcttgaactcctgacctcaggagatccacctgccttggcctcccaaagtgctaggattacaggtgtgagccacggcacccggccaacaaagttgacaataacaaactgggaaaaggacttccaattcaataaatggtgctgggataactggctggttatttgcagaatattgaaacttgaccacttcttttcaccatatacaaaaactaactaaaggtaaaccaaacacttaaatataaggcctaaaataataaaaaccctagaagaaaacctaggaaataccattctggacatcggccttggcaaacaaattatgactgagtctttgaaagcaagtgcaacgaaaacaaaaattgacaagtagtacctaattaaattgaaaagattccacacagcaaaataaactatcaacagaggaaagagacaacgtacaaaatgggagaaaatattcacaaactctgtatctgacaaaggcccaatatccagaatctgtaaggatcttaaataattcaaccaacaaaaaacaaccccattaaagagtgggcaaaggacataaacagatacttctcaaaagagacatatatgtgataaacaaatacatttttaaaatgctcattatcattgatcattagagtaatgaaaatcaaaaccataatgaaataccacctcacaccagtcagaatggctattactaaaaagtaaaaaaaaaaaatagatgttgccaaggctgcagagaaaagggaacacttatacattgctggtagaaatgtaaattatttcaaccactgtgcaaagcagcgtggaaatatttcaaataacttaaaatggaactactatttgacccagtaatcctactactgggtatacatccaaaagaatataaatcattttaccaaaaagacatatgcattcgtatgttcattacagagctagtaaccttagcaaagacacagagtcagccaagatgtctatcaatagtagtctgcataaagaaactggtacatataaaccgtgggatactacgtaaccatcaaaaagaacacaatcatgtcttttgcagggacatgaacgcagatggccattatcctaagcaaattaatgcaggaatagaaaatcaaataaggcatgttctcatatacaagtgggaactaaacattgagtatacatggatacaaagatgggaacaatagacactgggggctgcgtaaggaagaagggtgggagtggtacatggaatggaagggtaccgatcgggtactgtactcattaccttggtgacaggatcattcttacactgagcctcagcaacaagcaatatcgccatgtaccaaacctccacatgcattccctgaacctaaaataaaagtagagataaataaataaatataaataatatttatttattattggtaaataaatgaggcatttatttaccaagacaatgtttgtgttccatgaccagttctgaaaaaatggagttaaatacatttatccaaaaaatggataaaaatactagattattatcctgatgcacaacaggaacctgttgtgctgtactcattttgtttagtcacatgttcacaaaaaagaattacaattaggagtattttttttaaacatgagcaaaagcgatattgaagcagttatggtgtctggggtaaatacctggggttcatcctcttgcaccaagaaaatttaggacacagacacatatgaggagtttaggagcagaggtttaatgggaaaagaaaaagaaaagaaaacagctctctctctctctagggagagggaggagatttccaagaggaaaggccagctggcagcacatgtggtgaattttatagtcaggctccagtaggcggtgtctgatttatgtagagctcacagattggttccatcaggtgtgacatttacatagcccagggaaggctggccaccctaccctaatcttattatgtaactgaactttccccttggccagggccatcttgtctgctccttactgtacatgtggctggcagagaagggaaggtggagccgctattttgaacatgattggcacaactgccagcatctatatctgcagcttgattttacaggctgctctttgttagaaaggaacatgatttggggctacttttcattaaaaggaaaactgtaccgaagacttccatac

SEQ ID NO: 24219 - DNA, 2300 bp, Homo sapien
ccgccgcggggccgggtcgaggccgccgcctcaacagagcacgccagggagcagcgccggtcgggagccatgacgcctgagccatcgaggccgccgccgggccgggtcgaggccgccgcctcaacagagcgcgccagggagcagcgcccgtcaggagccatgatgcctgagccatcgaggcagccgccgggccaggtcgaggccgccgccgcccggccaggtcgaggccgctgcctcaacagagcgcgccagggagcagcgcccgtcgggagccatgatgcctgagccatcgaggccgccgccgggccaggtcgaggccgccgccgcccggccaggtcgaggccgctgcctcaacagagcgcgccagggagcagcgcccgtcgggagccatgacgcctgagccatcgaggccgccgccgggccgggtcgaggccgccgcctcaacagagcgcgccagggagcagcgcccgtcgggagccatgacgcctgagccatcgaggccgccgcggggccgggtcgaggccgccgcctcaacagagcacgccagggagcagcgccggtcgggagccatgacgcctgagccatcgaggccgccgccgggccgggtcgaggccgccgcctcaacagagcgcgccagggagcagcgcccgtcgggagccatgatgcctgagccatcgaggccgccgccgggccaggtcgaggccgccgccgcccggccaggtcgaggccgctgcctcaacagagcgcgccagggagcagcgcccgtcgggaaccatgatgcctgagccatcgaggccgccgccgggccaggtcgaggccgccgccgcccggccaggtcgaggccgctgcctcaacagagcgcgccagggagcagcgcccgtcgggagccatgacgcctgagccatcgcggccgccgccgggccgggtcgaggccgccgcctcaacagagcgcgtcagggagcagcgcccgtcgggagccatgatgcctgagccatcgaggccgcctccgggccaggtcgaggccgccgccgcccggccaggtcgaggccgctgcctcaacagagcgcgccagggagcagcgccggtcgggaggcatgacgcctgagccatcgaggccgccgccgggccgggtcgaggccgccgcctcaacagagcgcgccagggagcagcgcccgtcaggagccatgacgcctgagccatcgaggccgccgccgggccaggtccaggccgccgccgcccagccaggtcgaggccgccgcctcaacagagcgtgccagggagcagcgcccgtcgggagccatgacgcctgagccatcgaggccgccgccgggccaggtcgaggccgccgcctcaacagagcgcgccagggagcagcgcccgtcgggagccatgacgcctgagccatcgaggccgccaccgggccgggtcgaggcctccgcctcaacagagcgcgccagggagcagcgcccgtcgggagccatgacgcctgagccatcgcggccgcggccgggccgggtcgaggccgccgcctcaacagagcgcgccagggagcagcgcccgtcgggaggcatgacgcctgagccatcgaggccgccgccgggccgggtcgaggccgccgcctcaacagagcgcgccagggagcagcgcccgtcgggagccatgacgcctgagccatcgaggccgccgccgggccgggtcgaggccgccgcctcaacagagcgcgccagggagcagcgccggtcgggagccatgacgcctgagccatcgaggccgccgccgggccaggtcgaggcctccgccgcccggccaggtcgaggccgtcggtctcttcgagatccactcacctttcgaggcgacggggcggagccctgcacggaggcgacgtaccgctccccgtaggccttgctgcaactcatcgcgccaccaacctggctcccgagacgcgtgaaaccagcgctcagccccgcagcagtcgccaattccaacaggaaagcgcctgaaagccactgactccgcgtagccggcggaggaccactgtgacgaacttgtgtcctgcgtcaacagtgtgtggaacgttggcgacctcggcgctcgagctgcactccgctgggctcttggcagcaccctgtgctctgagggtgtcttgcccgccgggcgccgtggctcacgcctgtaatcccaacactttgggaggctgaggcgggcggatcacttgaggtcaagagttcaagaccagcctggccaacatggtgaaagcccatctctactaaaaatacaaaaattagccaggtgtggtggcg

SEQ ID NO: 24220 - DNA, 2300 bp, Homo sapien
ggtgtgagccaccgcacccagcctggtgtgcatcagcattttggactttggagtttatgtaaccaaggagccaggctgtggaccttgtttattacttgaagaattcaatatttatttctgcctttttgactccttgactgtaaaatactgatctgatctgtagagagaacagtacatgtactattgaggcacagggaatcctcagtgccttaatagatcctaagtacttagttattctttcccatagaggcttacacatggtaggagaagagatttctggaatacctttcctccccaaagaaagctggtttcttttgtttgttaagtgagagagtggtaccacagggtttccaagatttccaaggctgatgaaaattcttaacttctgttgtctgcttgtcttgctttcttgaatttattttttgtatgttatgtatttattatttagagagaggatctccctgtgtcacccaggctggagtgcagtgtcacagtcataactcacggcagtgtcaacctcctgggctcaagtgattctccttccttggcctcctgagtagctaggaacacaggcatgctccactatgcctggctatttttttccccctggagacaggatcttgttgtgttgcacaggctggtttcaaactcttggcctcaaagctagcctcccaccttggtctctgaaagtgctagaattaaatagaattaaagttgtgaccaactgcacccagcttatttatgatgatgatgatgatgatgtttgggagatggagtctctgtcgcccaggctggagtgcaatggcacaatctcagctgactgcaacctctggctcactgcaacctccacctcctgggttcaactgattctcgtgccttagcctcccgagtagctgggattacaggcacccgccatcatgcctggctaatttttctatttttgtagagacggagtttcaccatgttataacgccaggctggtctcaaactcctgacctcaggtgatccacccacttcggcctcccaaagtgctgggattacaggcatgagccgctgcacccagctctattttttgttttgtgataggaaattataaaacatggaattatgcatttgtcaggctttaaaaaaaatttttaagtgaatgaaaatggcatatttgaacataaacttagggcagatttttactacttttgaaaaaatgttggaaaatatttctgtatgaaatgtaaaacaacttttaattttttttagaagtcaacgagaggattctattttgcaaagctgtattatgaagctaaagaatatgatcttgctaaaaagtaagtacaaactgtaacatgtattctttttttaaaatcaatgccttttctcattttcttctttgaaataggtaaaaatatatccttagtagttcttcctaagtgtattctggaataagggatttatcactcagactgatgctaaggaccagcctagattccattgagattgaaactgtaattagtgttttctgcatgctgctgctttataccaagggcaagaaattgtttggcttaaaacgactttttctaaaaattgtcttctgttgaagtaaaagaggaccatgcctatatcttaatttgtttttggttagatatctgataccttaatcagatggaaaatagcaatgaataaaaaattaaactgtaattgtaaggcaggagaatagcttgtataaaagatctttaattgacacaatatgtgatgctctaaggctctatcctagggataagaagcttggtgattctgatttcctgactgggagtggattaaagcaggaaattaagagggaggcaggctttttttttttttttttttaggcagtatctgtctctcttgctcaggcaggagtgcagcagctggctccatctttgctcactgtaacctctgccttctgggctcaagagatctttacacctcagcgccccaagtagctggggatacagatgcgcaccaccacgtggacctggctaaggtttgcattttttggtagagacaggtgtcactatgttgcccaggctagtcttgaacttctgagcgcagcagtctgcctgcctcggcctcccatagtgttgagactacaggtgtgtgttactgctcccagctgggaggcaggcttttaaaggcatccaaaggaagatggaaatgctggtaagaaaggaaaatggtggtacataaattatgtaactagcagcactgtgactgttaactcttgtacctttttaccgtgagactttaatcccttagtttaggtctgg

SEQ ID NO: 24221 - DNA, 2300 bp, Homo sapien
ttccctaagtccgtgcatgataacatattctcaggagagtggaggaagaggtacacattaaagtaccaatattaaagacaaaagagaaatgggtgtctgggaaattacaccttggcacagaaattcacatgcagcttcatccttagatcagacacggagcgcaaaggactcagcaaatgaggaaatgtctccccagaactagactcaattcatcagcagttgtcattttcaactggtgtttcttgtcatggaggacagccgctctgccaggcaagaatttggccactgtcaaggtcattgtccattctcagatctggcactgagtccatagtctggcaagcctggcttgtcaaagtggattaggtgggctctgggaggtgtgctttggctgcactcccaattctcataccgaaaggctggtgatgttctctgaggacggctgcctcttcagtctctctttggatctgagtcaagctccctgaccttaggcctgtgcactatttcagacactgcaattgcccatgcctgccctgctacagcaataagctgtgtgtcatcatcatcattagtatattctggcaggaaatacatcagttaacctgaggctaaggcccagaatcagaaaatgagttatagaagacaaaaacaatgaatgaatggatggatgaatgaatgaatgaacctcttttaaaacacatgggtaattatatgaaatcccatctctgtttcgctctgtcagttccttaaaattgcttaaattaataaaatgtgtatgtaaaaatggggttatattaaaaggcaacctaagtcttttccagaaaatcaatgaactagtcatattacccaggggaaataactatctttgcaggccttttggcccgtcttaatttctgtttgaactccctaggctttctcacctcaaaagaggtagttggatgcagttattgtttatacagagaagaaagaaaaggggtagtaacataaatttggaagttaatttcaaaatccagtgtaagaaaaggggagatggtctgattggcctagagaggtgaacagtagttcagaggcactcttatttattctatcccttattagacttgtgtatttcactgttaaatacactctcatggtggaatgcggaaagaagtgagaaagtggccagagtgcttgtagctttgtggcttgtgactcttctatcttattctctcccacccttctctcttcctccattcacattcacacaggtatctgcatctatccatgtacacctagatgtagaaatacatctatagatacatatttatatgtgtaatatataaataatctataaaaataggtaggtatatggatatattgtaaactaacacagcaaatttttgtaagctggaataggatattcagcaggccagctgcccaaagggctctaccaggaaagccatcttgtctgacttctgtgataacctcattgttaatctggaccacgcctagtgtccttcatggtagccctacttttaagtggcaggggtatgaatgtaaaaaggactttctaaaccttcctgaaatgtctccttcagggagcccatcaccagggacgccaggaacagcttccaacagggcccaggggaggccgcgggagaggaccccttccctctcagagagactcgtcaggaaacaattccagactctgacctgggaagaaaagaacaggacacttctctcctctaggcttccagctgctgcttctgaaaatataatcctctgagaccctccccattcccagcttccaaccagagggatgagaagttcgactgggaatcaccctaaggaatctccgcccagttttctggaggaggagatgggagtagcaggtacttgtctcaggatggggataccatggctggcagcgcggaccagagcccagcctgccccccagctccttgggccccgtttccttcgcatcccgcacacccaccctcctcgcgagggcagcgtccctagcacacgccctagcaccactctcctctgacgtccgcctccggatgtctgacgatcgcccccgcctgccgcccttataaaggggacttttcccaatactcgatcgattcccacctcgccctgcgccgcgcgccctccgccggcgccaacacctgtcaactctgcgcgctcccaggttcttggagacgccgagtgaggagccgccctgaccgcccggccccgctccgcactgcaccccgacccaccccgcaccctccctttctgcaccctcgcacccacacccctcgcggttccagggggcggcg

SEQ ID NO: 24222 - DNA, 2300 bp, Homo sapien
agtagagggcattcctcaactattttctgtctttggctcctgaatcctggcacccatttaaatgtgccacccatgactgcagacatgaccctataagtcatggccccagaggaactaaacttttgggccttagtcatactgtccacaggcagtcttagtcttctgccttttatttccctttgacctcctagacttgtgtggcctgcgtgccttccaaaaaaaaaatgaatttcaagaaaaatcacataattgggcaaggcccctttaagggagggagcatgctagattgaactctatatcctgctatgatggcctatgctaaagcatttacccatagaaaaagggttctggttaacttccagacttagaatccctttactaattaagcactgtctgaataggagacagaataggtgccttaaaggaacacgggaattgaatggccattttctggccaatgggacaatcaaggagtagctaggaagcagggtaacacggttgtagtagctaggaagcagggtaacaagaccctaggctgcacacaacgcggggaccctgggcctagtccacaaaaccattttttcctcccaggcttccgggcctgtgataggagaggctgccatgaagactcctgacaagccctggagacatttttctcattgtcttggagattaacaatcagctcctcattacttatgcaaatttctgcagctggcttgaatttcttccccaaaaatgagattttcttttctattgcattgtcaggctgcaaattttccaaacttttatgctctgcttctcttataaaactgaatgcctttaacagcacccaagtcacctctggaattatttgatgctcagaaatttattccaccagatacaataaatcatctctctcaagttcaaagttccatagatttttagggcaggggcaaaaatgtcaccattctctttgctaaaacatagcaagagtgacctttacttcagttcccaacaagattctcatctccatctgagaccacagtagcctggatttcattgtccatatcattattggcatttttgtcaaggccattcaacaagtctctagaaagttccaaactttcccacattttcctgtcttcttctgttccaatctctgcctgttacccagttccaaagtcaattttacattttcaggtatctgcagtagcaccccactctgctagtacaaatttattgtattagtcccttttcatgctgttaataaagacatacctgagactgggcaatttaaaaaataacgaggtttaacagacttaaagttccacgtatctggggaagcctcacagtcatggtggaaggcaatgaatggcagcaggcaaaggaaaagagagcttgtgcaggggaactcccccttataatgggtggggacacaggcgaaccatatcagaccccaactaaattccaagtttccagagttagtagacatgagagttttcaggtacatgggtacaagagagttttttctgctgtaacccatgactgatatttcaaaaattattccatgaatgaaaaaaaaactacatgaaattatgttttttgaagattttctctgtgaaaactattcaagaaaattgagtatagaatgctccttaaaaccattgttttgaattttcttcaatgtaattgtctcgcttctaattatacaaaataatatcttgaagacaatgaagcaatatatgacacataacccattatattcccgattaacaagtaatatggttgttaggtcatgcagcaggaaaaagactatttgggtataaatctcagccccaacaggtattgattattttacttttatcaaattatttaaacttataatgacttaagtttccacatgtagaaaacagaaaaaactattacctattttatgtggttgctatgaagattaaataattaatgtacatagagtaagttgttagcatgttatatgttagctttcacttattttatgctattctaatcaaaggcagtaagatgataacccatactatgaaccataaaacaacatttttaaaaattttaattagtattgatcttacccatcccagattcccaatggcgaagattgagaaaaacgctcccacgatggaaaaaaagccagaactgtttaacatcatggaagtagatggagtccctacgttgatattatcaaaagaatggtgggaaaaagtatgtaatttccaagccaagcctgatgatcttattctggcaacttacccaaagtcaggtaagggtagcaaaacataaaaatattc

SEQ ID NO: 24223 - DNA, 2300 bp, Homo sapien
gctggagatggtggtaggaggaattaggcatgactattaataaatatggggtttcattttggggtgatgaaaatattccaaaattgagtgtgatgatggttgcacaactaaaaacattgaactgtacacttgggtgaagtgcacagtatgtgaatttgatctcaataaaacttatttttaaaaaagcatatggtagttcacagagagattgcttccagctataacctaaggaaaggcttcaaggaaaagatgggttcaaagctgaagaatctgactctatggaaacagagtaagaacatttttttagagatgggatctcactatgttgcccaggctggactcaagtaactgggattacaggtgcacagcagtgtgccaggctaagagtaagagcatttttggcagggagaaacaggagtaaaccagggaggcaggaaattataggatgcatacaggggacagtaagtcattcagttcacctggtgtgtggggcccatggtggggatggtgttatattaaagaaggccttgagccaggcattcaggaggcttgaagtaggaggatcacttgagctcaggaggtcaaggctgcagtgagctatgatcatgcctcttcactccagcctgggcaaaagagtgagaccctgtcttataaaaaataagaattaatgaatttagaaggtcttgaattccaagtggaagcacccagaatttgagccataaacaaccaaaggatagcctgatctgagctgagcttaatttatatgctgaaagtatgagagactagtagggaagagaccagaaataaggagactgctagaagattgtgcaacatcccagttcatcctccacaaatgtggaggaagcagatactagcagtggttactaactgtaaattctgggattgtagagactgtgacccatgcagacagcaaaggcagggagatgcagcatgcagcgcagcatggcaccgatactggcagacactttagtagacttagggactttaactgcagagaaaatgtgaggttgcactaagaactgtgaatcagccctatggggctgaaaattgacagcactgggataagtggaactggaaagagagcagaagtagaaaaataaagttcagccgggcgcagtggcttatgcctgtaatcccagcactttgggaggtcaaggcgggcagatcacctgggagcaggagttggagactagcctggccaacatggtgagaccccgtctctactaaaaataccaaaaaaaaattagctgggcatggtggcgcacgcctgtagtcccagctactcaggaggctgagacaggagaatcgcttgaacccgggaggcggaggttgcagtgagccaagattgcaccattgcactccagcctgggcaacaggagtgaaacaccatctcaaaaaaaaaaaaaaaaagaaaaaagaaagaaaaagaaagttcaatttattgggaaaaaaagagccctttggaaacaaggaggaagaagaagtgtcggcaaagaagcattaggaggttcagggtcaaagaagacaaggaaagctttggcaagaagggcagatggggtgcagaattatgcttcaattccagaaaggaaagcactggggtagatacaaggttggggctggcagaagagtagcagttcagagatcattaacacttgatccatttaatttcccaggtaaccaaagacaccatggaatataatctgcctccactaaagtgtaccttttgtacaataaggcaaagaaaaaataagtacacacctaagctctagacttttgttctatcctctctgcattttcggtgtggatgaatacaacttgggaagaaaggaaagaagaaccagcagttttaagcacttactatttgctctgcaaagtgtattcatcaacattgttgctttcaatcttaaagcatggattggagacaggcagtattacccacacttcatagatgcagaaattaaatctcaggctaaggaggaaggaaaagggagttcaccaaataagcaggagcctacctgaagcctgatgcatctggtcctagagccaaccttccatttccccccagcccccacctgtttaagcttcgaggccagtgggaggagggaggggccaggcagctgagggccaggaaagatgtgaaaaactctagctggtgaccgagaggaggagtagagtgtgcccttagttcatatgaactagagggagttggtatttgcacagcagtcagggtcacatgagtgatcatggtacagtgagaagttctccctcccagggccagg

SEQ ID NO: 24224 - DNA, 2300 bp, Homo sapien
gtggaggttgcagtgagccgagatcgtgccattgcactccagcctgggcaaaaagagtgaaactccatctcaaaaaaaaataaaaaataaaaaataaataaaaatctaaacttacctaaaataaataaatcaatagacttactattttggcaaacactccctctcctccttctgctggagactccaggtggcaggtcttctctgaagtctcaaagcccctgcaagggctctcaggagcagcggtagtgactgcagctgaggctgcgagatgactgagagtgggatgccacggtggctattgtgagcttggtagaattccctccatctgaccaactgaggcaatgtttctctgatggcctttataatggtttgtttgaaatgtgtggttaatgccaatgcccagcatgccagatgacacattctagaaagtaaatgaacagtagtatgagctctaaaatcccttcaacatgactgagggaagcacccttgcttgggttgagtcaatctaaatgctgagagaaatcctggcagaggtggtccctggaaaaacctgcctctccaacacagtgacagggcccatttgttcagtggcccattgttcagcagccactcacttcaaactgagtggaacttactgcgccgataaggcacacacctggctgagccagcagctgagtgacataaataaggggctgccagtcctcccacactaccagggagccagaatctcagaattagaaaaagcacttagagatcattcggacaggtggtcaggtagctcttttgatgtcattaactgaagtgtcattgtctatgtatggagaaactggaagtttctactaaggttaaatataccaataatccagcaattcaaatcatagtcatacacccaagagaacaagagagaatgcatctatcccccaccccaagaaaaaagtgtgaaaatatcatagaagctctattcatattcataatcaccaaaaactggtatcaacctatatgtccatcaaaagaagaatcgattaaaaaattctggtatattcattcaatgatacagtatatagcaatagaaataaatgaactactgatagttgctgctaatacttgatgaatttcaaatacattatgttgaaagaacaaagccagacacaaaggagtacataatgtatgattccattaatatgaggtttaagaataggcaaaactaaactatggtgacaaaagtcagaacagcctctgcgttgagtgtggggcactggtgcagcattgactgggaaggagcatgaggaaattgtccgaagcaatgggaatgtcctatatcttgatctagatggtagttatgtgggtgcatatagaagtataaattcatcaagacataaacttacactttatgcatttgtctgcatgtaaactgtgcttcaatataaaaaaaaaactcattgtagtaatagtcctcaaatattgcagtctaacctctcacagaacagaaacagacctgagatttaggtaactttctaagtcagtcttggaagttgagatggaattcccagctggactgtcccagctgacaacatgtgcacctaacatgggcacctagcatgtgatatgtcaatagaagcgtgggtctccctgggtctggggaaggtgtttctccaaatctccatggataaccaaacccagaagggagaatcactttcctttctgtagggagagtaactccaggtgaagagaaggaagagggaagggaattcctggaggcttgctccaggcattccttcaatattttctctcaattccccatctccatgggcatccacaggaccaggaagtgacctcctggacttgggcaggcccctagactggtgccccactgctgttcttcctcctggcactatggaggtgcagccctgccagaatctcacgagtagaaagagtaaggcctattctggcacaatgcttaagattttgttccagttctacccaggagccatgcaaattgtgtctttgtttgcctgaacatatttacctgtaatgaatgaccagagctctgtgtccaaagcactgaatacataaaacccgtgtgaatctcaactttcatttactttttactttcccctgctggtgcccaagaccaccgtggaaggaatggctaaaggataaggtggaggagacaagtgagttagaatggggcttgttacccccagaagaattttcccaagtgaatggaatcattcttcaaaagaaaatgtgcgatttctgggataagatctggaacttccaagccaagcctgatgacctgc

SEQ ID NO: 24225 - DNA, 2300 bp, Homo sapien
atttgaggcctgaacaagttagtagtttgcaaaaaggacatctaaagcgcgttaagagttggaatctcctctccatgctcagaagcaaacagtgacagagttgaaagggaggttcagggaagaattagagggggagagtatattagctttatcttgggtacccaatatatcccaagattataggataccttatttacatccaacattacattaaccctgtgagattaataaaaaacgaaaggctcagaagagataagtattagaaaagttacacagctattagggggcagtttaaattcaaacccatatatttagaattccaaagcaatgcttgtcaaatatagacttagcaccaactttattcttataatcactaaatatatttatttaattctcctaacctcatgagaaagtactattgagtaaaaacattaagtgagaataagagcagtgtttgtagtcaagatcacttttcaaattatttggaacttcccatcttccctggatctattttcaatcccagtcagtcatctttgggtccagaagcatatcctcccccatctcccagccctccccctctagcacacaacgcactggagaaaactgctaaggcattgctgaatatctaccactctactctgatggcacacagggccaaaaagattatagaataaaatctaactgaaaaattataggtgatttttataagtctgtttaaatgcatatgcatcccaggcattccacctggcagtctctgtctcaagggcccatccacctcaccatggtctggagggaggggatgaggaatagggaaagccaaagaattgatcttttctgagtttgcatccagaacatgggccacagagaaatggtgaacaaagtcacccattattattaacagctatgatttattcaacatttccctgttgccaagcattaaataagctgttttatctccccacaaccatgaggtagataatgttaagatccccaattcagacctgaggaaaagcgtgatatgaaacagagaaagattctgtaacctgccattgcccacagctactgggacttggcacagggttcaaatacaggcagcctgacttctctctgaaggatgtcaagccacagccaccatactcacctagtccccacataatgatggcccaaggaactcgcttcctcaatttttgcttagttttactcattcattctttcgagaaatagaagaatgccagacactaggcatacagctatcaaacagtgagaaaacaacaggccccatttcatgtgccttagagtgtagtgaaggagacagaaaatgccaacaagtaaacacgcaaaaactaactgtcaatggttgctctaaaggaacacaaagtgccatgagcaaggaaataggagggacctacttgagatgacatagaaagtcaaagaaggcttctccagaaagggggcatcaaagctgggacacgaagaaagagaatcagacagccagacacacaagagccgacaagatctccagaaggagtgctgccatggggagcaagtgtggcatggccctggggtgcaggccaggccgggggcagggactgaagcaagttgtgaaatttctgattatcaggggcagaatggattcctaaggcagccactgtcttctgttaactctggagttttctgcatcccttttgctttaaatgaggcatacatgttttcatagctgtgatgaaacccctacaattctccagtttagcattatttattttactcttaaaaaataacaaagctgaccctggcagatgtttgtactgggagattcagatccatccaggcccccactgttaatagcccacgggaaagtccctgcagtctctcagggaagtcattctgtgtagaatctgtaatttcacaggcaagtcctgcaactttttaattgtttaaaattcccagaaggaataattactgaaattatctatgaagggtttaatggacacagacatgagagctataaacaatgtgatactatgtcctgttaactcacagagaacggaagggctggaacgggacccagccagcagggtttgtgaccgcctctgctgtgacgtcacagcctggtgaggagggggctgcagttcctcaggaaactgccagtggacaaattcataaacaagagctccagttccctggaacctgagtcgggagacctgcagctcactttctccctgtttgctggccagcagggtttgtggccgcctctgctgtgacgccacagcctggtgaggagggggctgcagttcctcagg

SEQ ID NO: 24226 - DNA, 2300 bp, Homo sapien
ggtcaggagttcaagaccagcctggccaagatggtgaaaccttgtctctactaaaaatacaaaaattatccagatgtggtggcacttgcctgtagtccccgctactcgggaggctgaggcgggagaatcacttgaacccaagaggcagaggttgcagtgagccaagatcatgccactgcactccagcctggatgacaaagcaagacctgtctgaaaaaaaaaaaaaaaaaaaaaggagaagaaagaaaaaaaaatacaatgtaaatgtagtttttccatgcttaccttaagagttataatcaaagcactgaagagccaaggattgatttttctgaaataaaacttgctagcgaactaacaaaaaaagatcaggtgtctctccggaccatccctaagcaacaggtgccttttaatgtggctcttcaggagataatggcatgttggcaccattccaaactggtaaagaagctatttttacttaggcaagaccctgcaacttgctcaaattatattatgtttcagtagtgctggttaacatacagcagtctccatctactatacaatgtgaccagcacagcacatattattgacattgttattaacattgttcctattttctatttccataaatgattcaaggtgatttttattttcttttcggaattttcctatattttccaggtgttctacaatgaacctgtgttacttttacaattggaaagaaacatattcgttaaacaggtcatagttctgctcattaaggtaatatacatctttaaaatgtgaacttatctgcagtccagagaatgtgaaatataaagcagatctttcctataggtttatgaatatcagaagatctcagagtactcacaatcaattcataaatattcattctttaaagtatgaaagatgataaatatatttagaagatttcagcacttactataactagtgaaggaagaaataaatgatttcttccttaagaggaacaacaacagaaggtatccgatggtcaagaacattatacctgcctccatcatctcagaaaataaaattcctgtccaatgacaaccaggaaggcagatgggggtgagctcgagctgtgtgaggaggccgctgatgacctggagcttaggggtgtgctgaccctcatctccctggggattcccaggagacgctgccctacctgtagctgcaactcatggaccctgttacccagccaagtgcaatggagggctggcgagggaagaaagatcaaaggaagaaaagaaaggttcttttttatttcaagtatgagaaaaagagagttctactgtgagaacatcaactcttctgtagctattgatgtagccaaactcctggaatgtaactatatctaacagtgtttctctgagaaacttttacaggattggaatgtgtgtagtatctagttaacctgctattttattgcaagtgattttttcaagttattaattgaaataggagtctaccgtaagttgctcttaacttggggaactactttgaatggcattaatctggaccattaataacaatgtatacttggggattgtgtgtgtgtgtgtgtatacatgtgtgtgcatatatgtgtgtacacacacgtgcacacacacgtgcgcgcacacgtgcacacacacacgtgcacacacacacgtgtacacacacacgtgtacacacacacgtgtgttactgtacgtggagactgtacatcttaggtcacacaccacccctgaaccaatcctacaaacaccataggtgatacacactgtcaaagacaaagagtagatgtccacaatagctgttctttctcgtttataacacttcttttacctagtaataatcagctaccatttactcgatacatactgtgtgctgcctcttcaaccttttgaccatttaaactacaggaaactaggttatcttcaggttaccttagttatgggagtgtatggaaaacattaatgggaaggtgaaagcgcagcaaaccacttcagcagttaacagaaaggctctcagagcactggaccgccaatcaggacacagcagcagctctgggattcgaccacagattctctggcgtgcccttcgggaaagggtggcctcgggccccctactctacagagtctcctcccacggctgcccagttccctggccgactatcttgcctccaccacatcaccatcagtaccgggcggctgcagggcagagctgtccagggacctcctcacagcctccagagtcaagaaatgcctcctcagggaagccctctaccgcatccctga

SEQ ID NO: 24227 - DNA, 2300 bp, Homo sapien
atttccataaatgattcaaggtgatttttattttcttttcggaattttcctatattttccaggtgttctacaatgaacctgtgttacttttacaattggaaagaaacatattcgttaaacaggtcatagttctgctcattaaggtaatatacatctttaaaatgtgaacttatctgcagtccagagaatgtgaaatataaagcagatctttcctataggtttatgaatatcagaagatctcagagtactcacaatcaattcataaatattcattctttaaagtatgaaagatgataaatatatttagaagatttcagcacttactataactagtgaaggaagaaataaatgatttcttccttaagaggaacaacaacagaaggtatccgatggtcaagaacattatacctgcctccatcatctcagaaaataaaattcctgtccaatgacaaccaggaaggcagatgggggtgagctcgagctgtgtgaggaggccgctgatgacctggagcttaggggtgtgctgaccctcatctccctggggattcccaggagacgctgccctacctgtagctgcaactcatggaccctgttacccagccaagtgcaatggagggctggcgagggaagaaagatcaaaggaagaaaagaaaggttcttttttatttcaagtatgagaaaaagagagttctactgtgagaacatcaactcttctgtagctattgatgtagccaaactcctggaatgtaactatatctaacagtgtttctctgagaaacttttacaggattggaatgtgtgtagtatctagttaacctgctattttattgcaagtgattttttcaagttattaattgaaataggagtctaccgtaagttgctcttaacttggggaactactttgaatggcattaatctggaccattaataacaatgtatacttggggattgtgtgtgtgtgtgtgtatacatgtgtgtgcatatatgtgtgtacacacacgtgcacacacacgtgcgcgcacacgtgcacacacacacgtgcacacacacacgtgtacacacacacgtgtacacacacacgtgtgttactgtacgtggagactgtacatcttaggtcacacaccacccctgaaccaatcctacaaacaccataggtgatacacactgtcaaagacaaagagtagatgtccacaatagctgttctttctcgtttataacacttcttttacctagtaataatcagctaccatttactcgatacatactgtgtgctgcctcttcaaccttttgaccatttaaactacaggaaactaggttatcttcaggttaccttagttatgggagtgtatggaaaacattaatgggaaggtgaaagcgcagcaaaccacttcagcagttaacagaaaggctctcagagcactggaccgccaatcaggacacagcagcagctctgggattcgaccacagattctctggcgtgcccttcgggaaagggtggcctcgggccccctactctacagagtctcctcccacggctgcccagttccctggccgactatcttgcctccaccacatcaccatcagtaccgggcggctgcagggcagagctgtccagggacctcctcacagcctccagagtcaagaaatgcctcctcagggaagccctctaccgcatccctgacctgtgagtcacggagctcccgggcaccatgctggccacaaatgcctaaggagccccccggaaccagctgtgggtcccgcaggcactcgcaggctagcggacacctttggaggactgagagacctgtcctgcaatccaatgttcctcactctcacaagattttacagacgtggaaaccgaggcccgaggccccaaggggtaatcggcccgccttcccatgccaataaccggcagtggcgggacccacacctactccgtgacctgcaggcccaggggtcgagccccaggtagaacgtctagacggactccgcccttagcgccgtacggggaaccttctcccggacgcagacacggaagcggaagtgctgccgagctgtagctatggagacgtggggggcgggccgcccggagagcgcgacctttgacctgcagtagagcctacgtcagaggctggcgcaaacagaagtgcagcggtggcggcggctggttgcgggccggcggcgggctggcggagatggaggtaactcaggtcgggcccactgcctcccatcaagccttccgcgccgcgatttgggatgtgggagtgggcccgatgggagggcgcggtagtctccctctt

SEQ ID NO: 24228 - DNA, 2300 bp, Homo sapien
gcccgaggccccaaggggtaatcggcccgccttcccatgccaataaccggcagtggcgggacccacacctactccgtgacctgcaggcccaggggtcgagccccaggtagaacgtctagacggactccgcccttagcgccgtacggggaaccttctcccggacgcagacacggaagcggaagtgctgccgagctgtagctatggagacgtggggggcgggccgcccggagagcgcgacctttgacctgcagtagagcctacgtcagaggctggcgcaaacagaagtgcagcggtggcggcggctggttgcgggccggcggcgggctggcggagatggaggtaactcaggtcgggcccactgcctcccatcaagccttccgcgccgcgatttgggatgtgggagtgggcccgatgggagggcgcggtagtctccctcttggtgtcccgaagcccgcgctgctgtcgcctccccatctttcgtaaactctatccctgggggttacctgccccgtagagcccgtttgtgtacgaattgccacagcgaccgcctccgtccgccctcattctctgtctcacgaggctttccaccacttgattccatagaaggtttttccctgtaagggttctacgcgttccgtgtggaattaggaaaagagttcttctgacacctgggtttgattttgttttgcaggatcttgttcaagatggggtggcttcaccagctacccctgggaccgggaaatctaaggtgaagagaatacttgaatagcgggcttcctgaagagtggaagggtgatgaattggaaaactttggcatggggaaggggggggcgctgatttttttttttttaatagccttgctccaagggatctcaattttagtgtgcgcaatcgcccatttcctgtttctcccccgcccaccccgatatagaaagactttttgtttgcttcctgctcctggttagcactgctgggagatcctgctatttttcgaacataaagcagtctaagaaggtttatatagtggtgtagtggaaggagcagtgacatagggtaggaatcaagggattctgatctgtgggctccagtttctacattgccaaagagtttaattagtccagttttatggccctgtacaatgtttaacattcaatcattctaaatgatagtggtttattgctaaggtttattgtgtgcatgctaaatttctggcgcttgcctaaccactcagttccttcgtttaagcttcatgataaccatgagataggtactgttgttaccctccttttacagatgagaaacctgagaccacaggcttaagcaattttctcaagtggtaaagctcaattttttaattaaagcctgaatgttacccggttcatcttgctgctgtaattatgcgtaaattttcttgtgaccaaagacttgcagccttgaatagaatgaaataattttacagctccaaggaattttaagtagcattagctccaacctactgattttacaattaaatcaaaagctagcaatgtcaacctgtaacattagctataagaggatatggcctggtttttacgtttcatagtagttgcataactaatttttagtagttgcatagcaattacagaattgacgttgcatttgctgattttaaaaaatgtggccgggcgcggtgggtcacgcctgtaatcccaacactttgggaggccgaggcgggcagatcacctgcggtcaggagtttgagaccagcctggccaacatggtgaaaccccgtctctactaaaaatacaaaaattagccggacgtggtagcgggcgcctatgatcccagctatttgggaggctgagacaggagaattgcttgaacttgggaggcagaggttacaagtgagccaagatcgtgtcatgcactccggcctgggcaatagagcgagactctgtctcaaaaaaaaaatgtggaacaaagtatgcggttggcataaagatttattctgtagaatgtttttgttttctagcagacattgtttcttttttgtggtatactagaaacatgagttataacaagttggtaacatgaccacatctttcagctggaaacattgcccaaagaagacctcatcaagtttgccaagaaacagatgatgctaatacagaaagctaaatcaaggtgtacaggtattgggttgaaaatactcatcttgatcacagtctctttaatcgtggtttaaaatggtagtttttaaaataatgcattggcttgtttttgtttgttttccagtgattccaagtacaccttagtgtagt

SEQ ID NO: 24229 - DNA, 2300 bp, Homo sapien
agccaggcatgctgacgtgcactcgtaaaccctgctattcaaaaggatagttgaagtccaagagttcaagaccagtgtgggtaacatagagaggcctcctctaggggaggaaaaaagggtttccctatatcctcatcaaaacaatatatagtcaaacttttcatctttgcatttgtgaaaaattgtattttatttttgttttatgatactttaagaaatcatttgtatttttctgtagaaacctgtttttctctgagttgaacatttttgtactgatttttttaataattagaacttttttaataatttagaactttttgtcatacattttacaaatatttttcttggttggggtttgttatatttatttgctatgcagaaaatttagatttctatgtagttacatttatcaatttttatttatttatttagagacagagtcttgctctgtcgcccaggctggactgcaatggcgcgatctcggctcactgcaacctctgtctcccaggttcaagtaattctcctgcctcagcctcccaagtagctgggattacaggaaccccgccaccacaaccggtgaaatttttgtatttttattagagacggggtttcaccatgttggtcaggctggtctcaaactcctgacctcaggtgatccactcacctcagcctctccaagtgctgggattacacgcgtgagtcaccgtgcccggcctacatttatcaatttttaattttatggtttatatgctctttgaaaagtctctcaccactccaaccttacttttgtttttttcccttgttttcttctggtattttcataacctctctctttttttttttttttttttttgttttttgaacatttaactatttgctttgtttggaatttactttcatgtgaggacatcaaatagatccagtgttttcctccgacatgcctcgactggcaggagaccaaagttttcattctattactagagagtagctatagttacagaatcaggtatcctgagagagatcatttatgcccaggatgaataacttgtcttatctattaaatctattaaatcctttggagatttcacttttttttttttttttttttgggacggagcctgttacctaggctggagtgcagtggcgcgatctcccagctcaccacaagctccgcctcccaagttcaagcgattctcctgcctcagcctctcgagtagctgggattacaggcatgtgccaccaccacgcccggctaattttgtatttttagtagagacggggtttctccatgttggtcaggctggtctcgaactcctgacctcaggtgatccgcctgcctcagcctcccaaagtgctgggattacaggcgtgagccactgcgccggccccaaaatttcaggttttgatagacggaatgggtgaagaaaatgagagctagcaaggaagaacaggatgcagaggcaagactggaaactctccaagaaaggttaacttttcttaactcacaagttaaacaaaggctgcaggctccatgcggagctcaggcacccagcggtgaccgatccagaccaggtcctcccggaagcccggcctgcccgacagagccttaccacagagccccctcaggcgtcctcgccaggacggggcggaaccctgtgtagctcccacccccgggacgaaggccgctgccagggccgcgcagccacgcgagtggaatcagaggagcctcgaggcaaggagagccgggccccgctccctgcgcccgtcaccgccatccttgttgtagggaactcggcccccgagccgccgccgcgctccgtgggctcccaatgagcccctaccccagccacccgctgcgtttgcgccagcctcccagactagcctggggtgctgaaatgggggcgggcccgagccacgggttggggcggggtctgatgcgcgccccgccccgcaacgccccgcccccccgcgcctacctctccagtccgcgcccttcggcgcccgccccgccagtccccgcccctccttgcccagccgctcccgcccctcccccgccttcccgcgcggcccgcctcgccttcccccccctcccgcgcccccgcgcggccggcccctggccttcctccccttcctgctccgggcccgccagtagccggccgcggcggcgagggactaggacgcggctggagcggcgccgggagacgaggggctgagagacggcggcggccgaaagcggagagatgctgggcgtggcggccgggatgacccacaggtacgggccgcaccgcgcggcccccgcc

SEQ ID NO: 24230 - DNA, 2300 bp, Homo sapien
gagaattattgtttaataggtacagagtttcagttttgtaagataaagatttctggacatgtatgatggttacggatgcacaataatttgaatgaacttattactctccctccaaaaagtaaattactaatggtaaattcaggatgggaaggggataggatgcggagagacactggaccagagaggtttgaaggtcttaaaaggaaactattatctcctttattacactacatatccgttattcttaatatctcacaaatactttaaattttatatcaacttactagtcaatacttttttttaaggaaaaaagtccatgatgaaggagtacaaattattgttatcaaatcttgagctttgactcttttttgttacttgtgaccaaatggcaggcgtgcacttctgtaatagagcgatgagctgaattaacttgcttgtgtcatgaaataccatttttacgggaaagaacaactgacaaactagggttatttaaacctgtattgccggacacttccttgaaactgaacaaagtgagtctgtcactttgaggaaaacaattgacaatattttgctcccaatgataaaaagcaagctttcaaccgaaaatgagaattttggaaaacttgtaaacaccaccttgtatctgacggcttttaacataaagactttcctaatgaaatcaatagcgatggtaacgaatgttattcggcgctattaatgaaatgcgtcagcttgagatctgccaaactcagtgagccaatatcttccaaacgacaaatatatggtgttacaatgggtaacagctgcattcaaactgcaagacagaccaaggaattttaacgtaactgtgtgcaaaggccactgacaggagctttagctgcattcaaactgcaagacagaccaaggaattttaacgaaactgtgtgaaaagtccgctgacagtagcttcagattccacgtccaaaccagcctttgagaaacttccacttacgtagttttggtgtagtaataaagaatacccataattatctgaaacagctattaagacagtactcacttttccaactacacatctgtgtaagatcagattttcttcatataaaaacataccgcaacagactgaactgcaaaggagatgggagaacgtagttgtctctactaagtcagacaactcaagagattcgcaaactgtaaaggacgccagtcgtcccacgaactcttttgttttagcaaaaccctatgttgcataaaaatgtggtatgtacgttaacataccacggatttattcaatgagttaatagtaacttcagtgtctcggttttcctttctagtacagtctatggagatagccaccattccaggtcctctagtcccaagaggggtcctgagaccaagacgtctgcgacccgctgatccctactgctagaagataaatgattagctcggcaaatactgatttgtcttatggaactctcggagcagcggggcggcgtcagcgcctgtgccaccgcggacacccgggagtgaacagcagccgtctcctccgcgggcccggacgcagccacgccgccacccgagcgctgggggtcggggctccggccgaccgggggaggccgcggggaaagcccggccgcccgcccgcgccaggcccggcccggcccggcccgaaggcccgccgggagctgcggggcggacgtggcgggggccgcgcggtgcggcccgtacctgtgggtcatcccggccgccacgcccagcatctctccgctttcggccgccgccgtctctcagcccctcgtctcccggcgccgctccagccgcgtcctagtccctcgccgccgcggccggctactggcgggcccggagcaggaaggggaggaaggccaggggccggccgcgcgggggcgcgggaggggggggaaggcgaggcgggccgcgcgggaaggcgggggaggggcgggagcggctgggcaaggaggggcggggactggcggggcgggcgccgaagggcgcggactggagaggtaggcgcgggggggcggggcgttgcggggcggggcgcgcatcagaccccgccccaacccgtggctcgggcccgcccccatttcagcaccccaggctagtctgggaggctggcgcaaacgcagcgggtggctggggtaggggctcattgggagcccacggagcgcggcggcggctcgggggccgagttccctacaacaaggatggcggtgacgggcgcagggagcggggcccggctctccttgcctcgaggctcctctgattccactcgcgtggctgcg

SEQ ID NO: 24231 - DNA, 2300 bp, Homo sapien
aaaaacaaacaaaaaaagaaaatggtgtctgaaaagagagagctgtgatggtagctggagagtgactcaagatagactcattttaacgtagcagaaactggagcctatttacaaactcttcgggggaaagagcccaaaaagaaggaaagtggctgtctggatgtgagtttatggactgacatcaaacagaccttgttgggactgaaggcctgaagagtaagcatataggtgggaggtagttgaaagagaactttccagataaactgttttcttcatgaataagtaataaagtaatatctgctgagagaagaaagggatgaggtcgattacgagaagaccttcaagcatggtacgtccttatgcgagtggcgcatggcttcaagaggagggttgatgggacccatccatgagtagagaagttaacaacaatgccagtctgcccaggatgttctgctgggactcagaaaaacatccagtttccttcctttagattttaactgcagcatcacgagctgccttcctagagggaattttgtattttggggctgtagctcagaagacttccattctcttttccctctcccaagagagatcgcagctgcttcccggggtttatgtccatgacataggactgtccctgctgggaatgggggagggaactgcttcccactcgaaagcagccttttcacttccagcttccatctgccttccactcccacctcccaaaataaagtaaataaatcaaagccagaaaaacattctggctggaattttattacattcagtattgtgtgagagctcccaaactagctgggaccgttggatttcagagtacgtgaaggtgaagcctgtgaggttcccccaggagtgctgggcagaaccctgagttttagaactccctctgcctttagcttgtcttggatgtgcttttccactctttcaagcactaaacccttccctgtaaatagtcacctgccagggtgccctcaggttatagcttgtcaccagctctaagagtggctagtacccagtctcagtgttggataacaagcaaaagtgatgagttgttttcttggggtttgtgtgtgtgtgtgtgtgtgtgtgtgtgtgtgtgtgtgtgtgtgtgtgtgtttggtttgttgtggtggtatgtttttgtttttgttttttcagagacatggtctccctatgttgcctagtctgggcctgaactcctgggctcaagtgatctcctatgtcggcctcccagagcactgagattacaggcaagtgtaagccactgcacctggccgttttcttgtttttaaagattaacctcaggccctagttatgttaccatcctagaaatgcagttatcctaaaaatgattcctctataataaaggaattgggtaaaggagctttcttgctgtattttcagtgaattcaggcaaggacaccctcattcatggaaggggaaggctgaattaattgctctcaagttctttcttaccttcaactaaattagatccctttattctccagtggaaacttggcactgaggagtcccaggaggtgactcagtcggatatgtgaggccttagcaccactggccttgctgcttctgcactgtgtctgtcagggatatctgggacagaaagaataatttccgctgctggggcagccagagcctggcgtgcccgtccctaagctggcctgcaccttgccaccggaagatgtagtgtagagtagctgcttgaccccagagtagcattcagagggcacataaagaagctccgttaattcaaacatgtagttattatagagatccagagggccagaggctatcatttttttaaagttacctctttctatgatgatcagttattcatttttctaaatatttgtctgcatgttatatgtgctttcagtaagtttttgggtgaatttcttaacttcataaagtatataaaacaacttagcaggatatgagttatgacatttaggggtgttgtcctattgcttcagaacagtggggttatcgtgtaacacaccatgtcacatgatttgactaaatacaggaaaaaaaaaaaccctgaacttggtttcattggctcaaatatagttcaagacaacagagacaaagctaagatgaggaagttctgtacagtttaggaaatagaggctttcaaagataattcgcagtgatgtgaaactggcctcccaagccctgataagtaagttaaataagagtaggagccaggagggaggttctttactcttgaattaagagaaggggagctggaggtggctcaggtagag

SEQ ID NO: 24232 - DNA, 2300 bp, Homo sapien
tctggatgtgagtttatggactgacatcaaacagaccttgttgggactgaaggcctgaagagtaagcatataggtgggaggtagttgaaagagaactttccagataaactgttttcttcatgaataagtaataaagtaatatctgctgagagaagaaagggatgaggtcgattacgagaagaccttcaagcatggtacgtccttatgcgagtggcgcatggcttcaagaggagggttgatgggacccatccatgagtagagaagttaacaacaatgccagtctgcccaggatgttctgctgggactcagaaaaacatccagtttccttcctttagattttaactgcagcatcacgagctgccttcctagagggaattttgtattttggggctgtagctcagaagacttccattctcttttccctctcccaagagagatcgcagctgcttcccggggtttatgtccatgacataggactgtccctgctgggaatgggggagggaactgcttcccactcgaaagcagccttttcacttccagcttccatctgccttccactcccacctcccaaaataaagtaaataaatcaaagccagaaaaacattctggctggaattttattacattcagtattgtgtgagagctcccaaactagctgggaccgttggatttcagagtacgtgaaggtgaagcctgtgaggttcccccaggagtgctgggcagaaccctgagttttagaactccctctgcctttagcttgtcttggatgtgcttttccactctttcaagcactaaacccttccctgtaaatagtcacctgccagggtgccctcaggttatagcttgtcaccagctctaagagtggctagtacccagtctcagtgttggataacaagcaaaagtgatgagttgttttcttggggtttgtgtgtgtgtgtgtgtgtgtgtgtgtgtgtgtgtgtgtgtgtgtgtgtgtttggtttgttgtggtggtatgtttttgtttttgttttttcagagacatggtctccctatgttgcctagtctgggcctgaactcctgggctcaagtgatctcctatgtcggcctcccagagcactgagattacaggcaagtgtaagccactgcacctggccgttttcttgtttttaaagattaacctcaggccctagttatgttaccatcctagaaatgcagttatcctaaaaatgattcctctataataaaggaattgggtaaaggagctttcttgctgtattttcagtgaattcaggcaaggacaccctcattcatggaaggggaaggctgaattaattgctctcaagttctttcttaccttcaactaaattagatccctttattctccagtggaaacttggcactgaggagtcccaggaggtgactcagtcggatatgtgaggccttagcaccactggccttgctgcttctgcactgtgtctgtcagggatatctgggacagaaagaataatttccgctgctggggcagccagagcctggcgtgcccgtccctaagctggcctgcaccttgccaccggaagatgtagtgtagagtagctgcttgaccccagagtagcattcagagggcacataaagaagctccgttaattcaaacatgtagttattatagagatccagagggccagaggctatcatttttttaaagttacctctttctatgatgatcagttattcatttttctaaatatttgtctgcatgttatatgtgctttcagtaagtttttgggtgaatttcttaacttcataaagtatataaaacaacttagcaggatatgagttatgacatttaggggtgttgtcctattgcttcagaacagtggggttatcgtgtaacacaccatgtcacatgatttgactaaatacaggaaaaaaaaaaaccctgaacttggtttcattggctcaaatatagttcaagacaacagagacaaagctaagatgaggaagttctgtacagtttaggaaatagaggctttcaaagataattcgcagtgatgtgaaactggcctcccaagccctgataagtaagttaaataagagtaggagccaggagggaggttctttactcttgaattaagagaaggggagctggaggtggctcaggtagagtgcgtaggtttgcagaactgggcctgtgtgtgtaaagtgactaaggcaaaggagtggaagtttgagagaagtttaagagaagaaatggacatgattgcctaaatcagccaaacacagggtattgttgtatttctggatttgttttccttatgacc

SEQ ID NO: 24233 - DNA, 2300 bp, Homo sapien
tcttgggctctggccattaggtacacctgtattggactgtgacctgagagctagagatgcaaagaaatagggattgcctggaatcatttctggagagcacggttgtaacagcactcatgacacccattgtttaggggcagcaatagaacctggtgtgagcagcacagcccagtacccagcattggtccatgtggtacactgtgtccaaaggtgtagggctggggacagacttcccctgctgggcaaggtgttgttataagctcggttctttgttaatcctgcagagtctgtgagcattcaaatatcatttattaaatatctcttctacttaaaattaacccaaggtggtttctgttgcttgcatcttagaaacctacatgtgtcaagctaaagagctcactcaaaatacctaattttttataaaattttttaaaattttccatattttgaaacttactgaaatttattcctttcagcatcttatgctgtccccattttcctctttattcattccaaaaatgtctgcccagtacctactacatgcccagcacatggcttcacataagcagaaacacaagcagaagaatgtgtcagtgtttggacttagtgatgccccacttagagaatgccatccagtgtagtcttcatccttataaccaagttcattttatctgtgtattgtgggccatattagactacagtgagggacccaagagcaacttggaaagaaaagaagtcagattatcctctgagagtgaaacttcaaacttgacacaggagtagagctctgtagtctcctaaaggggatggagtggctctggatgtgtatgtaaagaaaggacatgaccatctgaaaggcccggtgagcatggaagcagcagttgtatgggcagtcacagaggtgaagctggcaaccaggcctgggggccaggcagcgtggccctcgggcccaagtaccaggttcctgctgccagctctgcccccagtttgggggaggtgaatctggctgttgtagtcactgagtattcagactgtataactatttttatgaattcaggcacaccagacaaccttctaattataacttaggttttcatttgacctgtgtctaggagagaacacattacttatgaaagctagatattttagtttgcaagttggagttgtggttttacacgtcagttctaaaagttggtgaatgaggatgcttgagtggcaggtctaccttagggtgctgacaacattcattgctcagcttcagaagctgaaggtcagactttacatttttaaaaattcaccaaggtgggattcttcaccaaggtgaagccagctggattcaccagcaaactctgtcactgaaccgaggactttttttggaaggggggcggatttcagtatatgtgcatgtgtgtatacgttagtaagaaaaaatcacaatttgtaaggtacttttacaattttattagcactatcatgtttgtatgaagcttctgaactgaattcaaccattcaagaagcatttcttaggtacctactgttgccaggcttgaagagctcacatttcagtgaggaagagcaaccaacgtataaacaacacacaatacagcaagtgcaacaaaatagatttgtctaaagttcagtaggatcccagaggagaaaacagcttccactgcctccctgggggagctctggaaggctccaccaaatgggaatattgtgggagtcctatgtgaggagagaggctggaggttcatccacatagagaaatggtagatcctggaaacacaagagtgtgctgagtctagggaagtggttgggaaattaaaatatagcacaattagttgttagaaggggaaaagtgattggaatgaggccacacaggtgagtatgcagtaaagggtatgtctcatgtaccatgctgctgtggtctgaatgtgtctccccaaaattcatatgttgaacttctaaccccaaagtaagagtattaggaggtggagcctttggagagatgattaggtcacgagaacagagctttcatgaatgagattactgcccttataaaataggcccaagggagcctgcttgccccttcctgcatgtgaggacacagtgagagggtgccatctatgagcatggagagcttagcttggacagccagctgatgagggacacatcgaatcaagatacatgacatggtgagtgctgctgcacaatattgagctgttccccctccaaatgaaacacaaatagaacataattgagcacaccagttgtctggtatcttcatcacataaatagta

SEQ ID NO: 24234 - DNA, 2300 bp, Homo sapien
gcaagctgcattaatttttaaaaactcttttaaaaataagcaattatttacatttcctatggagacaggtcatatttaatgttgggatttctgtatttacaatgaatatacaattgatttgtgttttattcattaggcgtctattctgtgttgatggtgggggaaaacaaggaagattagtggttgtttctgttctttttttttttttttaacttgtcttgattttaaaaaacgaaggctgggcacggtggcacacgcctgtaatcccagcaatttgggaggccgaggcagttcgatcacttgaggcttggagttcgagaccagcctggccaacatggcaaaaccccatctctactaaaaattcaaaaattagctgggcgtggtggcgcaaacctgtaatcccagctactggggaggctgaggcacgagaatcacttgaacccgggaggcggaggttacagtgagccgagattatgccactgcactctagcctgggtgacagagggagactctgtctcaaaaaacaaaacaaaacaaaacaaaaagaattggatacttcaggagttctaaattgaaatgtttctattactgtaaactaaattgtttggtatttaaatcttctacattctatttgtttttgagtggcaatatattcaaagttcagaaggtgtagagtggtgtgtgtagtggaaatgcttccttctgcttctgtctccccaggtccctcagaagcagccagtattaccggttttttgtataccctcccggagacagatgtaactgtcaactgattttttaaaacgtgtttcatcactcattaaatctagtgtagtgacaaaaatggtaaattttttccctgcatctttaaaaacatatgctgtgtttgaatggcaattatgaaaagtcatttgtttttcctggggccgtggacctagcgtaacaaatggtagccctcaggggaactagcatctgtgtcctaagtgaaggaataagatgtagacttccctttcctatgggttgccttaatttttgtatatatagagcagattctctcagagatgggaataactctctagctcttagtgtaaaaatattatcagacccatttctctgtgttcttgtcgagaaggttctaaaaggaaaagaggctggtataaattgcccagagaaaaattcctagaaccatttagtcaaactactggctaagatcttgctgggaggtagcctgtatttgtggtgtggtcctgtgttcccagtgggactgaagtggattggagggccgtgctgtgcctgctgttgggtagcatcactttgagctggatgacgaaggactttccccaaacctgtcctctgttgtacacatccccacacccaaaaccttcctaacattgtcactttccgaggtcaaatgtacagataaatacagggtatataggacccattccaccttaaagccaacagcattgtgtcagccggggtggcctttcctacgagagggcattattcacagccagtaattacaatgaatgaaggaagaaaccatcttcctttcagttatgaattcttcagtaatatttaatgaggggtgggtggaccaaagacacttccttcccttctgaagaggatttagagtggagtggtaagggggaggaattggactgcttccctttagaattctgcccctcctctcctttttaaggaaaatgtccctaaggagctcactataaccaggcggttctttaaactgacaactgcctgtgaagtgttgatggatttcctggcaaataaaacagcaggacccttctttagcgactaccttactggagctttttagcccaattttagttcagagtggtcctggcaaggtttttaaaggaattggtgtgattattcataacaattaaattttgcttattaataaacaagtaagtaacctgccttcttggtcaccgcttcccccctccccaaggtgcgaggcccagagataaggcaagttgtgccttgctgaggagggtgtgtaccagtgagaaacaggaagctgtgcttcagcagcttggtctgcctggaggtttctaaggctgagtcaggtgtgctgaggtccctcggcaagggacgctgctttcccctggcagccacactgctgagcataaatgctttaaagtgtcagcaattgatgtgtggagagaagtatgactgcattacagcttaaagagctttcacattcaggtctctacaggagaagacgagatcgccccgatagtttgagagtaaatgggttaccagaggaagagctaaggtga

SEQ ID NO: 24235 - DNA, 2300 bp, Homo sapien
gtcacgtaagatgtgagcactggggagactgtgagggagaattctgagcagaaggctcacgtggcttcctgcctcctaccatgccacccccaccggatgcattaaatttctggtctgagtcagcctgcctctgtccccatccatctgtctgtctgtctctttcttcccctccctccctgcctcctcactgtttcacatggtcattgtaaaaaaaaaacctaaaaaattaggaaatatagataaattgaaaggaaaaattttaaaccatgaggttgttcctttcttatttaaatatggtggttcccttgtttcatgagccataggctttgggcctgggcaggatctgtagcccacagcctttgagttcttgacctatcctctgagatttttagggttcaaagtagaaagacttggtcccctgcttccagtcctatctggtacccactccctcatcttttctggctaaccattgtgcttcccagtaattatgtttaacattttctcacatagggattaacaacataggctctggactcagagtgcctaggtttaaatcttgactccaccacctccttagtagttattcagtctctttgtgcctcagtttcttcatttgtaactaacacctatctcagaagccgtgggaaggattaagggatgtgataggaagcactcactgactcttggatatcattatttatggttgttacttggtgtctctggctgcattttgtttgtcgctgctggttccgtgactgtccatcagtgtgccttgcgcctgttctgtagattttatttcacagtctcttggttttggtgggtggcacactgccctgagaggatggggacgtgagaaagattctgagccctttagttgtctctagtgctacatcatgattgtcatcattgctgtaagccaaaaagtatatgagacaagtcttactcaatttagaacatgtattttgccaaagttaatgacgcacccatgacacagcctcaggaggtcctgacaacatgcgccccggggtggtcggggtacagcttgcttttatacatttcagggagacatgagacatcaatcaatatatgtaagatgtacattggttcagtccagtaaggtggaacaattcgaagtagggggtttccaggccagaagtagataagagacaaaaagttgcagtcttttgagtccttgatcagccttccgatgaatacacaattgtgtctggctcagtgaacctacatttttacgtgaacaatagggcagaggaagcaatcagttatgcatttgtctcaagtgagcctcaaagggatgactttgagtttgtgtctgtcctttttccataaggagttttctcgcgggcaaatggtgagggagggatgtaggttgttatctttgtagctatcttatttagcaataaaacaggaggcaagtttgcctgacgtagtttccagcttgactttttccttggcttagtgatttagtttcctttcgcattgctaactcaatcacaggagacaggagtgtgaactgaatatagcaagaatgccaaagtatgtaacagtttccttagtcatgatagagactgagaaacatcggctcacctaagctttgaggttagctggagtccagtagaagagttataactaaacactggcccttgtctgtttccacttgtgcccattcattgaagctgagattggactgagtacatttgtgactatgtaccagtagcaaaggtgatagaagtcaaacatagctcttagttttaggggctcatggcctcctggggaagggacccatcaggcatagctggcagtcatggccagggttgtggaagcccaggtccaggcagggttcaaatgctcctcagagtgtgccagcagcctcagcctcagggagagcttgtcaggggatgttttacaaggtctccaaaagcctcttatgccctccagagtgaaaagcacggcattgttgatgaagtcttgtggcaaatatgcaaggcacgtgtggatatttctttctcttggaggcttacaaggtagccccggtctcctggtgcagtgtttatagcatagtccactgggactgccgctctgacaaagactgtgtcactactttgtggaatgttattttagaacttccagaatgcctcagtaaatcctgactgccatgtaactgtgtactgtgctgctgagctcttaacatgaagcagcagtagtgaccctggcgggccaggctgacgtgcgtgggaacagtgggagtgaccctggctgggaagcagggaggcctggatatt

SEQ ID NO: 24236 - DNA, 2300 bp, Homo sapien
tctgtctcaaaaaataaaaaataaaaaagattaaaactggaaagcttgctaaggtagtctgtctgaaaacaggaataatttttttcttttatcaaaaaaatggcagttttaatagcttttgctctaagatgaccttgggagaaaagccgtaaagtaattcccagtgtagtgttttaaaatagaagatttttcattttagatatgtgtttaggaatttcctttgttactaacattgtcctttaaaatgatcttgaagcaaagtctagtttaatataatgtttaaatgcagtaaaaatatcagcagattttataatttttgtcatagatagcaatataccactagatttatttcacaaatgctacctgaatataatttcacagacagtgaacaagttaccaagttgtatatttactcaattcaaaattaaacactctggatttcaacagtaataagctcctgtaattacctgttggaaatgcattacagatgatcaggaggctatctgaaaagttgtcttctccaggaccattttaaaaataaattgataatgtgtgttgctctagcttttcaaaagaatagttgagttcttcaaatagctaccgcttacaatgcaaccacaggtgatctggttacatttatgttaagagtgattaaaaactttcttccaacctttctgtcagataaccaaaataaccccttataatttaaaattaattaaacctcatggctacctaatttaaagtactaagtaagatcatgttgcctccaataaagaaatcattcacattataaaaatatgattctttcctttagataaatttatctttaaggtattctaaaatgtgattaccatcctaggcaatacgacaggaccctgtctctacaaaaaaaaatttttaagttagccaggcatagtagtatgcacttgtgtcccagctattcaggaggctgaggtgggaggatggcttgagtccaggagttagaggctgcagggagctgtgatcaccactgcactccagcctgagtgacagtcgaggctctgtttccaaaaaaaaaaaaaaaaaaaagtgattgactgtacttaagttaattatatttacattagatttcctgtttacttagtactgaataaaatgtaatctacagtctgtgttacacagatggatgtatagaaccaatttataaggacttttttttaaaattatactgaatttttatatatatatcacaataagaattgaggttaggattatggtttttttactaacatgaatataatatcatcacctagttgccttcgtttagttcagtacaattactgcacatcatttatatatctttgttgaatatgtttccactaacttctttttttttataattttttgtctttaggaataagtttgtggagtttgacatgaagccagtctgtaagaagtgctatgagaaatttccattggagctgaagaaaagacttaagaaactagctgagaccttaggaaggaaataagttcctttattttttcttttctatgcaagataagagattaccaacattacttgtcttgatctacccatatttaaagctatatctcaaagcagttgagagaagaggacctatatgaatggttttatgtcatttttttaattaaaaaagaaaaattcatataatcgtgtttaaaacacaaatgaagtcagtatttgcctttgttaacccttatccatttgttgacatgtagactgtttacaaaaaaaaaacacatggttaaatgttaaattttaattaaggcccccaaaaattaaatataactttttaaaatgaaaggagtcaccttttacatgactcaggtgaaaaaacagtataaacattaatttactttgtgttcaaaagaaaattccaactgctgttggggaaggacacagaaaagaaaaataaccacccaagaaaaacaaaaacaagaaaaacaaatcttatacaatcttagtatatttatcaaactagtagctagaaagtgaatatgcacattactaagacaaaaaacaagtgtaattcagaactacttgattttttttagttaaatgcaataattattatgcttagttttataacctgctctccttgtgaattcttccttcaaatgattacttaacgcagtagtaatagctagctgtaggatgtcctttaaatttttgtgcaaaaaaaaatttataccaggtatttggaaatatactttacaatattggaaaatgaagtatttttaatgtattacagcaattatgtttctaagcttaatgttaagca

SEQ ID NO: 24237 - DNA, 2300 bp, Homo sapien
tctctgtcctaccatttcatcttcctactaggctatccccacatggatatataaatggtacctcaagtgaaagaaatcaactacctaaaataggattttccactccaaactagattttctttacatgtcatttctgttaatgtgggtcacacacactggtaagctcagaatcatctttttcttttcttttattcacatccaatattgttgaaataaaacaaaatgctgtttttccttttttagaaaggcaatacttgttcattatatcaaaatttagaaaatatggaaaaacaaaaaggataaaaaattatccacaaccaaaatagcccaaatttccagttaaaaatgtcaacgcatttgatatttgtccacataattcagactgtaatgtttacacaaatgtgagcttttaaaatctaaaaggttctcactattaaaaatgttttgttaaattttgttttaaaagtaagattttaatatccaaattcccaaaatagacatttttgaagatttggaaaatacagacggctcaaaatctttacattattactgttaaattttggtatgttctgttattctgctagtgaaatatatatagatttgggggggctattccttttcctttttttttttttttttgagacaagggtctcactctggtgcccaggatggaatgcagtggcgctatcacagttcattgtaacctggaactcctggactcgagggatcctcccgcctcgacctcccaaagtgctggggctaccagcttaagccactgtgccaggcgaatggctattcctatatacacagttgacccttgaataacatgggtttgaactgcctgggcccgcttataagccgacagaaaatacagtattggaggggcctgcatatagagaggtctgacttttcctctaagtgttccacccgcaggactgactgcgggatttgagaatgcgcggacttcttcttcttctttttttttttaggaagtcttactctcgcccaggcttgagtgcagtggcgcgatctcagctcactgtaaccctcgcctctcagtttcaagcgattctcgtgcctcagcctcccgagtagctgggattataggggcccacctccacgcccaggtaattttttgtatttttagtagagatgggctttcgccatgttggccaggctggtttcgaactcctgacctcaggtgatccgcccgcctcggcctcccaaagtgctgggattacaggcgtgaaccacagcgcccggcggaatgcgtggattttggcataagacggtggttctggaaccaatcccccgccgagatgactgtttaaaaaattgtaattgtccaaaacttaatatttgtggtctttttcattatgcagttctaaatctccctttttttttttttttaaattcagacggagtctccctctgtcgcccagacggcgcaatctcggctcactgcaacctccgcctcccgggttcaagcgattctcctgccttagcctccggagtagctgggactacaggcgtccgacaccacggccggctaattttttgtatttttggtagagatggggtttccctgtgctagccaggatggtctcgatttcctgacctcatgatccgcccgccgtggcctctcaaagtgctgggattacaggcgtgagccaccacgcctggccctcatttaataagatatgaatttaaaaatgtatgctttagtattcacacatgtccgatgcaacgtatttaaccagtcatctccagaaactttgttccaatttacacgttcaccaaattggcctgagtgctttttttcttccaatgcattgcgcacttataatttagaacaagtgaccaaaacgcttaagagcccatcacgcaaattgttatctgctggaaatctacgccctaggctgtggacactggcggccgaaatctgatcccggcttgccaagacaccctcagagcacgcggcgctgccaagagcctggccgagtgcagctcgagcgccgacgtcgccaacgtggcgcacactgctgacgcagtacgcaagttcgtcacagtggtcctccgccggctgcgccgcaagttcgtcacagtggtcctccgccggctacggcgctgcgtcactggtttgcaggcgctttcctcttggaagtggcgactgctgcgggcctgagcgctggtctcacgcgcctcgggagccaggttggcggcgcgatgaggcgcagcaaggctgacgtggagcggtacatcgcctcggtgcagggctccaccccgtcgcctcgacaggt

SEQ ID NO: 24238 - DNA, 2300 bp, Homo sapien
tttcatagtgtagacattcaggtaacagagttcctttatgaatttattggagatgggaatttccagtttataaacaaagacatagagctatacactgcttaaattaattgccttgttatttaatggtaatcttgttttctaaattcactagctctcacacataagatatgacagagaagaataatgagatgtttgtctcttaagatcatataaaatctttggaaaatcatttgggttttatattctgagtataaacaatttgactaaaaactattctgtgtgtttaggcatcagaaattgttgaatatgaagaagacgcacacataacttttgctatattggatgcagtaaatggaaatatagaagatgctgtgactgcttttgaatctataaaaagtgttgtttcttattggaatcttgcactggtaagtagatgcagtacttgagctaaaagttttatttatttatttattatttttttaaaagacggggtttctctgttggtcgggctagagtgcagtggcacaatcttggctcactgcaacctctgcttcccaggctcaagcgattcttgtgcctcagctcccgagtagctgggattacaggcatgagccaccatgcgtggccaagctaaaagttttttgttttaaaaacctaatgatttcataaaagcactatttgtatagatttttcacaggaaggcagaagacattgaaaatgatgccctttctcctgaagaacaagaagaatgcaaaaattatctgagaaagaccagggactacctaataaagattatagatgacagtgattcaaatctttcagtggtcaagaaagtaagtagcaggttgttgtatgtacgttcttactgataacccactggtcaatgtttttgcgttggtcttatattttggtaatttcaaaaatactcagtaatatgttgttattaatgcacagaagggatatgtgtgtctaaatgcttatatttgcttgctttgtcttaggtttggtgtgtctttttaaacttgggaatctaggtatatgctcttaaaaagtacttcttggggaattagaaaagatttctaagataagacattgattttgttatcttagcagtgtaatcaaaacaaatattataacctcaggactaattcttaatgaactttgctgaaattgaaagttgttgctgacaacttaagagcatttcttctcatcctcatcagccattgtgaacgcccttgttttcttgctgtcagctgtttgagattgtcatgatgatgttaaattatgttcagtcttctgagtgttttgttgattaatttgtgttactactcttttattaggatttatgttgtctggtgtattgtagcatctgtatttctgtcaccattgaaaatcagttagaaaacatcagtaacttattttgttcacttggaaaagctttccaagttaacattcctctacaattatcatggttaacagaagtaatagaaagagcatggactttagaatcagaagatgttagattgtacaacacttttctgtgttcatgaagaaaaaaatataataaaggcaaaaaataataataatacaaaacaacagaaaaagaaaaaagataattaaaaaacactttcacgtgtattatttaaagtgtaaagtgcctattaaagtggcaaaaatgtaaataagataaaatatatcattttagagtttttacttttggaattttttgcaaatgaaagcccttaattaatgtcttttatttttagttgcctgtgcccctggagtctgtaaaagagatgcttaattcagtcatgcaggaactcgaagactatagtgaaggaggtcctctctataaaaatggttctttgcgaaatgcagattcagaaataaaacattctacaccgtctcctaccagatattcactatcaccaagtaaaagttacaaggtaaacaggaaagaatggaatcatttcattgtgaaattgtttctgttctaagtgttttaaatgctgttttgttatttttatttttttttagtattctcccaaaacaccacctcgatgggcagaagatcagaattctttactgaaaatgatttgccaacaagtagaggccattaaggtaagtcacttaatttctctagctgtactttttattccaagattccttccctggccactctctcactttttttctgaagctggtcagaatgtccccttgccatccaaatagtatggcaaggggacattttggtctttttttttttttttaagacagggtcttgttctgttgtgcaggct

SEQ ID NO: 24239 - DNA, 2300 bp, Homo sapien
aattgtttcgtttcgatgtagaatccaaagaatggaaagaacgtgggattggcaatgtaaaaatactgaggcataaaacatctggtaaaattcgccttctaatgagacgagagcaagtattgaaaatctgtgcaaatcattacatcagtccagatatgaaattgacaccaaatgctggatcagacagatcttttgtatggcatgcccttgattatgcagatgagttgccaaaaccagaacaacttgctattaggttcaaaactcctgaggaagcagcactttttaaatgcaagtttgaagaagcccagagcattttaaaagccccaggaacaaatgtagccatggcgtcaaatcaggctgtcagaattgtaaaagaacccacaagtcatgataacaaggatatttgcaaatctgatgctggaaacctgaattttgaatttcaggttgcaaagaaagaagggtcttggtggcattgtaacagctgctcattaaagaatgcttcaactgctaagaaatgtgtatcatgccaaaatctaaacccaagcaataaagagctcgttggcccaccattagctgaaactgtttttactcctaaaaccagcccagagaatgttcaagatcgatttgcattggtgactccaaagaaagaaggtcactgggattgtagtatttgtttagtaagaaatgaacctactgtatctaggtgcattgcgtgtcagaatacaaaatctgctaacaaaagtggatcttcatttgttcatcaagcttcatttaaatttggccagggagatcttcctaaacctattaacagtgatttcagatctgttttttctacaaaggaaggacagtgggattgcagtgcatgtttggtacaaaatgaggggagctctacaaaatgtgctgcttgtcagaatccgagaaaacagagtctacctgctacttctattccaacacctgcctcttttaagtttggtacttcagagacaagtaaaactctaaaaagtggatttgaagacatgtttgctaagaaggaaggacagtgggattgcagttcatgcttagtgcgaaatgaagcaaatgctacaagatgtgttgcttgtcagaatccggataaaccaagtccatctacttctgttccagctcctgcctcttttaagtttggtacttcagagacaagcaaggctccaaagagcggatttgagggaatgttcactaagaaggagggacagtgggattgcagtgtgtgcttagtaagaaatgaagccagtgctaccaaatgtattgcttgtcagaatccaggtaaacaaaatcaaactacttctgcagtttcaacacctgcctcttcagagacaagcaaggctccaaagagcggatttgagggaatgttcactaagaaggagggacagtgggattgcagtgtgtgcttagtaagaaatgaagccagtgctaccaaatgtattgcttgtcagaatccaggtaaacaaaatcaaactacttctgcagtttcaacacctgcctcttcagagacaagcaaggctccaaagagcggatttgagggaatgttcactaagaaggaaggacagtgggattgcagtgtgtgcttagtaagaaatgaagccagtgctaccaaatgtattgcttgtcagtgtccaagtaaacaaaatcaaacaactgcaatttcaacacctgcctcttcggagataagcaaggctccaaagagtggatttgaaggaatgttcatcaggaaaggacagtgggattgtagtgtttgctgtgtacaaaatgagagttcttccttaaaatgtgtggcttgtgatgcctctaaaccaactcataaacctattgcagaagctccttcagctttcacactgggctcagaaatgaagttgcatgactcttctggaagtcaggtgggaacaggatttaaaagtaatttctcagaaaaagcttctaagtttggcaatacagagcaaggattcaaatttgggcatgtggatcaagaaaattcaccttcatttatgtttcagggttcttctaatacagaatttaagtcaaccaaagaaggattttccatccctgtgtctgctgatggatttaaatttggcatttcggaaccaggaaatcaagaaaagaaaagtgaaaagcctcttgaaaatggtactggcttccaggctcaggatattagtggccagaagaatggccgtggtgtgatttttggccaaacaagtagcacttttacatttgcagatcttgcaaaatcaacttcaggagaaggatttcagtttggcaaaaaagacccc

SEQ ID NO: 24240 - DNA, 2300 bp, Homo sapien
atctctgctcgctgcaacctctgcctcccaggttcaagtgattctcctgcctcagcctcccaagcagctgggactacaggcatgcgccaccacgcccagctaatttttgtatttttttagtagagacagggtttcaccatgttgaccaggatggtctcaatctcttgacctcgtgatccacccaccttggcctcccaaagtgctgggattacaggcgtgagccaccgcgcctggccaggaattctttatggatgtacacaagtgaattctaaaatttctatggtaagaaaagattgtatatttgttacagttgatgaatctacattgacacatcatcacctaatgtttttacctttttgtcaaaaatttttaactattgatacaatcgtgatttttattaaatctgtgaatgacattgcattttcaaatgttcagaaaactaactttgcattccagcgtaaacctcacttggtcatggtacaattttgttatgtggttgcattcaatttgcataaatcttgttataaatttttgggtttatatttatcaggatactagtagttttctgatactgtctttggtttccatgtaagagtaatgctggttgggctcagtgatatgtgtgtgtagtcccagctatttgggaggctgagtaggaggattgctcgggagtccaggagttccaggctgcagtgcgctatgattgtgcctgtgtatagccactgctctccagcctggacaacaacatagtgagaccgcctcttaaaaaaatggtaatactggtatcataaaatgaattgagaagtattttctgtattgctgttttctggaagagacttggttgttgacttggtgccattttccctttaaatgttgagcagtttttaccaatgaaaccacgtctggagttttcttaagttttaaaaaacactattgatttctcttctttattatttccttcttgccttggattttgcactttttttctagtttcttttttttttttttggcttttgagacagtctcgctctgtctcccaggctggagtgcagtggcatgatctcagctcactgcaacctctgcctcctgggttcaagcaattctcatgtctcagccacccgagtatctgcgattataggcgtggctaatttttgtatttttagtagagacggggtttcaccatgttggtaaggctggtcttgaactcctgacttcaagtgttcctcctgacttggcctcccaaagtgctgggattgcaggcatgagccactgggcccggcctagtttcttaatttaaaaaaagcttaaattatgaatttaagatcattctttatttctagtataagtatttaattctataagtttccttctaagcacttcctagctgcaactggcaagttttaatatgtgatattttctctttcatgcagtttgaaatattttattttccttgagacgttctttttgatctgtacgttagatgctactgtgccatttccaaatatttggtgattttccttctgtatatcattctcttattgatttctagtttaattcctttatggtttatgaaaatattttgaataatttcagttctcttaaatgttgtgaggtctgtcttggtgaatgtcttctgtgcacttgagaagaaagtagagtctctttttttgctgacattgtgccattggcagttccagtttttttgggctgctgtagcacccaggctgggttacaggagtggcagaaaaactccgtgtggatcttaacctccagattatctctctggtcccaagatccttattcttcctgtttttatccacctttctaaggcttcttagaggtgctctgtatgtttcagtgtaggcatttagttataggttttgaggagagatagggtgaagtgtgtttattctatcttctccagaagcccaagttctcaattccctttgaaatagattatataatctgttttgtaaattagcatttaagtggcatagtattttgtgacttcctctttgcagaaatctcagacagaagaaataactagcacaactgacagtgtatatacaggtgggactgaagtgatggtaccttctttctgtaaatctgaagaacctgattctattaccaaatccattagttcaccatctgtttcctctgaaactatggacaaacctgtagatttgtcaactagaaaggaaattgatacagattctacaagccaaggtaaatcttgatatatgtttatcatgtgttacataagggacaccttatatttgagaagatagacttttaaaggc

SEQ ID NO: 24241 - DNA, 2300 bp, Homo sapien
ttattgtgataaagtatgaatatttttagaaagtctataccatgttctttcgttaaagatttgctttatacaagattgttgcagtacctttttctggtaaattttgtagcagaaataaaatgacaattcctaagagccactgacatccaaaaaattcattacttacgcttcgggttcattctaaagtaaggaagacaatttaaaggcagtaaattcaaactgctgcataatttccagagctcctagtttctcaagtttgatacacaccaaaaacgtatttggaaatggcttgtatcaaatgttaggcaaattgctaaagaaaagaggatgttcttattggcctactcaatatggaactacaaagaatccaggtagaacacaaaattttgtatattgcaattatgaatattgactgtcttccacccatctgtgttctttcgggtgaaattacctcattttatttagtgaggaaagacaggtttattccctgttacatggggatttggaaattgggtatcctaaagcaagtaactgttcaaccaccagtcaaaagaggggagggatgttgtgcgagtaatgagtgatggtataccatcaccattccactcggccacaaagccagatacttgaaataaacctactccaaatgtatcagttcagtcttgaaccatggattacatatgtttacactaaatatttcaaattggcttatttggaaatctatgtaatataaactgatgtaaagtgtgttgtaacttttcagctgagacagttgatgccttcgtcatgattttagaataaattcttaagttaatgcaagtgctttttaagagactttttacagatttgtatgctttcctaaagcactaaagttacaaattaaaaagctttaaaaactttgaccaaaaatttgacaaaatgacatgtaaactgacttttcccgtattagtattccaaagatgcttaaaagtggcttgtggcatttatgagaaagtctttgtgtcacatttcaggaaaggactttgatttctctttgttatttaatcactgatgtggtctaaacccacgataatatgtatctttccttttaaactggattttatgttgtctcattaaaatctgcttaaagatagaataaaattcattatttgtacatcttaagtggtactttatggcaaaaagtatggcctaagtaattttcagataataactgctgaagtacagattttataaaacttgggcatttgggaactttaatccagagaatttaggagttgttagtccagagatgcagctgacagtcacaatttagaaagtaaaagattacaccactgtaattttatgaatgagaaaaatgaagtggttgtacagttcccctcagtcagttttgtttaacataggttttcaggttgatgtatactatgtactatggttagcactgttgtaggtattggcaaaagcttttttcttttcaaaaaaaaaaagttttttttccagggtgcttacattctaactattctttttaataccctgttataccccatatggaacacagggaaagtgaggtaatctgcaatgtctatgctcagctttccctttttttttttttttttaactttaagagatgggagtcttgctatgttacccaagatagatgtaactctcaggctcaaagcaatgctcccgcctcagcctccttagcagccgggactacacgcgcgccaccactcccggctcagatatactcttggtttttcttttatatggcagttagcaaaggtcacttctgatggaacgaccggtctatgtggtgagcgcaacgcacaccaaacttaacaggttaaatggagctggagcggagcgctgcaggcaggtgcggggcctcggtgcccctcaacccgtggcacccaggcagccggggcaggactatcgcggggagatgcaatactactcagttacgaggtgtgtagtgctagcacgagaaacttggaggacgcgctgacaagccgggctgcagtctccgggtcgccccgccccgccctttccctgccgccgtgcgtgcctcgggggggcggggtctggcacgtcgtgacgcactgcggccgcgtagcgccgcgggtttgatgaacgcggttcccggggagactggtacggttgctgtgtgctatggagccgagggtcgtcaagccaccggggcaggatttagtagtggagagtctcaaaagccgctacggactcgggggcagctgccccgacgaggtgaagccgccgcctgaggtccgcgggtgggctcctgctgc

SEQ ID NO: 24242 - DNA, 2300 bp, Homo sapien
tctttctcacccaacaacaggtgttacagccctgcttggtgttccaggaaactgaagttcctttggattttttgtgggtgtttatttgttgcaatgataaacaagcgtaccatcttaaggccctgccaggattctgcccaccctcttcctacgggagcgagggcatgtgctgttgtactcgggaggcaggacaggcgtgctccccagggatctctggaaggcctgcagactggaagctccctagcagccagttaactgattagttccacaagttaagcagcagccttgtctgcctcggatgggaagagacatttccatgctgctatggtttgaatgttttccccacggtttatgtgttaaaaacacatatgtacttggcattgggtgcatctcctaaaggaccattctctttccagaaatctcagtgaagaagcccttaagtcctgggggatttggaaaagaagattgtccatgtcagtccccactgacagggcccttggtcttttgctcttctccaccgttccctggctgctgacttacacagctctcacctccttctccaacttaattcttaatttctttcttttttttttttttttttttttttgagacagagtctcactctgtcgcccaggctggagtgcagtggcacaatctcggctcactgcaagctccgcctcccgggttcatgccattctcctgcctcagcctcccgagtagctgggactacaggtgcccaccaccatgcccgggtaatttttttgtatttttagtagagacgaggtttcaccttgttagccaggatggtctggatctcctgacctcgtgatccgcccgtctcagcctcccaaagtgctgggattacaggtgtgagccaccgcgctcagcctctccaacttaatttatttccaataatctttcgctaatttctacctaatgcctttaggctgttgcaggacttttccaaaagaaagaaagaaaaggaggaagggagggaaggttcctgtgcatcatggcatatgttcgtcacggtgtttttgtgtgtggtattgggaattagttggttttcatgaccaatggtagcttgctaaggacgagagaattctgagggtgaaaggtcttagggagtttgggttccatggcccagctggtcttctgggctgtgtcagtggttgattctggaaggttcctcacacaacccagcatctagaagagtacttgctgttttgttgtggcaagaggacagtgaaccagagtgcagccactggggaatttaggcgatcactagagcacattatctctctttgtagagccaggctaattaatacccagactaccaagtaaaattgctttgagtcagaaacacaggtctccattcagaaagtgaaaaaacaagcaaaaaaaaagaaaaaaaaacccacctcctccttcaagggaatgcattcgtgtaatattaatagttggtgaaaagtatctgaacacctgaacagctgcagccatgctcaatcccttcaatcccttaagtagctgtgtgacctggggcaaatcacttaacctctctgggctcccactatctcaactgtaaagttaggttattggacttgtccactttgatggacaacctgttcttaacagagagagggaagaacactaagctggggctgggagagcatccagaggggcaaagaccagaatctaattcctggcagtctctccaggggtcctcctaagtcctggagcccagaggccaggactggcctggaggactccagacttaaagctcatgtaaggctaggtttctccaaaccctctgagcacgagaaacacaatcactaacctcgggtttaaccttgggccctccgtgtgctcctagcctcctctcaggctccctcccaggcatggctgcgaggctgggaaggccccagagtcagcccaagtggcatgggtacagcttcagcttcatgtctgcttttcttttaggatgtatagtttcccctctgtttgctggaaggcaccttatatccagtggggttaaataaaggtagccagacccccggctggggtgctaccgccagtgcccagctaatgacgcatgtctttcaggtgagcccttgggagaggatggcccatgtgggggactgcacgcagacgccctggctccccgtcctggtggtaagtggtctgagccccttacccccacagcaccctcatcctcatgatggttggactgtttcttggcctcttcagctgtaaaatgggaatgctgatcatagtccctcctccacagggttcttctgagg

SEQ ID NO: 24243 - DNA, 2300 bp, Homo sapien
aaatttagaacacagccccaggagacccccttcacccaaccatgttctgcagtcttgattcattttcttacttaaaaaatgctattgataacctgttgctatttctgcctcagtctcttaggaaatgtataaaacagaaaatcacatatcttcaaagctctggagctttacatgatgaagataagcaatgatttctcatttcattctttctcttaatcaactgaattaattatatactcattttcatttggatatgatgactaggcagacttcaagtataaccatccataaccttgcttaatgccatgatgtttggatttttttcaaagagaggaaaaaactcccttggcttctattacagcatccatattttgtgccattttaattttttcttgtgtcttttttctctctctttgggaaatatcagtatcattccttttggtaaattttaaatcaccacttaatttccaatagaaaaaatgttttagttacacctaaaataatcccaaacctcaaacacactgtgagcacaccagaaagtaaaaattatatggagtagaacagattagcccagaatacctcccattcattttcccaggttcctaatttaataatttcagtgactttaatttatcacagaccctcagtctgaactcggcatgagcagggtagacaaccaaacctgaaaattcaagttaaaattcttgtttgggagcttatattatctagattaatcatccacaaggatcaagtcagctaagtaactctggttcagcttaatctctgtggaggcagaattagtcctttacagtctaggtccttgccccagccccatacatttctgtctgcttttttcttttcttttcttttctgttttgagacagattctcgctctgttgcccaggctggagtgcagtggcacaatctcggctcactgcaacttccatctcctgggttcgaacaattctcctgctttagcctccacacatgccaccaccggctaatttttgtatatttttttttttttttttttttgagacggagtctcgctctgtcacccaggccggactgcggactgcagtggcgcaatctcggctcactgcaagctccgcttcccgggttcacgccattctcctgcctcagcctcccgagtagctgggactacaggcgcccgccaccacgcccggctaattttttgtatttttagtagagacggggtttcaccttgttagccaggatggtctcgatctcctgacctcatgatccacccgcctcggcctcccaaagtgctgggattacaggcgtgagccaccgcgcccggcctaatttttgtatttttagtagggacggagtttcaccatgttggccaggctgatcccaaactcctgacctcaagtgatctgcccgcctcagcctccaaagtgctggggttacaggtgtgagccacggagcccagactgtttctttcttaagctcttactttctcatgtgtgagttaccttgtaggtttccaaggcagaggggacaagatggaaaaggagaacacagaaatctagcctggaggagctgctctgttcctgtatttatctgtgtaggtgtgaatgagggagaaaatgacaagagaatgacattattttaaggctgttttcccccccccaatcatttactttttgagaaataattgcccaatactgaaaggtatgtcctttcaaaatgttgatgtttcaaatggcttcctaattacctagttatacggggggtgtgtatggttatctgaagttacatgggtatacactggtggtgtgaggtgtccagagagaggaaaggaagagcagtcctggtggctcaaaccctgagggatgtgcgggggatgggtgagaatgtgaacagacatgttggaagctgaatccgtgcagtggcacccatgcctgtagccatctcagtggggggtccttctacgaacaagctttgattaatgatattttaatgctagtttagctttttagcactcccacgcctaaaggctctgatagaagcaaggcccccacccctgcaaaaaaaaaaatccatgatttttacgcattccaacagatctcttaaggggcagacggccggagagccaggtgtgccagggacctatggcagcagggctgaacgtgcccgctccagcctctccagtgctgggagagacctctagatggtgcaggtgagtttgcaatgagggaaagcccctcggcaaggactgagtttccaaacttgcagacagggcagggagcggtcaaggaagagttcccgggaag

SEQ ID NO: 24244 - DNA, 2300 bp, Homo sapien
tttgaagctgggggttgggggagaggatggggaaagtgaggggtgtgattgcctctggtggcccccacgctctacttgttctcctgggagagggcggtttggaagaggcatgggaggagcttcccagcacagagcccagcctgccctccttctgtgtgatcccacatgggctgtccagctctgttagatcaatgctgcctcaactcggatggacaccaaaccctacggccccctccgctcccggtgaagcagtttctctgatgatttcttagaccccaccagcctaaaacatctctccctctgaccccaaaagaggcctgtaagtcccgaattgctgctttgtgttacagcatcagaggctccttggaaaggcgggtggtgcactcagctctgaggggcttctccatgaggccatctcttggccatctcctccttagcctgttcaagtcacacatgggccagctggtctagcagagaacaaataacgggggcagtttaggctgacaggccttggggcgttccatgatgcacctgactgccgaaggagggatggttccggagaagggaacagaggttcgccaaaggccccttggagtggcacccgtcttgcccaggccattgctgtggtggtctctgtctctgtctctgtctctgtctctgtctctgtctctctctctctttttcttttttttttttaatatggagtctcactctgtcaccctggctggagtgcagaggtacgatctcggctcactgcaacctctgcctcccgggttcaagcgattctcctgcctcagactcccaagtagctgggactacaggtgcctgccaccatgcccggcttatttttgtctttttagtagagactgagtttcaccatattggtcaggctggtctcaaactcctgatctcaggtgatcacccgcctcgacctcccaaagtgctgtgattacaggcatgagccaccgcgcccggccatctgtctctcttgacacttgttacagctgttttctccttcccccagggctcctctctggtcacgtcccactgtgagtccccatctctcctccgtccttttcctctttctcacccgccctgccattcgtctctgtgtctcttggtacctgtgacagtgtcctatttccttcctcgatgactgctcatctcccagtctcaacccccccgaaagcccgcctttcctccttgctgcctgcctcttcctttctccttccatctgtttccactttgtgcatttatacttggtattgtttaatattccaaagaattgaagagggttactgaaagctttatgtgcccatgactctaaataaatgtagttggactgagttatttttttgttcttggatgaagccagaatcttaaagccttttctacttagctgaatttatttttattccaaatatttttatttcattaaataaataataggagttgcattttaaagccctaactctgtggtacattgccaggctttcccatatggggctctttgcagctataatcaatagtgtcagagagggtgctggctgggttcggtggctcacacctgtaatcccagcactttaggaggccaaggcgggcagattgcctgagctcaggagttcaaaaccagcctgggcaacatggcaagacaccatctctaccaaaaaatacaaaaattagctgggtgtggtggcacacgcctgtaatcccagctacttggaaggctgaggcaggagaatcgcttgaaccccggaggcggaggctgcagtgagcggagattgcgccactgcactccagcctgggtggcagagcgagactccgcccctccctccaaacaaaaagaaagaaagagagggtgctcctgggtgaagatgtcagatacctgaatggataatgcactcttcttgaactcattccttggaatctcttccgagcctccacagtactaaccagtgtcttgcttcctttttcattgtgtgtgtgtccgtatgcttgtgtccacggtggacccggaactgcaggacgagattctgacggtgctcaggagagtggatgagaactgggcggaaggcatgctgggagacaagatcgggatcttcccgctcctgtacgtggaggtaagaccgtgccgccctcccacacttggctccttcttgcccacccttgtttcactacagtggggtcacctgaccttcaagccccttttctaagagagaaagaggatcctccacaatagcctctggccagagagctgctatgtgtgggctttgattcacctcatggggtcagtgctgtga

SEQ ID NO: 24245 - DNA, 2300 bp, Homo sapien
gggatctgggctttagatgtgcggtccaacaccctggtggcccaggggcatcttctctcagcccttactgcacaatcctcacccacaaaagggctgggggtgcaggggcccagccaggcttcgggcaagcatgcccctgtggagtttccccagggcagagggaggcccagctagtgggagtggggatggggccctgcctgtcagactctaagcataagggccgagggcacaaggcccaactggttcgtccttggcagtgttttagaggaaggctctcctggggccaccacagctgcttttcagccttgttcctcctcctctgtggcttgcaggatgggtgtgggatagcagagcaggggggtgtgtgtgtatgtgtgtgtgtgtcctgtcaaacataatcatagccggacactagtgaaagtagtcagacaggttttaatcggcaacataactgacatttgcaatggggaatagggtccaggctgagctgagctcaggttcaattggcacacaagtgactgggggtttccaagagagaatgagggagcagggaggcagcgagtgggggctcaggagagtgggggaagtgaaaagttacagatggtggaagcgggtggtccgtgtgaacacatctggacatgctgacgtgctcactgaagtcaggagacagtgtgtggctgtcctcaggtgtggctggaacccacagtcgattcttttggctgccgtgaggtttctcaggcaggcactttaaaggggactggggtcagcctagggatgccaccttgagctgttagaagctatgttagtggttgttcaagttgttataggcagaggtgaggcccagccaagaagagggctcagaggagccaggctggagtgtggtcgaggagagaactcttggtcagtgccacagctaagtgttgccaggagcacctgccacagcccagagagcccctggggtgcactcagagctccagcacctgccacgcagcacaccccatgcccctgggtccctgcaggcggaggccatgcagggaagaccccagggaaggctcctgtctctgattccacactacagcatattggtctgaagacagggactccaaagaggcctcagaggctgcagggggcccaagtcttgtggaaatgagatgtggggaaagttgggccttattgatgttgatgttgtggcctcagccagttccaatgctaaggcactgggaaaaaaatcttatgatttttggagcacatttaaaaataaggacaggttaggcacggtggctcatgctcgtaatcccagcacttggagagcctgaggccagcggatcacttgcactcaggagttcaagaccagcctgggcaacatagcaagaccccatctctacaaaaaaaaattagaaattggctgggcatggtggtatgtgccttggtcccagctattcgggaggctgaggtgggaggcttacttgagcctgggagctcaaggcttcggtgagctaggatcataccacggcactccagcctgggtggaagagcaagaccctgtctcaaaaaaataaggacaatttacataaacaatgttccaagtacctttcacacatcacattgggccccaacctgtgaggtggtgctgcagttgaggagcgtgcttttcagaggaacctgcagagggagaggtgaggacacgagcccagggtcttgacactgggatggggcaaatggggacacagtttttcctgaccctcccccgcccctgcccctgggaggccgcagtctaggtgggtgggccagggcaggagcgtggatatgagatggggggctgtgcttgggtggagaatcttcaagggagtgaaacagtccagcttcttcgtagatcagcgtctaaaaggacagcagggggaaatgccttttaaattttttttattaaaaaatgaaaaatttccagagttttgaaaaaattaaaaataaagataaatagaaattgtataaagtgggaaaatagcagcaaataacaataatttacaccgagggaagaagagaaagcacgacccagcagatggagattgtctgtgtggggctcacccactgtgctgtttccccaggtaccgcgtggtggtctcgtacccaccccagagtgaggcggagatcgagctgaaggaaggcgacatcgtctttgtgcacaagaagcgtgaggacggctggtacaaggggaccctgcagcggaacggccgcacaggcctcttcccgggcagcttcgtcgagagcttctgagaactggtgctccctgcacccagctcaca

SEQ ID NO: 24246 - DNA, 2300 bp, Homo sapien
ggagtgtgtttgtagattttggactcccttctttctggaattttctccctgaattcccaaccaatctgcctgccccaatctccaatggacatcttaacccattaagactataacttccctcctgagctctatcttccttttgccataatgactagggagtgccttcagggaaaaagctagataaactcatctcacctgataagtttccttccctcaagtcttattctgtccagtgtctatctgcctttggttgcactctagtgacttaaaagggttgcttgtaattgttaccagtaggcaggtaagtttgacctaagttactctgccattaccaggagctgaacctgtatctgtacttttgttttgtgcttttttttcacttgacattttaatgtaagaattttctaagtttttatcataaacaaatggactttaactttttattttgtaagtgaatatgccatagttggatattttcctattttggaaatcgaatgttttaatgttatacatagtgctagactctcgttgtatgaaggggataagaaatgtatgttttgaggatctggacacaggtttcttttcctgaaaatttacttaatcgcttgtatcttaggtgaggtataatgattataaaaattttcatttatttgatatatttgtccttcaagtgtgcctacatcctatttaagtcaaagttgttttttttattgctgttgtttttgtttttattttccttcagaaaagagaaaacattcgttcgttgactatgtctggccatgttggttttgagagtttgcctgatcagctggtgaacagatccattcagcaaggtttctgctttaatattctctgtgtgggtacgtgccacctactcttcctctaagttgttccttcatattccttgtgctcacttcattcttgtcatgggcagaacaatgctcatgttatcaatttgaaatcatgatcccagggattctctttagttgtttagattctgttagttttgtttttcttagctttaagcttttggcttgttatataaacatctcagtgttgttgtcagagtcctgagtagcttagcacacttactctatgctctgctaatgacttgggggaccagccgtagtgtgtatttctttcatgcgcaccctggcctttgaaatatttgggatctttgaaaccactctaggcatttacagttgtatttcttttcagccattcatgcaaccataaagatgtacctttgtgtgtttcaggggaaactggaattggaaaatcaacactgattgacacattgtttaatactaattttgaagactatgaatcctcacatttttgcccaaatgttaaacttaaagctcagacatatgaactccaggaaagtaatgttcaattgaaattgaccattgtgaatacagtgggatttggtgaccaaataaataaagaagagaggtatgtgttttcttcttgtaataaaacaagtttttcttatttcaagacattcgccttatagccccatgaactatgatttgattttctcctatggtaatccatacctttccttccacacattgttttaaaaataaaataattaaacaatattttgttcttattagcacattgacatttttctagccatttgtctaatttctttagaataatttgaatcaccttattaaaatgtgcatttcagcaaaagtagctttaattatttcctgacatgcaaattcagtgtatattaattatactaattttcaggcagggcttatctccttgaagaaaaaaaatacaagacatataagaacaatatatacaatggccaaatacatgatgcttgaattttttgtaaaattataatcaaattagccagttacattattaatcattgcaggaaagttttgatagtgaaattttaatttatattttaccttgtgtctctatttgttttaatatttctcctaaggtcgtataaagattgagtagagattctatgctctatcaaatttaaactatgaaagggggaaaaggattggtaaagcaataactttttgttcgttttcctttttgaaatgtgtttcaatttttttttttttttttttttttgagacagagtctcgctctgtcacccagtctggagtgcagtggcatgatttcgactcactgcaacctccacctccccagttcaagcggttatcctgcctcagcctcccgagtagctaggattacaggcacctgccaccacacctaattttttttgtgtttttagtagagacgggtttcaccttgttggccaggct

SEQ ID NO: 24247 - DNA, 2300 bp, Homo sapien
ttttatcttttttctttctgtgagatttttagcttggataataactattgaacaaatctgtcttccattatttgatctgctgttagtactaaatatattttttacttcagatgttgcatttttacattctagaaattctgtctgctgctttttgtcgttgcgagctctttcatatctttctgtaattccccgtcatgccacccattatatccatctttttcctgtagattctttagcatatttgttatcattatttaaagttcttacctgctaattaaacatctggttcattgtggctctctttctgttgactttctttcttgactgtgaatcacatttttctgtttttttcctgtcataatttttttattgtatagtagatactgtagagatgctagattctgttttcttcttctgcagagtcttgaactttgttctaacaggcaattaaattgctgactgatcacattgatcatgttgagccttgttacaggctttgttaaggcaggtctgcttcagctgtgctttctgattgctgagttatggaccttactcctaaaatgtggcccatctagggtttcagtagaaggcctagggtgtttacaggagactctttaacttacaggcttaaaatttaagctctgtccatctctccaagatggcacttgaaaactctgcatagctcctcccaattcccattttcccccttctgggatctttgtattccctctgtatgtgtgcagtttggccatcagccatggatttgagtggagtgtgtttgtagattttggactcccttctttctggaattttctccctgaattcccaaccaatctgcctgccccaatctccaatggacatcttaacccattaagactataacttccctcctgagctctatcttccttttgccataatgactagggagtgccttcagggaaaaagctagataaactcatctcacctgataagtttccttccctcaagtcttattctgtccagtgtctatctgcctttggttgcactctagtgacttaaaagggttgcttgtaattgttaccagtaggcaggtaagtttgacctaagttactctgccattaccaggagctgaacctgtatctgtacttttgttttgtgcttttttttcacttgacattttaatgtaagaattttctaagtttttatcataaacaaatggactttaactttttattttgtaagtgaatatgccatagttggatattttcctattttggaaatcgaatgttttaatgttatacatagtgctagactctcgttgtatgaaggggataagaaatgtatgttttgaggatctggacacaggtttcttttcctgaaaatttacttaatcgcttgtatcttaggtgaggtataatgattataaaaattttcatttatttgatatatttgtccttcaagtgtgcctacatcctatttaagtcaaagttgttttttttattgctgttgtttttgtttttattttccttcagaaaagagaaaacattcgttcgttgactatgtctggccatgttggttttgagagtttgcctgatcagctggtgaacagatccattcagcaaggtttctgctttaatattctctgtgtgggtacgtgccacctactcttcctctaagttgttccttcatattccttgtgctcacttcattcttgtcatgggcagaacaatgctcatgttatcaatttgaaatcatgatcccagggattctctttagttgtttagattctgttagttttgtttttcttagctttaagcttttggcttgttatataaacatctcagtgttgttgtcagagtcctgagtagcttagcacacttactctatgctctgctaatgacttgggggaccagccgtagtgtgtatttctttcatgcgcaccctggcctttgaaatatttgggatctttgaaaccactctaggcatttacagttgtatttcttttcagccattcatgcaaccataaagatgtacctttgtgtgtttcaggggaaactggaattggaaaatcaacactgattgacacattgtttaatactaattttgaagactatgaatcctcacatttttgcccaaatgttaaacttaaagctcagacatatgaactccaggaaagtaatgttcaattgaaattgaccattgtgaatacagtgggatttggtgaccaaataaataaagaagagaggtatgtgttttcttcttgtaataaaacaagtttttcttatttcaagacattcgccttatagccccatgaactatga

SEQ ID NO: 24248 - DNA, 2300 bp, Homo sapien
aggttactaactgggtgattccattatataagtcttggaatgacaaaattataagaataaaaacgaatcactgattgtctggggttaagaaggaggcagggcaggaaagaagtgtgtgtggttataaaaaggcattaagggatcctcctggtcctgggaacatcctttatcttcactgtatcaatcaatgacaatatgctggttgtgatatcgtactatgggtttgccagatcttattgtggaaaggtggataaagggtacagggttctcactatactgtattatttcttacaactgcatattaatctacaattaacgcaaaatacagtttaattcgaaaataagtaaagttagcctcaaagcaaattaagtacaattaaaaataaatctaacatcagctaaatgaagtgttctcttctgctcaagcttgtttggatacgtaatctatgaatcaaagaatttataaaacacattttcctcaccaggacccctcaattttccctcactcacacatgcacacaaacacagcaactgagacaagggggtccagacagaaaatttgagatttttaaaaaatacgcgatagaatgaaaagagacctgggctgaatcagggagaaaaatctttgtccaggttctataaaacaaaccaacggtgtcactttggacggatcctctaatctctcagcctgcaatctgaactgtttctacaatttaaacttctcatgtaggaggttgcttagtagagtggttctcaaactttttggtctccagcctccaaagagcttttgtttacacagatgaaaaccaccaatgtttactatcaaaaattaaaagggagaatttgtttttaagaatacacaggcatcgggcctccaaacggcggtgagatcactccataccatgtagcctttggaaaactcgatgtacacgaccttggtactattaacgaaaatagttgtaaccacacttggaaaaccgctggcttactaacaagcgagataaatctacaaaagtaactggaaaggttcaaaacagtgaacaaacgcgttcttttagagtacaaaagagtcaaggcgggaaaaaaacggtttaaaatcccaatggaggaaaacttggacgaccacaccatcggataaaacgggagagcttttgaaaagccaggggagccgggctttctcccggcggcagggaggctcggaagtgctcacggctgcaaaagatgaccgctattcaatcagtccgcactgcgccttcaactccgttatagccgtaagagacccacaaacaccgctgtggatgtaacttttggcaaagaccgggaagtcgttcaagaactctcccaccgtcccgacgctggcgccgcgccccgcgaaccggggtccggccgcgcccaggctccgcagaggctcctctcccgccccaggcgcccggccgccgcggaagccggggagcactgggcgggcggggccggagggggcgcgggtcacaatcccgggccggaccagggggccggtgggtcgagggcgggaagtcccgcgggggccggggagcgcggggctggggccccggcgtcggcgggactcaccaggtgccgcgccacctcggaggaggccatggtcgcgggcaggggcacggtgaagcggctgtatcagcccggccccgagcggctggtcccggcgacggcggcgggaaggccggagggcagaagcaacgggcggggcgcgaggctaggctgcctccgcgacggggaagggacaggggcggggccgagctggaggcctccgggggcggggttggggcggacgccctgtggtgcgcgctgagcgttttgcctgcgccaagcgagcccctcacaggagctaccctcgacgcctgaggactgagcgtcagcgttggggcgggctgaaggagagctgggactccaggaagacggcgcgaggaatgcaggcgggaactgcggagcagtgattgcggccctcgcgaggccggaagtgggcgggccttgaggcgaggccgccctaggtaggtgtggccgagacagcggggagcggaagtgggcgtggcctggtggcgtgggcgcggggcgggggtgcggggggcgtgtccgcccgggcgcggcccagtgaggcggtggccgagtcctctggcctcagacgcgtaggctggcagcccgctgagcccgccagactccgccgccgtcgggagccggccgctgggagcccgtcgctatgggaccgcgctgagccgcccgctggcgggggagcagcgcggtcgaggatggaggggccggcagagtgg

SEQ ID NO: 24249 - DNA, 2300 bp, Homo sapien
ctccagggcagggaagtggagggcagagaagaggtacaggtcaaggtatgatgaatctctgaaaaagacatccacttttcccagaaggctagcctgaagagaactccgccccatccattccgatccctcaagtaagaatgcataatttagcttgtccttctggtctcacttccttacaacacctagtattcaatttattaagacaaataaacctttgcattttctaaaagaagcaatttttacccaaatacattggactttggtctcaatgtgaagggcgagtggcctttaacaggtcgttcctcccccactccctcctcccccctgccctccagcggctgctctgggtccctgaaagagggtgtggtgtggacgatctgggttctgaatcggattttgttgagtctgggttttatacgtccactagagctgcccgaggctttgcgccctggatccttggctttgcctccgacccacccctcagccgagtggtgatggtggtgatggtcccctccatcttctagggcgtgtgagagtttgtaggtgatgagatgcgagggaagcacctttgaaagcctccagcgcccgccgccgctacccgcggcgctttccccgtcaccctcgtccagggctcccaccaggttcttgatctcctcggcgatgctccgactcaggtactgggaggcctttttcccactgtagtccctgatgtccacatcggcgtcgtaggcccccaccagcagcttcaccacctccacgtggccgtgcatggctgccaagtgcagggcggtgtaacccccgctcgtcctggcgtcgatgttcaccggcagctggtgtttgttggcgaagttgactagcatggccagaagctcctgcctgccgtgcttggcggcccagtgcaggcaagtgaagccggtaatgaagtcccgcttgaccagcaggccgggctcgcaggtgagcaagccctccaggctgtcccacttgccatcggaggcagagagcatccacgcgtgctccagggggtccagcgtcacggagcctccgccgctgctctcctcctccgcggacgacgaggccaccgatgcgctgtctgagtcgcccccgcctctgccgcgtcctcccccggaggagctgcccgggctgctgcccccgggacacacgctcctcttcagctgcggggagctgcccatcaccaggtcacggaggttctggcgggccggcctctgtgcggtagcccccacaagggagctgcccctgtccgcctcctcgcagccatgtggcgggagctccaggtcctcgctgggccccggggctggagtccgcggtaggggctgcacgtcgcgccgcgagttcttcctgcgagccccggcgctcaggggcggccagtgcgcgggggcggggggctctccctcgcccagctcgcggccctgtccagggagcgactccggggccgccgcgtcggggagccgatcgcgcgcctcgggcccggcagggccgtcgggggcctcgggctcggcggtcacctggattcgcggcgggtccccggagggctcggacggcccttcacagaacctcttcttgaggtgcacgtacttggcgccgtcggcgggatcgacgcgcacagtggccacggcgttcaccagctccttgaagtgcgcgcgggcgcgggcgcgctgctccggttcgccgcctagggcgcccctgaagtgctgcaccagctcggcgtgcagggcccggcccccgcgctccgccaggaagcgcagcaccgcctcggggcccagcgccgcctcggggccccactctgccggcccctccatcctcgaccgcgctgctcccccgccagcgggcggctcagcgcggtcccatagcgacgggctcccagcggccggctcccgacggcggcggagtctggcgggctcagcgggctgccagcctacgcgtctgaggccagaggactcggccaccgcctcactgggccgcgcccgggcggacacgccccccgcacccccgccccgcgcccacgccaccaggccacgcccacttccgctccccgctgtctcggccacacctacctagggcggcctcgcctcaaggcccgcccacttccggcctcgcgagggccgcaatcactgctccgcagttcccgcctgcattcctcgcgccgtcttcctggagtcccagctctccttcagcccgccccaacgctgacgctcagtcctcaggcgtcgagggtagctcctgtgaggggctcgcttggcgcaggcaaaacgctcagcgcgcaccacagggcgtccgcccca

SEQ ID NO: 24250 - DNA, 2300 bp, Homo sapien
ggaagactgaggcaggaggatggcttgaacccaggaggtggaggttgcagtgagccgaaatcatgccactgcactccagcctgggtgacagagcaggattccatctcaaaaaaaaaaaaaaaaaaatcctcacaataagtgtgctatttgtggatcagctgtccatataacaagtgacatgaagtaagttctaaaagctttatgaatgtgaccaagtctcatgctacaaaatgacagagctagaatttaaaccaagctctgcctatctctatctcaaatttctacatgtgtttgtcttgagagaggtggacaccagagtcaggttttactggaatatgtctcctgtctgaccagcgagaagaggcttttccttgttatcagagccttgtcttttcagtctgaacacacagtcactaccctaccccaagcccaggttctactctatgctcccacgtctccttatttttactctaaaccaaaaagtgcctgagacagatcttcgttgattagaggtttattttgcccaggttgagaatgtacccaggaaaaagaaatgcaagttataataggatttgtgacctatgctttttccaaagagggttttgggaacttcattatttaaagggaaaagagcaagcaggaggggaagaaaaaagaggagggagggtaggcagcaaggcaagtgctttcattcttgtggggctctgattagcactcaatgaatccacatttcacataacgcaagcatgtgaaattacagccatctatttgggaacaaaaggaaggcagtttttgcctgactcagtctcccacgcttaactttccctttggcatagtgagtttggggtcccaagattctacttttccttcacattactcatccttactcattgcaacacatatgtaccaaagaccaacagttctcatgtccacctgacatttcgcatctattgatcaagagtccaatcccagatgattccaaatgtcaccttttccctggcagtatttgccctaacagataggtgctatgtcaaagccaccctttgactgactacaatcaccaaggatcttcctgttcataaatcttggtaagatcacagttatcgccctgtaattaaattccatggagtgtttctcagcatttgggttggaactaaagcagaattggaacgtaacctctttttctcaacagattcagagtccttgaaacttgcatgaatggccagggcacatcttgaagacgcatgacaaagaacctgtggggatattaagatttaagtcaggatgattggttcttgttaccagcatcaaaggatcttctcatatcacaaaataatgagattatcccccaacattggtcagcatggcataaaatacatgatctgtgataggagatgcttttctgatccgcttttatgaaaagtaaatgtccttcctgcctgcattttcaactttagtatgtgtgcctgcctttttctttttaaaatgtggtaagcttcacccaccagcctttagtaccggctgtataaggagcaactaacaccaagacatacatgcttatgccccatccactttattttaaagcactcttcaatttgtcaatactttaattctctaagcagtgttatagtggctgaccacttttgaaattatctttgttttgtttggtacttgaagggcatgaaaaacttccctccacttccttcccctctcccggggctcattttcccctctcttttctctgccctgcttgccctctgaccctgccgagctctgctgtttccacagacttctgaatctaattaatgtcatagtgactatataagtgaattatgtaggcaggaggatgcgggaaactttggggaaggtgcattccttagggaaaaacctggttttgttaaaaaaaaaaaaaaaaaaggaaagaaatgcacattcccaggaacactcattcccagggggtagaatgtcagtgaagcataaaacctcagcaactacttacattcaataaatatctgttgtctgatgagcagacggaaccctaagagcggcggcggcggcggcgcagggccgggggcggggccgggggccaggcggggcgggggcggcggcggcggcggcggcggcggcggcgcagggccgggggcggcggcggcggcggcgcggcgagctcgctgctctctcttgagtgtgcctgcgcgcaagccggggagcgggtgagtgcgccggccgctgcagccagcccggccggcccggagtcgggggcggggggcgtcgggagccccgacctgggggcgggcggc

SEQ ID NO: 24251 - DNA, 2300 bp, Homo sapien
ctcaaccgaggtgaggggaaaagttagggagccttaggaaagctctgaggagggaccccaattagggggaccgtagttagggtatgaggtttgtgagatcaggactggaattgctgcaagagaccctatgattgggtggcagcagcatgttgtggagatgagcctgcttcctcagcctcttcctcttgtcagaaccctttgcctctccctacacacgcacacacacatgcatgcaccatgctacagaaacctttctcagtcttgccattctctcaaattatgcgttggtcttcccttcatcttcagattctttaaagagtaatcaaagttcccacttctagcatgatgaagtgaggaggtcaacaaatctttccaaaatgtaactgtatagctggacaaaccatttagcattctgcaattttaccaaaggcacggcacaaatggggatgtgtttaagaatgaaagctggccaggcgcggtggctcacgcctgtaaccccagcactttgggaggctgaagcagaaggaccacttgagctcaggagttcaaaaacagcctgggcaacttggtgagacccccgtctgtacaaaaaaaaaatcaaaaaaggcatggtggtgcacacttgtggtcccagctacatgggaggctaaggcgggagaatcatttgagcccaggagattgaggctgcagtgagctgtgatcacaccactgcactccaacctgggcaacagagtgagacagaccctgtccctaaagaaaaaaaagaagaattaaagtgagccttggataagaccagcctgtgtccgtggcatctttgcccaggctgctacccccatttaccccagctgttgataacacacacagcggcccccagcagggcagcctgtggagataagctcccctgccacctcgctgcaggggctggaggcaagagtgaggaaggttttgatttgcagcatggctagttaaggtggtgatatcagtgaccaggaggaagaaaggccactgactcctagcctgaggctctgggcctttggagacgagcaaacgacctgcagattagtcatggatgtaagagggagctccgggaggtcggagagccagagggagcttagtaaactcttcacactacccaaatggactgaaggctcatagctggcagagattagagcaagcccaagccatgtccatatgcccagggcacacagcctgtgtgtgtgccggtgccagtgttaggaagtaaaagccggaacacccttgcaaatggcccggggcgtgcctcctccccattgcacatagatccagcagcagatggtggaaaccatattggctttaactgatgtttgactgacgaactatgcaaacaagaagcgacctctagggagtcagtctgaaaaattaaagcaaacaaatgccaacaataaaacttagcaatgacctgagtgagtgcacactgtggaggagacaggcttcctgcatggagtccagccaggagacagtacagaatgcatggagcagctattggaagacattgaaaactaaatagttgcaggcagctttcccaagaagaccagaacttgaagtaccaccaaaccggtggtgagataaccatgtttcccctatggcatcccgtgactaacctggcagtgggcaccagggtgcagatagaaagagctccagaagatgccctctatttctggctcaagtaacgggaaaagggtctcctaacattccgagggaatccagaagttcgttcctccccatttttcttttccctgttctctcatacctcagcccacaagcagtcccacagtggcactggcaccagccccaagaggagcccaggagccaagacgcaggagggaaccttctccaactgacagagctgtggtcccaagagggcagaaacaatccatgttgcttctcttccaattcagtcctcccactgcttggcttcagatgtagaaatgcatggtagagccagataccgaaagcctgttttctgcttggaagactaaaaagagaagcctcagcaaatgaaagcaacagggtaattgctgagagagagttaatcagtgaagcaaccccattaacctgtctataaaccccagggctcattcttgagctgctcctgcatagatctcgtcctgttcaacacaccaaagattgacagctgaactgagagaccatcacccacagacacaactggccactgggtggtgcacaagtcagacagaactgaatagtcctgtgaagactctggacactgaactgactttggaaccagactgcagaatgga

SEQ ID NO: 24252 - DNA, 2300 bp, Homo sapien
gtgactaacctggcagtgggcaccagggtgcagatagaaagagctccagaagatgccctctatttctggctcaagtaacgggaaaagggtctcctaacattccgagggaatccagaagttcgttcctccccatttttcttttccctgttctctcatacctcagcccacaagcagtcccacagtggcactggcaccagccccaagaggagcccaggagccaagacgcaggagggaaccttctccaactgacagagctgtggtcccaagagggcagaaacaatccatgttgcttctcttccaattcagtcctcccactgcttggcttcagatgtagaaatgcatggtagagccagataccgaaagcctgttttctgcttggaagactaaaaagagaagcctcagcaaatgaaagcaacagggtaattgctgagagagagttaatcagtgaagcaaccccattaacctgtctataaaccccagggctcattcttgagctgctcctgcatagatctcgtcctgttcaacacaccaaagattgacagctgaactgagagaccatcacccacagacacaactggccactgggtggtgcacaagtcagacagaactgaatagtcctgtgaagactctggacactgaactgactttggaaccagactgcagaatggaggggtgggaacttgtggcttgaacctaatcaggtagattgcctggccaaaatgaaaatacctatcatctccataggatttaatttcattcaatgatttttttttttttagtaaatttgcaatgttttacagccttccccaaaatctaattccaaaatatctctatcaccccaacgagagactccattcacgttggcagtcacatgcactcccagatttcccctccacccagcccttggcaatcactagtctactttctgtgtctttgagtttgcctactctggatatttcatataaatgaaatgatatatgaggttttgtgattggcacctttaatttagaataatgttttcaaggctgattcatgttgtagtatgcattggtacttcattattttttatgcaaaagtaatattctattgtatggctataccacatttttctttgagacagagatctcactatgtcgcccaggctggagtttagtggctcttcacaggcctgatcacagctcctgcatggatcaaggagcatcactgcagctgcaaactgcagcttcaaactctccggctcaagcgaccctcctgcctcaacctccccagtagctgggcctacaggcacgtgtgtctgtgcccaataataccacattttaaaaatccatcttcagtagatggaaatttggattgtttccaccttttactaataaaaatagtactgctataaacattcatgtataggttttcttttgtttttgttttttcttttttgtagagatgggggtctcgctgtgttgcccaggctggtctcaaattcctggactcaagtgatcctcccatcaaaaactcccaaagtgctgggattacaggcgtgagccactatgcctggcctgtatacaagtttttgtgtagacatgtttacatccaattaatgaacacaggatgtctttccattgatttagctcctctttaatttccttcaacagtgttctgtagtttccagtctacaagtcttacacttttgggttaaatttattcataattattttattatttttgataatattataaatggaattgtttacttaattttacttgaattgttccttgctggtgtataagtagacatctcatttttttagttgacctcgtatggtacaatctctttgaactcatttattatcactgatagtttaggtctttttttttcgaggtttcattaaggttttctatagataagatcatgtcaagacaccctcagaccacagggcggcgccacgagcccggccgagtgcagctggagcgccgacgtcgccgaggatacacagtgctgaggcagaacgcaggttcgtcacagtgggcctccgtgggcggcgccgcacgctcgtcacagtgggcctccgccggctacgccgctgcttcagtggcttgcaggcactttcctcttggaagtggcgactgctgcggggctgagcggtgctcgcacgcgtctcgggagccaggttggcggcgcgatgaggcgcagcaaggccgatgtggagcggtacgtcgcctcggtgctgggtctcaccccgtcgcctcgacaggtgagtgggtctcgaagagagcgacggcggcctcgacccggccggggggcg

SEQ ID NO: 24253 - DNA, 2300 bp, Homo sapien
gatttatcactcagactgatgctaaggaccagcctagattccattgagattgaaactgtaattagtgttttctgcatgctgctgctttataccaagggcaagaaattgtttggcttaaaacactttttctaaaaattgtcttctgttggagtaaaagaggaccatgcctatatcttaatttgtttttggttagatatctgataccttaatcagatggaaaatagcaatgaataaaaaattaaactgtaattgtaaggcaggagaatagcttgtataaaagatctttaactgacacaatatgtgatgctctaaggctctatcctagggatgagaagcttggtgattctgatttcctggctgggagtggattaaagcaggaaattaagagggaggcaggctttttttttttttttaggcagtatctgtctctcttgctccggctggagtgcagcagctggctccatctttgctcactgtaacctctgccttctgggctcaagcgatcttcccacctcagcgccccaagtagctggggatacagatgcgcaccaccacgtggacctggctaaggtttgcattttttggtagagacaggtgtcactatgttgcccaggctagtcttgaacttctgagcacagcagtctgcctgcctcggcctcccatagtgttgggactacaggtgtgtgttactgctcccagctgggaggcaggcttttaaaggcatccaaaggaagatggaaatgctggtaagaaaggaaaatggtggtacataaattatgtaactagcagcactgtgactgttaactcttgtacctttttactgtgagactttaatcccttagtttaggtctggcctaatttctctgatcgtaatactgtcaaggaacctagaggatatttacttattttagttgttacttgatttgagaaatggaaatttcctgtatttggtactgtaattagtaatttttcttctgttcgattttagctggatatagtactgttagaaattactttcttgcttaaagggtaaatgtatttccctttgttgtttgggaaattgttgctgtttagtattttgcattatgataactttaaaaatgtttattataatcacttctaatttattggcaaaactgttagtgctttattaaaatgtgatcaggaagaaaaagcaatctatatgttcatttcttatgtgtggttaacactggagaaaaatttggtaaatgtgacatttaatggtaaaatgagtatgtggtcaactctatgtacgtgtttttaagtattacccatttctttctatgaatacttttgagttatctgcataaatagtggtagttttgagtaacaatataaacgagtttagtggttgctttggtttaagatgtattcttcggttagcatttaaaagtacagttctaagtttaatttacttttgtattacttttaaaaaacagatacatatgtacttacattaatgtgcaagagagggatcccaaagctcacagatttctgggtcttctttatgaattggaagaaaacacagagaaagccgttgaatgttacagggtaagttataagattcaaatatagcctttgcgtagccaaacacatgatgcccagagaaatttatataagtaagtcaaatatattttatgaatatcataaaacaggcattggtatcatagtacaattatgtgatacagcttggaacagatttagaattgtttaacacctataaattgtaagtctaacacggtcagaaatggtgttcttttgtgttttttgcattcaaatgacacaaatataatttttatttgattcatttctagaaaattccaagacacttttattttaacacctttaaagtaacatgttttctctagaagtagaattttttaagggttggagtgataatttttaacctttatgtataagtatatatactcctacatacatacatacaatttatttactaatctttaatttcttttctgatattagcgttcagtggaattaaacccaacacaaaaagatcttgtgttgaagattgcagaattgctttgtaaaaatgatgttactgatggaagagcaaaatactgggtcgaaagagcagcaaaacttttcccaggaagtcctgcaatttataaactaaaggtaaacaaacaaaacataaagggagaaaacttaagacataaccatttctaatatttggagtttaaattacttttcaatagcaaaccttaagctcaggtgtttgtgtttcctttaacatttttcttttaaaaagtgtatta

SEQ ID NO: 24254 - DNA, 2300 bp, Homo sapien
tcatggctcactgcaacctccgcctcccggattcaagtgattctcctgcctcagcctcccaagtagctgggactacagacgcacgccagctaatttttctatttttagtagagacgaggtttcaccatgttggccaggatggtctcaatctcctgaccttgtgatctgcccgccttggcctcccaaagtgctgggattacaggtgtgagccaccacacccagccattttgttgtttttttatctataacaattatatatataagtatatttttaatgtgccacttattaattgaagaaagtggtcatttatgctatagcagttctatatttgggttttaatcattacagggtaacactgagcttgttccaattgcctataaataggaagatccaggtgcaattgggtgggatggtggacaaaaatacatcatagatggtattgtgtgctttctaagacatgaggaggcccagaatgtccagacaacttacttttgactgattgaccttatctagttggtgttctttaacatgttccccatcccctgtaaaccctaataactaaactgataagagtcatcctcaaaattgagcaggcatctgaatcatctggtatacttactaaaattccaattgctggtccccaatttctgacccaagattctgcatttttagcaatttgttgctgatgcttctggtctggggcccataccttgagaacccccggtctagaggcctgataagattcaggcttaattttttttacagacatacttcataagtagtattgatagtttctttgaatctggtttttaataatctttctaatgatgaaggaggaatgttctcaatactgacagtaatctcagttcttcaaactataggataggtttctatagccacaatagtatttttgtcacaagggcccaaataagaatacatcatgtatatttttaatacttattcaaattacaaattcactgtctttaatttattctaacaaaagtaaacctaattttatagttataaaaaagaagaaatctacttctagtcacctaagagtaaaactgcccttataaaaaacaagacagaaatctcaaaattataactaattttatagttataaaattaaccaggactttaagaacgtttgcattttaaaattaaagttttcaatagttttcaatacaacaatgatactatctcaaaatactcagcatgtctaacaggcctcttttaaaagctcagcatgtttaatgtaggtgttgctaacgtccaggtggctcctataagttaagggtccattgatttagaagttctaaaagagactaacctaagggataccaataacagatatttttaaagaatttcatagaggagatacacattagaaacccagaactctaagatgtgcatttgctaagtcctgtaaacagacaggaaaacacatttacattagtttgccctttaaagattatttcctacttgtctcttatcaatgtgagtacataaaagagaccttattacaattaaaaacaatgatggtttagcagcagatttagataccttacattctctctttaagagagagaatgtaaggcctggtgcggtggctcacacctgtaatccagcactttggcaggccgaggagggtagatcacctgaggtcaggagttcgagaccagcctggccaacatggtgaaaccccgtctctactcagaatacaaaaattagccgggcgtggtggcgcatgcctgtaatcccagcaacttgggaggctgaggtaggagaactgcttgaacccaggaggcagaggttgcagtgagccgagatggtgccattgcactccagcccaagcaacaagagcaaaactcctatctcaaaaaaaaaaaaaaaaaaaaaaaaaaataaaaaaaaaaaaaaagaatgtaaactacaagatggttcaaaagaaattacacggaattcagcatgggagaaacaaaaaacaagagtgggaaaagacatcaaacatgtttttactaatcgaagttctaaaaggagagacgagaatacagcacagataatatatgaagagaatggctggaaatctttcagaactgttgaaggatatctatccacagattcaaaaacccaataaaatctcaagcagtattaaaaaaaaaaagaagaaatctacttctagtcacataagagtaaaactgcccctaaaaaagacagagagaaatctcaaaagcagccagagaaagaagacacattgcctcacaatagacttctcaacagcattggtgtaatactatct

SEQ ID NO: 24255 - DNA, 2300 bp, Homo sapien
aacaatgatactatctcaaaatactcagcatgtctaacaggcctcttttaaaagctcagcatgtttaatgtaggtgttgctaacgtccaggtggctcctataagttaagggtccattgatttagaagttctaaaagagactaacctaagggataccaataacagatatttttaaagaatttcatagaggagatacacattagaaacccagaactctaagatgtgcatttgctaagtcctgtaaacagacaggaaaacacatttacattagtttgccctttaaagattatttcctacttgtctcttatcaatgtgagtacataaaagagaccttattacaattaaaaacaatgatggtttagcagcagatttagataccttacattctctctttaagagagagaatgtaaggcctggtgcggtggctcacacctgtaatccagcactttggcaggccgaggagggtagatcacctgaggtcaggagttcgagaccagcctggccaacatggtgaaaccccgtctctactcagaatacaaaaattagccgggcgtggtggcgcatgcctgtaatcccagcaacttgggaggctgaggtaggagaactgcttgaacccaggaggcagaggttgcagtgagccgagatggtgccattgcactccagcccaagcaacaagagcaaaactcctatctcaaaaaaaaaaaaaaaaaaaaaaaaaaataaaaaaaaaaaaaaagaatgtaaactacaagatggttcaaaagaaattacacggaattcagcatgggagaaacaaaaaacaagagtgggaaaagacatcaaacatgtttttactaatcgaagttctaaaaggagagacgagaatacagcacagataatatatgaagagaatggctggaaatctttcagaactgttgaaggatatctatccacagattcaaaaacccaataaaatctcaagcagtattaaaaaaaaaaagaagaaatctacttctagtcacataagagtaaaactgcccctaaaaaagacagagagaaatctcaaaagcagccagagaaagaagacacattgcctcacaatagacttctcaacagcattggtgtaatactatctcatgtactaaaagaaataactgccaaccttttatattttccaagatctcttctggaaaacaaaaactttaagaatctgccttcactggaaattcttaatgatgtacttcaagcaaaaagaaaatttcctaggtaaaaggtctaagatgctagaaagaaagacatgcaaaggaaacttaccaccatattacagatatggactgtcagtctgactggtcacactaggggcattttgttaccaaggccttgaaaataataaccaacactgcatacatgagggatgccagaagaaaggtctgagagccactcttcctggcactgaaggaaacagggcccatcagagcaaacaagtaccttttgcctctctcatctccttggaggcaaatgtttataatctctggttttgtgtaaagtttataacagtatttttcattcaggttgctacctattagtggatggtgaaattaatttggtggatcacattcaggatattttttttttaaatcaaaagaatacaagctgggctcaatgactcacacctgtaagcccaacagtttgggaagaccaggcaggaggattgcttgagaacaggagttcagaatcagcctgggcaacatggcgagaccctatgtctacaaaaattttaaaatatgccagatctggtggcatgtgcccatagtcctagctactcgggaggctaaggcagcaggattgtttgttagaaggagttcgaggctgcagtcaaacttctggtcgaaatcctggtcacgccactgcatttcagcctgggcaacagagtaaaaccccatctttaaaaaaatattaagaaataaaaataatatgtgaaacgttagaatatgttgaatctggtaaggataagcaattatttcttgaaactctacatacatacatgagtgttggtaaatacctgactgtatcatcagctctagatataaaatgtttatgatgttggctgtgagttaatgaggaatagttttcctttctgtgggtttgggtgtatttgggaaacattagcttaggagggtaaagtaggttacccaactctgaaaagcagcatcaaaatctttataataaacacatattaggggcccaacttaaatttcaagcagatgtcatgagctgctcagagtagcatgttacaactctgcgttataaggtaaaatgact

SEQ ID NO: 24256 - DNA, 2300 bp, Homo sapien
aatgtcagattcctggttttgctcctgtactgtagtcacgtaagatgtgagcactggggagactgtgagggagaattctgagcagaaggctcacgtggcttcctgcctcctaccatgccacccccaccggatgcattaaatttctggtctgagtcagcctgcctctgtcctcatccatctgtctgtctgtctctttctttccctccctccctgcctcctcactgtttcacatggtcattgtaaaaaagaaacctaaaaaattaggaaatgtagataaattgaaaggaaaaattttaaaccatgaggttgttcctttcttatttaaatatggtggttcccttgtttcatcagccataggctttgggcctgggcaggatctgtagcccacagcctttgaattcttgacctatcctctgagatttttaggattcaaagtagaaagacttggtcccctgcttccagtcctatctggtacccactccctcatcttttctggctaaccattgtgcttcccagtaattatgtttaacattttctcacatagggattaacaacataggctctggactcagagtgcctaggtttaaatcttgactccaccacctccttagtagttattcagtctctttgtgcctcagtttcttcatttgtaactaacacctatctcagaagccgtgggaaggattaagggatgtgataggaagcactcactgactcttggatatcattatttatggttgttacttggtgtctctggctgcattttgtttgtcgctgctggttccgtgactgtccatcagtgtgccttgcgcctgttctgtagattttatttcacagtctcttggttttggtgggtggcacactgccctgagaggacggggacgtgagaaagattctgagccctttagttgtctctagtgctacatcatgattgtcatcattgctgtaaaccaaaaagtatatgagacaagtcttactcaatttagaacatgtattttgccaaagttaatgacgcacccatgacacagcctcaggaggtcctgacaacatgcgccccggggtggtcggggtacagcttgcttttatacatttcagggagacatgagacatcaatcaatatatgtaagatgtacattggttcagtccagtaaggtggaacaattcgaagtagggggtttccaggccagaagtagataagagacaaaaagttgcattcttttgagtccttgatcagccttccgatgaatacacaattgtgtctggctcagtgaacctacatttttacgtgaacaatagggcagaggaagcaatcagttatgcatttgtctcaggtgagcctcaaagggatgactttgagttgtgtctgtcctttttccgtaaggagttttcttgcgggcaaatggtgagggagggatgtaggttgttatctttgtagctatcttatttagcaataaaacaggaggcaagtttgcctgacgtagtttccagcttgactttttccttggcttagtgatttagtttcctttcgcattgctaactcaatcacaggagacaggagtgtggactgaatatagcaagaatgccaaagtatgtaacagtttccttagtcatgatagagactgagaaacatcggctcacctaagctttgaggttagctggagtccagtagaagagttataactaaacactggcccttgtctgtttccacttgtgcccattcattgaagctgagattggactgagtacatttgtgactatgtaccagtagcaaaggtgatagaagtcaaacgtagctcttagttttaggggctcatggcctcctggggaagggacccatcaggcatagctggcagtcatggccagggttgtggaagcccaggtccaggcagggttcaaatgctcctcagagtgtgccagcagcctcagcctcagggagagcttgtcagggggatgttttacaaggtctccaaaagcctcttatgccctccagagtgaaaagcacggcattgttgatgaagtcttgtggcaaatatgcaaggcacgtgtggatatttctttctcttggaggcttacaaggtagccccggtctcctggtgcagtgtttatagcatagtccactgggactgccgctctgacaaagactgtgtcactactttgtggaatgttattttagaacttccagaatgcctcagtaaatcctgactgccatgtaactgtgtactgtgctgctgagctcttaacatgaagcagcagcagtgaccctggcgggccaggctgacgtgcgtgggaacagtgggagt

SEQ ID NO: 24257 - DNA, 2300 bp, Homo sapien
aagaataaatggaagatataaagaatcatatcgtgtggcagaaggtgataagggcaatgcaaggaagtaaaagatcaagggggaggggagcaggagggcagtggtgggctgaagagttcagtagggtggggatcaaggtctgcctccctaagaaggtacgatctgagcaaacacttgggtgtctggggaatgcatcatccaggctaagggaatagctagagcaaaggccctggggaatgtttgaggagcataaaggaagccattgaggctggagtggagtggagtgagtgaggggaaggggaaggagatggagccaaagacagcagggctcctgcgtgccctgccttgtgaaggcattggagaaggtttggcctctattttcaaccaccactgttgactttgcccctacctcttgattgtcacattgcagtgttttaaaaagaattccacaaaatcctgtggaatctaggggataactggcaaatagaattgggtggaattctcaggctgaatatggactttgttcattttcccagctgaaactacctagtagctgcagagtagagtagagatgcctctgtgctagtaggtctgggtttgcaatcccagtgctgccattttcaagctgtgtgacctgaggcagtctgatgctcctctctgaacctgcatttcctaagctctaatgtggatgttgtaatcagtacttcttatgggctgaattgtatctcctcaaaattcatgtgttgaagtcctaacccccagtatcacagaatatggtagggtctttaaagaggtaatccaagtaaaatgaggtccttagagcaggccctgatccaataggactgtccttattagaagaggaaacttggacacagatacacacagagggagcaccgtgtgaagacacagagaggagatggccagctaccagccaagcagagagcccttactgtaaaccaaccctgccgcatcctgatctcagaattttggcttccagaactgtaaggaaacacatttctactgtttaagccacttggctgggagtacttggttatggcagcctgagcagactaaaccagcacctcaaagagttgttatagggtatgcttagtggtaactggttcctaaaggccttgctttctaaggctgactcctcaccctgcaaggatgcattctccccactggcagatatgcaaccaggaacaggcattaacacgctttattcccagagttttaatattttccattgcataaaatatttgttcatgaaaatgacaaaattgctattagattctatcaccacatctctgttgattttactttctgcaaacacatacaagtaatgtaggcatacagttaaaaatgaaaccttatcctgtagttccagctactagggaggctgaagcaagagaatggcatgaacctgggaggcggagcttgtcgtgagcccagatcaggccactacactccagccggggcaacagagcgcaactccgtctcaaaacaaacaaacaaaacaaaacaaaaaaaacttatagacaagtacaaaatgagaagaaaaagtccctttcccttcatgcctctacttcctgctgtattctcaaaggtaagcactgattacagtttacttatggatctttccaggaaaatattttatgcatttatcagaaaatgtaagtatatgcatcctttaaaattctgcataaatcaaactctgcagggtactatcttcccatcctcatttgatattttgtagatcttttcctattggctgtacagatcacctcattctgtctcctgggtcatacaatatagctcacataattctaagtctgaaggttggtccaaatggttccaagaatgcaggtaccaaaaagtagtctcttgaagaggccatcagagacctggctgtttgtatcttcctcctctgccatccacagtgtcatcttcacccaaggtggctggagaagctgttaggaatatgtggttttttaaaaattacattcataggaaaaggggagggaagagaagaagaaaacctctccccctaagctcatggctctttttagtcaggctgagccaactaaagtcatgtacttcccttagataggtaactgttgccaggaaaatgccctgtgtggattggcctggactaagcaggatcctcctctaaagagagagatgagatgaatgcctgacccaagtctgggatcttgggtgggaagcgtgtggatagtaggtcagaggtcagcagtgtctgtggtgtaggatgtaatcccatctccacagagctgcataca

SEQ ID NO: 24258 - DNA, 2300 bp, Homo sapien
acaattctggtgttgcaatgcaggtcagtgtcctgtattagttttctatgctgcataacacattgccacatggattctctgctcggtgtctcacaaggtgggaataaaggtgtcagcaaattgtgttcctttctgcaaggccctggggaagaattcacttttgagctcattcaaattgtcagcagaactttagttccttgcagttcccttcatcctcgaggcaacagcgtcccatccaggcacactgagtctttcataagcttcaaatgtctcctctcccctgtcttgctctttagggtttaagggtgattccaccaggccaacccagataaatccaggataacctccctattttaaagtcaactgattagaaacctgtccacaaggctcttttgccttgtaaagtaacagattcatagtcccagaaattagggtttgaattctcttagaggactataatgctgcctgccagtctcccacctggaacttgccagaaatcagcacctagcactaagtctttatttaattttttatgtttagagagcagtattgctgttgcccaggctggattacagtggtgcaatcaccactcactgcagcctcaacctcctaagctcaagccatccttcatctctgcctagactagccaactataggtttgccaccatgcccagctctttttttttttaaagagatctggtctggatatgttgcctaggcaggtatcaaactcttgggcttggacaatcctcttgtgtctggagttggttccttccggtgggttcctggtcttcaagaatgaagccatggaccttgctggtgagtgttacagctcttaaagatggcagggaccctgcagtagcaaggtttattgtgaaaacagaaagaataaagcttccgcaaagctgaccgggacccaagcagttgtcgctgccggctgcggtggtggccagcttttattcccttattggcccctcccatgttccgtttctgtcctatcagagtgcccttttttcaatcctccccgcaattggctacttttagaataccgctgattggtgcattttacagagcactgattggtgcgttttacaattttcttgtaagacagaaaagttcctgattggtgcattttacaatcctcttgtaagaaaagttccccaagtccccactgcactcaggaagtccagctggcttcacttgtcactcccgccttggcctcccagaatgctgggattacaggcatgagccactggcttggcctagcaccaagtcttgatgaaccacccagagggacatcacacctcatgccaggtgacagggattgtcacagtcccgccaggcttctccctcctctgggaggagtcagtgaagttggttggtacaggagcccaggaccacctgctttgcccgccagggcttacctgacagttggccggcaagtacttaccattattattgttttaacttcatgatcaacgttttaaaaaatcaggagcggtctcattaaaactcagatttccgctttctcttgaaaattcagcagctctggcaaccctgagttccaggtcaggctggaactgggggcgccccatgggaagaggggagggcgcgcgccccctctcgggaggtatttgcctcgagaggccccactaggagcccacactacgctctcctggggggtcccctaggacggggagggaactaataattactgggccctccccagcggcagccgtggctcctacattagctggtttaattctccaaacaggtcttggaggaaggcatccttctattctactgatcagaaagctggacaaagtcccactgccaggctacacagttggtgccatttgcggaggtgacctttgacctttaacccacgcggccacccgcccgagctcttacccctgctgcccctcgcgcgtcccactccccgtccctgccggatccgcttccctgcgctgggcccagcgcgccgccagggaaggggccggagcctgggagcccgccccgccgtcgcccgtcctccgcccgcaggcccacccgcagcggtcacgtgaaggaccgagcgccgcgcgcccaggcggggcctccggcctgcacgaggagggcagagtccgttgcggctgccgccccgacgcccgcgcatccccgctcgccgcgcccgccgccgcgatgtccggggccggcctagccgcggtggtgagctgcctgcgcccgcagcccggcgaggagccgcagacccatgaggtaaggaggacttcctggctgtgctcggagggcgcccggacggc

SEQ ID NO: 24259 - DNA, 2300 bp, Homo sapien
aataaagacacaagacaaagagaagaaaagacagctgggcccgggagaccactaccacctagacgcggagacctatagtggccccaaatacctggctgtgttggtatttactggacacaaggcaaaaggggcagggtaaggagtgtgagtgatctccaatgattgataaggtcacatgagtcacgtgtccaccggacagggggccctccctgtttggcagtaaggcagagagagaggacagcttatgccattatttcttctatgcatttcaaagacttttagtactttcactaattctgctactgctatctagaaagcagagccaggtgtacagggtggaacatgaaagtggaccaggagcgtgaccgctgaagcacagcatcacagggagacgttccgggctccagatggctgtgggcggggctgactggtgtcaggccttccacaagaggtggtacagcagtcttctctaactcccccaaggaaagggagactccatagtgccttccattggcactgacgctaccgctagaccgaggtccgctacgtaaggggcgtcttcccaggtgctggcgttaccgctagactagggagccctctagtggccttttccaggcgtaacagagggctcacgctcttgtcttccagtcacttctcaccgtgtcccttcagctcctatctctgtatggcctggcttttcctaagttataattgtagaacaaagattattataatattggaataaagagtaatgttaacaaactaatgattaatgatattcatatataatcatatctataatctatttctagtataactattcttattctgtatattttctttattatactggaacagtttttgccttcagtctcttgccttggcacctgagtggcttgccgcccacaggcgggggaaacagctaagaaatgaggctggttcacaactgccgcactggaggaaaccagtgtggctgtcccaggggagcgaggacaggtggatcaccaagggttaagatatttgacgggcttcatggaggaggcactctttgatgtaacctacagcacagcagagctttaataaaaactcaggaaggtcaagagctagacaagaagatagaataaaaggactcttgaggaagtactgggctggcatgttgggaagcagagggtcctgggagtggcggcaaagggaagcagcagaaagtgataaggacctatggaaggtggctttgcaggccaggctaaaaaggcaggtctcattcccagggcctttcaaataacagatggagcaaaggagtgagaggacagcacaggaggctgcatgaatatatcacattctacttaagacatatgtcttataatttttgtctggaaatcaggttgtttccaatttttcaatattataaaccgtcagccaccaccaattttgtggctaaatctctgaatgcatccttctttcctacagataaattcccaggaatggaagtccagggttaaaatatattcaccttcaaggcttttgaaaggagctgccaaagagccttccagaaagacagttttattcctctctcctgtagggtgtaagaacatttgttttatggcaaagacatggaagcaacttgggtgctcatcaatggtgggttaggcaaagaaaatgtggtacatatacaccatggaatactatgcagtcatttaaaaagaatgaaattatgtcctttgcagtagtatggatgcagccagaggccatcatcctaagtgaattaacagagaacagaaaaccaaatactgcatgttgtcacttataagtaggagctaaacactgggtactcatggacacaaagatggcaacagtagacactggggattcctgaggggaagggacagaggaggggaagggttgaaaaactacctgctggattctaggctcactacctgagtgatgggatcagttgtaccccaaacctcaccatcacgaaatatacccatgtaacaaacctgcacatgtaccacctgaatctaaactaaaaattgaaattacaaaaagtttgttttcaatcttgctaagattgttttataggcaaacacatggtattttattgtcgttttattctataatttttaattagtgacgttaaacatctttcctatcggccattttacatattttttccttatgagttgccttcacttatcttcagcaaaattatctattgagatatcttttttttcctgtaatttggaagtgctcttgatatgctgaaatgtctgcactgccacattttgccctatttgttcttc

SEQ ID NO: 24260 - DNA, 2300 bp, Homo sapien
tttctggaatgtgctcttctggaagtgagatctgcctgtccggggcaccaggctgggacagagactccccaaggaccccattctgcctccttctggggaaataaacaagtgcctgtttcagctgctttaaaaaaaaatagaaaaaaaaaatgccctggaaaatactgtgttagcaaaaagatttaaagattggtataattctgatttaaatgttttatttagcacaaaatcaaacattgcataggaacaaaattttctgagacaaaatggctgggtttaaatgggtttaaatgtctaaaaaatacttagctaacagtgtggttaaatttttacttattttatttatttttgagatggagtttcattcttgttgcccaggctggagtgcagtggtgcgatctcagctcaccgcaacctccacctccaaggttcaagtgattttcctgtctcagcctcctgagtagctgggattagaggcgcacaccaccacacccagctaatttttgtattttcagtagagatggggttcgccatgttgaccaggctggcctcgaactcctgacctcaggtgatccaccattctcagcctcccgaagtgctggaattacaggcgtgggccactgcccccggtcaagtgtttttctttttttcttttgagatggagtctcactctgttgcccaggctggagtgcagtggcacgatcgagggtcactgcaacctccgcctcctgggcttaagcaattctcctgcctcagcctcctgagtagcttggaatacgggcacccaccaccccacctggctaattttttgtatttttagtagagatggggtttcaccatgttggccaagcttgtcttgaactcctgacctcaagtgatccgcctgctttggcctctcaaattgctgcgattacaggcgtgagacaccgcgcccggccccggccaagtttttaagcagatacattagttacatgtgctgaaatatcagatgactcccccagatttcactgacttcacattatattttgggcccaccagaagttgctggctgggcgttcagggtagaggctgctttcctctgcgtgggcatgcaggaacccagaatctttccatcaggtgcctccgtcatctctgggacctcctcccacctgcatctatcggtagaaggggagagtgtgagaaaggcattggaggcttttgtgggccagctctggaagtggctcaccttagtccattgcctccctttggcaaaagctggtcataggactacacctaacacaaggggactatgaactagagcttttatttatttatttgtttgtttgtttgtttgtttaggccccatgggggctgtgaactggagcttctatttatttatttattgtttaggcaccatggcctacactcctttattagagtgagggtcccgaggaccagcccccatatatgatgggtccacttgagcctccttaggagccccatgagggagtgatggcttgggtagggagccagggaccttgcccagcccgacactggagcaggagagcggcctcagtccccaccccaaccccagaagagggcggggcgagaaccggagtcaaatcttgggccgggtccaagggcctgagcgcctggtttaggccggaaatggtctagttctcagaggtggtccgatccctaaccagtcccaggcccagccccagcccagcaccacctggaaggttcaagtacatggaggagaggagtaaggcggacttgggcgtatggagaaaggggtgaagggagaaagaggacttgcgctcaggagggagcgtggcctactggtgggaaagcaggcgtggccgcctgtgcgggaggttgcggatccacagtgggcgagaccaggccccagccccatcagggcgcggggtgcgcagccaggtggtgctccagcagcgcccagtgagaggagaccttgcggtagacgggggaagggcgcgcgctctggccgctgagtgcgcatgtgcatattgagcgaactcttctgcgggaagggcttggcgtagaccgcgcactggaaggcgtgcgcgcaggtgtgcgtgaccatgtgcttgaaacggcagtagcgcagcgagaaggatcgccatcacacggcgcactggtgcggcttctcccccgagtggatgaacatgtgcttggtgtcgtttttccttgagctgaacgtcttgcaacagtggccgcacgcataggcaagtggctcggcaccaggagtgcgagcagtggtgcctgagggggccgtggtgggagcagcagagggagcc

SEQ ID NO: 24261 - DNA, 2300 bp, Homo sapien
tctggaagtggctcaccttagtccattgcctccctttggcaaaagctggtcataggactacacctaacacaaggggactatgaactagagcttttatttatttatttgtttgtttgtttgtttgtttaggccccatgggggctgtgaactggagcttctatttatttatttattgtttaggcaccatggcctacactcctttattagagtgagggtcccgaggaccagcccccatatatgatgggtccacttgagcctccttaggagccccatgagggagtgatggcttgggtagggagccagggaccttgcccagcccgacactggagcaggagagcggcctcagtccccaccccaaccccagaagagggcggggcgagaaccggagtcaaatcttgggccgggtccaagggcctgagcgcctggtttaggccggaaatggtctagttctcagaggtggtccgatccctaaccagtcccaggcccagccccagcccagcaccacctggaaggttcaagtacatggaggagaggagtaaggcggacttgggcgtatggagaaaggggtgaagggagaaagaggacttgcgctcaggagggagcgtggcctactggtgggaaagcaggcgtggccgcctgtgcgggaggttgcggatccacagtgggcgagaccaggccccagccccatcagggcgcggggtgcgcagccaggtggtgctccagcagcgcccagtgagaggagaccttgcggtagacgggggaagggcgcgcgctctggccgctgagtgcgcatgtgcatattgagcgaactcttctgcgggaagggcttggcgtagaccgcgcactggaaggcgtgcgcgcaggtgtgcgtgaccatgtgcttgaaacggcagtagcgcagcgagaaggatcgccatcacacggcgcactggtgcggcttctcccccgagtggatgaacatgtgcttggtgtcgtttttccttgagctgaacgtcttgcaacagtggccgcacgcataggcaagtggctcggcaccaggagtgcgagcagtggtgcctgagggggccgtggtgggagcagcagagggagccggggcctcccgcagctgagtgccgggggctgcctcgggctggagtgtggggtagaaggcgggtgggggcgcaggggctggcacggatggtgctgaagggggtggtgcgggtggttcgggagcacccaagtgaaaggggaagagtgcgacaggcggccctggggtcttcacgccaggcgggcggggtccagccagtatgcagtcgggctggacaggggtctcggtgggacagccttcggggacagcgccatccttgtcgtgccaagcggttacatagctgtctggaaatacgtcctcagctgccccagatcccggaagaaaatctctcccacaccactgtagtcagagaggccagtgggtgcatggaactcctcgcacgcgctgtcagcagcagcagtgaggaagccggcagcacagtctgggaaggaaggaggtgcttggctctctcccgggccgccaccttcgccgtcctcgccatcggtctcatcgtcagtttcctcgtcatcgttgtcacctcggtcgtcaggggccgcggacagtgaggggtaggcaccaagcccctcggctttggcaggtgtcgggggcgcaggcagctgcaaactcgcgggccggcgctgcttaccgctgtgcgcggcaccggggtgccccgggggtgcgcagccagcaggtggcgcaggcggtgacgcagctgctcaggtgcgagtggcgggggcacaggggtgggcaggggcgcgggtgcagaggtgctcgcgggtgcagaggagcgcgtgcgataatctgcgtgcattcgtcgataactgtctatgcgaagcaccgacgcagccatgagtacctgcggggcttcactctgtgccacaacgagcgaaccgctgtacaggagctcgactagctgtcgcaccgtctgcacaggcaccaccgaaggcacacggatctcagaggggccgagcagcagcttgtcttggaaggagggcgagccgattgccagcccgcagcggtgcgcacgcagcgaagcttcatgaatgcacacagtcacgtcgcagaagtgcccacccagcttctgcccattgagggtctcaagcagagagcgtgagaagttctgcagatgtatgtggcgcacagcctctacagccgccgactccgactcctcttcaggcaccaggcctggccgtggccgccttctcaccgactccaaggcagcacttccgggcgc

SEQ ID NO: 24262 - DNA, 2300 bp, Homo sapien
ctgaaacccagaactgtacacaggatgcagacaaagacatctccaaaagaatccatgtttctggtctgaggaatgggaaagagagccccaaacagtcagagagagtgtagaaaatctctgttttttgtttgtttgtttgtttattctttccttccttagcccctgtgcaatctcgtgacagtggtggtggcaatggaagtagcagccaggcaggtacctggaactctgagaaaggggaacctttgtctctgatcagaggaaccatgatcctaaaagcatggggggaataattttcacatttgtgtttctctctctctctctctctctctctctctctcacacacacacacacacacacacacacacacacacacattgctttggtcctgaagatagacccagtcagaagagatgcacagcagagaaggaaaatgaaaaccctggtctttagccagaagaccaaggcatatcttcatttcttaatatactaattgcttcagaaggtggaaatggctcagggcctctcagcttaagagactaaggggttatgggttgtattattttctccatttcatagatatgagcctaagaaggttgtttttcttcttacttaaacttttcctactatgccatgttgtccatgggcaagtcaaaggtatcctacagcctgtaagagtggcacagtgcttatttgcaacctttaagagaggtggcaagatgtgggattcatggagaaatctctcctttgcttggattaatcctgtaaacaaggtggtgtaggtgagactggggttggcaggtgggattagggtctcccttacttcctagtttccgtagcctgggaaaaagggatgatcagtctggtttgagatccactggggggttcattgcctttctttgcaatgcctttggtcttagcttcatttgtccaaactcctctctcccttggctctccccagaccaggcaaaggccaagctggctggtctccccacctgtggccctgagggcaggacctggcattcaccgtttctgctaatgagatcaagacatggcctcttctaattactccagccctcacacaatcttccccacatgctctccacaccagggagcagcagggggcaggaagaagggaccctaacctggagcatcctgagcagactgtttcagggcgggtcgggaaaatgaaggttcgccaattcaaaggtggaggggaaaatggttcagcctttgggacttgtatttggtgtgaaaggagttgcttgcctctgggtcacagccctgcattcagctccctgacttgcctaggagtcaggaagaaacttcttggtctcaagcccagttaggggcaaggcactggctggaaggaaggccagggaaggaaggaggttgtccactagaggcagcagccagccagcccagcccttctctggtgcctgccggtgtggtcctctcccagagactggggggccttcatctgccccatgaggaaaagaggagtggaggaccatggaaagggatccagaaaaagaaggaaacaccaagtcccaggggcatgagctggaagggagggctgctcctcccaggggaggctggggactgagagctgtccccaagagtggaaaaggagggagctgggcaagacccagcattgttagtaaccagctctgtggtcttgacttgacctcactgattctcagtctcctcacttggaaaagggcaaaacagccacgtgcaggccgtggtgggcacccgggctgtctgcagatagcttggctcattgttggtcctcagtacgcagccctcgtagccaagcagcttgggcctacactctgggcccaggggagtggctgtcgctggcatcccctggaataacatgctccgggggtcaaagattccttagctggaaaggtctaggaggagactcccgctctgctccctcctgcaccagcgctgtgccccccgccggccaggcagagccatccgatgccgctgggccgcccactgaggatctgctggctgcagcgagtggaaggacctgctcggctggaacgttttttttttttttccctcccaggcgacgtccgatgggtgtgtcgggcaggaggtgatatttgacaggctgcgcgcgggcgagctgccgcggagcacccggcaggggctgacagcatggcctcgcccgacccgcccgccaccagctacgccccgtccgacgtgccctcgggggtcgcgctgttcctcaccatccctttcgccttcttcctgcccgagctggtgagtgcggcacccccgacccggg

SEQ ID NO: 24263 - DNA, 2300 bp, Homo sapien
catcactaaagccatttggaatgggtttttctaacttttgttattgaaagaatcccaatggatacaactgtctattctttccccccaagtatctctggatttcttctggcttctctcttctttttcatgcaactagtaaattgtttctgaaatatagataaagcaatttcttagtgggaaaagagtttaataaataggaatcaaaaaaagagagaagcagttgtctccaaagtctttatgactgttttcatgactgtttcaatcatttaaaaacatttattgagtaccttttgtgtatcagacagtattcaagatggtggacatggctgtggttcaccacatgaacaaagttttggctctccttaagcccacatcctagagagggacaggggcagggagacaaacaataggcaaattaatcaatcagggaaatcttgggtagtgaaaagtgcttgcagagttaagcaggatgttgctatttgggctctggtcaagtagagaaggatactcctcctcttcctttcatgaaatgcaattaacagccctggacagaatgcatggagaagctaactgaggattctagaaaaaaaaaaaaaggagcaggaatatttgggaaggaaaccagaattcaaaacactactaagctgttggtgagtttcccattttctttcctctggtacctgtcagccagcgtcagagaccacctgaaacccagaactgtacacaggatgcagacaaagacatctccaaaagaatccatgtttctggtctgaggaatgggaaagagagccccaaacagtcagagagagtgtagaaaatctctgttttttgtttgtttgtttgtttattctttccttccttagcccctgtgcaatctcgtgacagtggtggtggcaatggaagtagcagccaggcaggtacctggaactctgagaaaggggaacctttgtctctgatcagaggaaccatgatcctaaaagcatggggggaataattttcacatttgtgtttctctctctctctctctctctctctctctctcacacacacacacacacacacacacacacacacacacattgctttggtcctgaagatagacccagtcagaagagatgcacagcagagaaggaaaatgaaaaccctggtctttagccagaagaccaaggcatatcttcatttcttaatatactaattgcttcagaaggtggaaatggctcagggcctctcagcttaagagactaaggggttatgggttgtattattttctccatttcatagatatgagcctaagaaggttgtttttcttcttacttaaacttttcctactatgccatgttgtccatgggcaagtcaaaggtatcctacagcctgtaagagtggcacagtgcttatttgcaacctttaagagaggtggcaagatgtgggattcatggagaaatctctcctttgcttggattaatcctgtaaacaaggtggtgtaggtgagactggggttggcaggtgggattagggtctcccttacttcctagtttccgtagcctgggaaaaagggatgatcagtctggtttgagatccactggggggttcattgcctttctttgcaatgcctttggtcttagcttcatttgtccaaactcctctctcccttggctctccccagaccaggcaaaggccaagctggctggtctccccacctgtggccctgagggcaggacctggcattcaccgtttctgctaatgagatcaagacatggcctcttctaattactccagccctcacacaatcttccccacatgctctccacaccagggagcagcagggggcaggaagaagggaccctaacctggagcatcctgagcagactgtttcagggcgggtcgggaaaatgaaggttcgccaattcaaaggtggaggggaaaatggttcagcctttgggacttgtatttggtgtgaaaggagttgcttgcctctgggtcacagccctgcattcagctccctgacttgcctaggagtcaggaagaaacttcttggtctcaagcccagttaggggcaaggcactggctggaaggaaggccagggaaggaaggaggttgtccactagaggcagcagccagccagcccagcccttctctggtgcctgccggtgtggtcctctcccagagactggggggccttcatctgccccatgaggaaaagaggagtggaggaccatggaaagggatccagaaaaagaaggaaacaccaagtcccaggggcatgagctggaagggagggctgctcctcccaggggaggctg

SEQ ID NO: 24264 - DNA, 2300 bp, Homo sapien
taatgtgactgtcctgaatattacagttattagtgaaaaatcattagctgagtaatcatatcatttatagcacactgaatacctcagtggtacttctcaaacttgaatgtgcacatgaaacactggggtattgttaaaatacagattctgattctcctaggactgtggtggggctgaaaatgtgaaaatgtgcatttctaacaaggtcccaggtggtgatgatgctgatctaggaatcgcaagtaatgaatacttgtaaccgaaacaatatgatgcaaaaatgtataaagtcaaacatcttcacacctgaggtgaatgagtaatacactttttttgcacctttccttattgttcatatattcacacatatttagggggggttattagtttatttttaccaacagaattaaactgtatccatgatgctattaacttttccatttaaaatgtggaaatccctataaataagtagatgcagaataattttttctaatttatttgtagactgagaatttcataagtaatagctgtattttagagcaatttttttcgttttgctcatctcatcacctgtaattattgatttaataatccacttagaaatattttatagcattttctcatttgttgtaaagatttttaatggaaatcctatgtttgactatttaagtgaactaattatcataagccataatagagaaattaattcaaaataagacatgaattacaacaaaacagacaataccaaatcttgccaaggacataaagaacaaaaactcatacactgctgatagggtataaattagtaccattttgggaaaccaggtagtagtatctactaaagctgacgtataacatgcctgtgactcagcagtgttatgtgtttgccagaagacttgcaccaggacgttcttagcagcgctatttatactagccctaagctggaaactgcccacttacccagcaacagtagaatcagtatgttagggtatatcatatgtgaaatatcagcaatgagaatgaacagactacagacacacacagtatagatgcatctcacaaatgtgatatttaaaggacaggagaagccaccacacagtgcataatttcattgtatagtacaaaaaaaggcaacacaagtttgtgctcttataagttaggatattgttcacctttggtgtgtggtagagaagtgagagggttgagaggttgggggtaggcaaggactagaaagacaggaagagtgtgagtgggcagataatgttctgtttcataatctgggtgctgttatggggtggagggttttcagagctgcacacaaagtctgtagacttttctctgtatgtattatacttgaagaaaaaagtacataaataatggttcatcctggcctgtggctgttctgaagaacattcatttgtattaatggggtccatcatttggaaggtgagccccaagcatcatcattcttattcaagttcaattttggtgtagtggagttttggaattggattcatgggatgcagtcccatatgggggaaacatgacaaccttcctgagagttgatgtaaactgggaatcataatgagaactaataatttgctcatagatttgctgtagaacaattaccatccttacagaattcagaattgacaacgtgcaatattagaatgaaatgaaacttcagtagcctaaatggcaaagaattaaaaactgccttttgaagtgacagtatggaacagaaccatatattccataggaaagctatccttggagttaatgaaagagtttaagatactaaaattgtatcttaacattagcttacaaaattggtatcagaaagcaaatgccataaaacaggtatcccagcaagaaggtggtgttattattgatgtattgtggggaatgtagtttcagacgccgggggacgttcccctatccttaggaattgccgaggaaaagtgactcccccggctgtgacctgcctggtggcgtgggatgaccaccgcaagagaacatttgacccttcccgggaccggcccgggcggggcggggctgggaggcgggcgcacatcgatggcgtcaccttctggcgccgccggttggtttccctggcaactggagcaatcagagcaccgcagccagggagatgctggcgagacgacagcgagatcctctccaggccctgcggcgccgcaatcaggagctgaagcaacaggtatggtcaggctgtgcagagggccctggggcgggcgacaggcggacgcagctgcgcgcactgcgccttcccaccgtgaccc

SEQ ID NO: 24265 - DNA, 2300 bp, Homo sapien
agttctagaaaattaatcaaacctaaggagggggttgttggaattcctgatttatagccagttcttcagaggtataggtgacaacctgctatttgtgactggcattggaagtaggaagaagtcttatgggactgagccctcaacctatggaggctgatgctacatccaggtaggtaagtgtcaaaattaaattgaattagaggacacccagttgttgtctgctgcagaattcattggtgtataggaaaaaggtctccctcaccccaactctggtgtcagagtattgaatgtattgtttagtgaacagaggtggtctgtattgagagttaaggtgggaaaaacactctgttttgtcccatatcttacaccatgtaacagattaccacaaatgtagtcacttaaaacaatacacatttattatctcacattttccatggatcgggaatccaagcacaattaagctgggtcctctgttataatctcacaagactgcaatcaatgtgtaaggctgtgttttcatctggaggctcaaatggggaagaatctgcttccaagctcattcaggttgtgggcagagttcatttccttgtggttttgggactgagggttccagatttttgctggctgttggctggaggcttttcctagaggccactgcagttctttgttctgtgagcttctccagcacgtccacttcatcaagccacaggagagtctttaacttgctaaaaaatgttatatacacagtgacatgttttggctgtgtgcccacccaaatcttgaattgtagctcccataattcccacatgtcatgggagggacccagtgggaggtaattgaatcatgagggtgggtctttcccgtgctgttctcgtggtagtgaatatgacccatgagatctgatggttttataaagggaagttcccctgcacaggctctcttgcctgctgccatgtaagatgtgcctttgctcctcctttgtcttctgccatgattgtgaggcctccccagccatgtggaactgtgagtcaattaaacttctttcctttataaattactcagtctcatgtatgtctttatgagcagtgtgagaacagattaatatacgtagtaatcacaggagtgacatcctcatcccctttgctttattatattagttagaagcaagtcacaggtcacacccacactcaaggggagtggattacacaaaggcctgaacactaggaggtggaagtcatggtgggggggtgtcaaaatgactttcatcattagaaatgtgtttgtttgtttcctatcccaacaattttgaccccacgttagttctggtacagcatgacccccagacctgggttgtccaatatggtagccactggtcccatatatggctagtgtgactgaagaactgagtttataatttttaaaaaattttaatgaatttaaatttaaattggtactccattcggttattggaaaaatgtttgtgtttttagaacagcttgggtatataaatctactttttcaactgtacattttatgaaatctagacactgataggtatctccattgaaaattcagtgttcaaattgagatgtgcctttcgctgtaaaatacagaccagttttcaaagacttggtatgaaaaaaataaagcatctccttaataatttaaaaacgagttacatgttgaaatgataacatcccctatatgttgggataagtaaatatattattaaaaacaattccatgtttttgtttttattttttaaaaaacaggttaccagaaaatttaaagttacgccagtcactcccattctattgctgagagaaaatacagagcggtgaagagcttacagtcgggtgagcaagatacgcccccaatgttagctaatgatgtaaggcatcaacaagaaatgtgggggttcaggaaagtggaaggtggggtcgtccaaagcctgggaaagtcttcagttgaaggcgagacagatgggactattagtgagtttcgagagatccaacgcctcgccgccttcgcttcatttttgtctcacgccccacccttgaacgcgcggcgccttttgaccccgccgccgcgccgtagaccgcgctgcacgccggcggcagccatggcggatgtgtcagagaggacactgcagttgtccgtgctagtagccttcgcttctggagtactcctgggctggcaggcgaaccgactgcggaggcgctacttggactggaggaaaaggaggctgcaggacaagctggcggcgacgcagaagaagctggacctggcctgagactctg

SEQ ID NO: 24266 - DNA, 2300 bp, Homo sapien
aaaattatttgaaaacaaatttgtggataataaagattagctagaactgtgactgtatggtgtagttaccacacagtttattatgcagcaaaaatgtatgcttgagatttctgaactttgctaatttttctgctgttttccaactgaccaaaatgatgttaggaatgcaactttgtaaatgggtgctaattgataatgggaataattttgtaatggactataaaggatgttaataatgaagccatatgtttatgtctggattgaaaacttttaaactattatttgctaagtcattttgctttaccttgaagaacataaactgttgtttcagttattcaaactaacaagatcttatttacggcaagaaatagttcattaagatgttgtgctgtaatacgggaaaatgtaaatccttttcacagtttatttcaatgtgaaataaaatttaattctgataaaaaagggaaaaagtgtaatgctttccccctaagattgagaacaaggcaaggatttccactcactccacattgtactggaggcttagcaagtgcgataaggtgagagaggaaaacattttacagattagaaaggaagaaacaaaactgtctttattcatagacaacatgattgtctacatagaatgctccaaagaatctagagaaacaataccagaagattagcaatatcagagtatataaaagcaatatacaaaaattaaatgtatttctatatgctagcaataaaaattataaattacaaattacaatgtaaaaaacactaccatttatggtggcatcaaaaatcattacatatttagagaaaatctaagtgaaaattttttatgaagaaaactacagaacattaatgaagaaaaataagtaaataaatatagaaagatactttgtttatggatcagaacactcagtatcattacgatatcaattctcccccaatttatctgtaaattcaatacaattataatcaaaatctcagcaggctttttgaaatagaaattgatgatttaataaataattctaaagcttatacataaaagcaaaggatctagagtagctaaaacaattatggaaaagaagactgaggttgaggaatcatggtatctaatttcaacttactacaaagctgctccaatcagggcagtatgctattggtgtaaagacagacataatggtcaacttacttttgacaaggctgccaaaacccatccaatggtgaaaggatagtcttttcaacaaatggtgctgggacaactaagagaaaaggcaacctgtccaccttaggtagacttaggaagttgttgactcaacaaatctgagacttgtcttcaagcctgagaaaacacattgggtgattggtttctaagtgcccactagtcccatcttattattagttatttttgtctctctcatagctcagtgtctgttatctagtgttacaaatgtttattgatcaaagacaaaacaagatgaatatgttgattgatacgtaacagaaaatcaaaccactgaaaataaaaaccatctttaagaagaatcaggaagagtggtaaagctctggagaattcctagattattttctgcaactctgactgatggaggattataaagggggattgagaaaaaaaaattctatcctcctagaaaggaattattattatctgaccatggcaacaaataacgaccaaagccagttttaaacccatcctaatcaatcatgacaacttcacatcagtaaatacacttcctgaaatcagccaattagcaacagtttttcactctattcagtgaacaagcttctgaaagttagccagccatcaatggtgttacttgctttcacagttaagcattaaaaaacaacaacaacaaaaaacaccctaaacactcctgggttttttgttttttgttttgagacagcgtctcactccgtcacccaggctggagtgcagtggcgggatctcaactcactgcaacctctgcctcccaggttcaagcgattctcatgcctcagcctcccaagtagctggggttacaggcatgcaccaccatgccctgctaatttttgtattttttttttttttttgtagggacagggtttcaccatgttaaccagtctggtcttgaattcctgacctcaagtgatctgcctaccttggcctcccaaagtgctgggattacaggcatgagctgtcgcactcagccaacattcctgtttttgaaaatcctccaatccctgaagtctgtattacaagaccaattctgcattgctgagagagactgtgcttt

SEQ ID NO: 24267 - DNA, 2300 bp, Homo sapien
cagctctggaagtggctcaccttagtccattgcctccctttggcaaaagctggtcataggactacacctaacataaggggactatgaactagagcttttatttatttgtttgtttgtttgtttgtttaggccccatgggggctgtgaactggagcttctatttatttatttattgtttaggcaccatggcctacactcctttattagagtgagggtcccgaggaccagcccccatatatgatgggtccacttgagcctccttaggagccccatgagggagtgatggcttgggtagggagccagggaccttgcccagcccgacactggagcaggagagcggcctcagtccccaccccaaccccagaagagggcggggcgagaaccggagtcaaatcttgggccgggtccaagggcctgagcgcctggtttaggccggaaatggtctagttctcagaggtggtccgatccctaaccagtcccaggcccagccccagcccagcaccacctggaaggttcaagtacatggaggagaggagtaaggcggacttgggcgtatggagaaaggggtgaagggagaaagaggacttgcgctcaggagggagcgtggcctactggtgggaaagcaggcgtggccgcctgtgcgggaggttgcggatccacagtgggcgagaccaggccccagccccatcagggcgcggggtgcgcagccaggtggtgctccagcagcgcccagtgagaggagaccttgcggtagacgggggaagggcgcgcgctctggccgctgagtgcgcatgtgcatattgagcgaactcttctgcgggaagggcttggcgtagaccgcgcactggaaggcgtgcgcgcaggtgtgcgtgaccatgtgcttgaaacggcagtagcgcagcgagaaggatcgccatcacacggcgcactggtgcggcttctcccccgagtggatgaacatgtgcttggtgtcgtttttccttgagctgaacgtcttgcaacagtggccgcacgcataggcaagtggctcggcaccaggagtgcgagcagtggtgcctgagggggccgtggtgggagcagcagagggagccggggcctcccgcagctgagtgccgggggctgcctcgggctggagtgtggggtagaaggcgggtgggggcgcaggggctggcacggatggtgctgaagggggtggtgcgggtggttcgggagcacccaagtgaaaggggaagagtgcgacaggcggccctggggtcttcacgccaggcgggcggggtccagccagtatgcagtcgggctggacaggggtctcggtgggacagccttcggggacagcgccatccttgtcgtgccaagcggttacatagctgtctggaaatacgtcctcagctgccccagatcccggaagaaaatctctcccacaccactgtagtcagagaggccagtgggtgcatggaactcctcgcacgcgctgtcagcagcagcagtgaggaagccggcagcacagtctgggaaggaaggaggtgcttggctctctcccgggccgccaccttcgccgtcctcgccatcggtctcatcgtcagtttcctcgtcatcgttgtcacctcggtcgtcaggggccgcggacagtgaggggtaggcaccaagcccctcggctttggcaggtgtcgggggcgcaggcagctgcaaactcgcgggccggcgctgcttaccgctgtgcgcggcaccggggtgccccgggggtgcgcagccagcaggtggcgcaggcggtgacgcagctgctcaggtgcgagtggcgggggcacaggggtgggcaggggcgcgggtgcagaggtgctcgcgggtgcagaggagcgcgtgcgataatctgcgtgcattcgtcgataactgtctatgcgaagcaccgacgcagccatgagtacctgcggggcttcactctgtgccacaacgagcgaaccgctgtacaggagctcgactagctgtcgcaccgtctgcacaggcaccaccgaaggcacacggatctcagaggggccgagcagcagcttgtcttggaaggagggcgagccgattgccagcccgcagcggtgcgcacgcagcgaagcttcatgaatgcacacagtcacgtcgcagaagtgcccacccagcttctgcccattgagggtctcaagcagagagcgtgagaagttctgcagatgtatgtggcgcacagcctctacagccgccgactccgactcctcttcaggcaccaggcctggccgtggccgccttctcaccgactccaaggcagcacttccgggcgc

SEQ ID NO: 24268 - DNA, 2300 bp, Homo sapien
tacttttctggaatgtgctcttctggaagtgagatctgcctgtccggggcaccaggctgggacagagactccccaaggaccccattctgcctccttctggggaaataaacaagtgcctgtttcagctgctttaaaaaaaaatagaaaaaaaaaatgccctggaaaatactgtgttagcaaaaagatttaaagattggtataattctgatttaaatgttttatttagcacaaaatcaaacattgcataggaacaaaattttctgagacaaaatggctgggtttaaatgggtttaaatgtctaaaaaatacttagctaacagtgtggttaaatttttacttattttatttatttttgagatggagtttcattcttgttgcccaggctggagtgcagtggtgcgatctcagctcaccgcaacctccacctccaaggttcaagtgattttcctgtctcagcctcctgagtagctgggattagaggcgtacaccaccacacccagctaatttttgtattttcagtagagatggggttcgccatgttgaccaggctggcctcgaactcctgacctcaggtgatccaccattctcagcctcccgaagtgctggaattacaggcgtgggccactgcccccggtcaagtgtttttctttttttcttttgagatggagtctcactctgttgcccaggctggagtgcagtggcacgatcgagggtcactgcaacctccgcctcctgggcttaagcaattctcctgcctcagcctcctgagtagcttggaatacgggcacccaccaccccacctggctaattttttgtatttttagtagagatggggtttcaccatgttggccaagcttgtcttgaactcctgacctcaagtgatccgcctgctttggcctctcaaattgctgcgattacaggcgtgagacaccgcgcccggccccggccaagtttttaagcagatacattagttacatgtgctgaaatatcagatgactcccccagatttcactgacttcacattatattttgggcccaccagaagttgctggctgggcgttcagggtagaggctgctttcctctgcgtgggcatgcaggaacccagaatctttccatcaggtgcctccgtcatctctgggacctcctcccacctgcatctatcggtagaaggggagagtgtgagaaaggcattggaggcttttgtgggccagctctggaagtggctcaccttagtccattgcctccctttggcaaaagctggtcataggactacacctaacataaggggactatgaactagagcttttatttatttgtttgtttgtttgtttgtttaggccccatgggggctgtgaactggagcttctatttatttatttattgtttaggcaccatggcctacactcctttattagagtgagggtcccgaggaccagcccccatatatgatgggtccacttgagcctccttaggagccccatgagggagtgatggcttgggtagggagccagggaccttgcccagcccgacactggagcaggagagcggcctcagtccccaccccaaccccagaagagggcggggcgagaaccggagtcaaatcttgggccgggtccaagggcctgagcgcctggtttaggccggaaatggtctagttctcagaggtggtccgatccctaaccagtcccaggcccagccccagcccagcaccacctggaaggttcaagtacatggaggagaggagtaaggcggacttgggcgtatggagaaaggggtgaagggagaaagaggacttgcgctcaggagggagcgtggcctactggtgggaaagcaggcgtggccgcctgtgcgggaggttgcggatccacagtgggcgagaccaggccccagccccatcagggcgcggggtgcgcagccaggtggtgctccagcagcgcccagtgagaggagaccttgcggtagacgggggaagggcgcgcgctctggccgctgagtgcgcatgtgcatattgagcgaactcttctgcgggaagggcttggcgtagaccgcgcactggaaggcgtgcgcgcaggtgtgcgtgaccatgtgcttgaaacggcagtagcgcagcgagaaggatcgccatcacacggcgcactggtgcggcttctcccccgagtggatgaacatgtgcttggtgtcgtttttccttgagctgaacgtcttgcaacagtggccgcacgcataggcaagtggctcggcaccaggagtgcgagcagtggtgcctgagggggccgtggtgggagcagcagagggagcc

SEQ ID NO: 24269 - DNA, 2300 bp, Homo sapien
aataaagacacaagacaaagagaagaaaagacagctgggcccgggagaccactaccacctagacgcggagacctatagtggccccaaatacctggctgtgttggtatttactggacacaaggcaaaaggggcagggtaaggagtgtgagtgatctccaatgattgataaggtcacatgagtcacgtgtccaccggacagggggccctccctgtttggcagtaaggcagagagagaggacagcttatgccattatttcttctatgcatttcaaagacttttagtactttcactaattctgctactgctatctagaaggcagagccaggtgtacagggtggaacatgaaagtggaccaggagcgtgaccgctgaagcacagcatcacagggagacgttccgggctccagatggctgtgggcggggctgactggtgtcaggccttccacaagaggtggtacagcagtcttctctaactcccccaaggaaagggagactccatagtgccttccattggcactgacgctaccgctagaccgaggtccgctacgtaaggggcgtcttcccaggtgctggcgttaccgctagactagggagccctctagtggccttttccaggcgtaacagagggctcacgctcttgtcttccagtcacttctcaccgtgtcccttcagctcctatctctgtatggcctggtttttcctaagttataattgtagaacaaagattattataatattggaataaagagtaatgttaacaaactaatgattaatgatattcatatataatcatatctataatctatttctagtataactattcttattctgtatattttctttattatactggaacagtttttgccttcagtctcttgccttggcacctgagtggcttgccgcccacaggcgggggaaacagctaagaaatgaggctggttcacaactgccgcactggaggaaaccagtgtggctgtcccaggggagcgaggacaggtggatcaccaagggttaagatatttgaggggcttcatggaggaggcactctttgatgtaacctacagcacagcagagctttaataaaaactcaggaaggtcaagagctagacaagaagatagaataaaaggactcttgaggaagtactgggctggcatgttgggaagcagagggtcctgggagtggcggcaaagggaagcagcagaaagtgataaggacctatggaaggtggctttgcaggccaggctaaaaaggcaggtctcattcccagggcctttcaaataacagatggagcaaaggagtgagaggacagcacaggaggctgcatgaatatatcacattctacttaagacatatgtcttataatttttgtctggaaatcaggttgtttccaatttttcaatattataaaccgtcagccaccaccaattttgtggctaaatctctgaatgcatccttctttcctacagataaattcccaggaatggaagtccagggttaaaatatattcaccttcaaggcttttgaaaggagctgccaaagagccttccagaaagacagttttattcctctctcctgtagggtgtaagaacatttgttttatggcaaagacatggaagcaacttaggtgctcatcaatggtgggttaggcaaagaaaatgtggtacatatacaccatggaatactatgcagtcatttaaaaagaatgaaattatgtcctttgcagtagtatggatgcagccagaggccatcatcctaagtgaattaacagagaacagaaaaccaaatactgcatgttgtcacttataagtaggagctaaacactgggtactcatggacacaaagatggcaacagtagacactggggattcctgaggggaagggacagaggaggggaagggttgaaaaactacctgctggattctaggctcactacctgagtgatgggatcagttgtaccccaaacctcaccatcacgaaatatacccatgtaacaaacctgcacatgtaccacctgaatctaaactaaaaattgaaattacaaaaagtttgttttcaatcttgctaagattgttttataggcaaacacatggtattttattgtcgttttattctataatttttaattagtgacgttaaacatctttcctatcggccattttacatattttttccttatgagttgccttcacttatcttcagcaaaattatctattgagatatcttttttttcctgtaatttggaagtgctcttgatatgctgaaatgtctgcactgccacattttgccctatttgttcttc

SEQ ID NO: 24270 - DNA, 2300 bp, Homo sapien
cacaattctggtgttgcaatgcaggtcagtgtcctgtattagttttctatgctgcataacacattgccacatggattctctgctcggtgtctcacaaggtgggaataaaggtgtcagcaaattgtgttcctttctgcaaggccctggggaagaattcactttcgagctcattcaaattgtcagcagaactttagttccttgcagttctcttcatcctcgaggcaacagcgtcccatccaggcacgctgagtctttcataagcttcaaatgtctcctctcccctgtcttgctctttaggggttaagggtgattccaccaggccaacccagataaatccaggataacctccctattttaaagtcaactgattagaaacctgtccacaaggctcttttgccttgtaaagtaacagattcatagtcccagaaattagggtttgaattctcttagaggactataatgctgcctgccagtctcccacctggaacttgccagaaatcagcacctagcactaagtctttatttaattttttatgtttagagagcagtattgctgttgcccaggctggattacagtggtgcaatcaccactcactgcagcctcaacctcctaagctcaagccatccttcatctctgcctagactagcccactataggtttgccaccatgcccagctcttttttttttaaagagatctggtctggatatgttgcctaggcaggtatcaaactcttgggcttgaacaatcctcttgtgtctggagttggttccttccggtgggttcctggtcttcgagaatgaagccatggaccttgctggtgagtgttacagctcttaaagatggcagggaccctgcagtagcaaggtttattgtgaaaacagaaagaataaagcttccgcaaagctgaccgggacccaagcagttgtcgctgccggctggggtggtggccagcttttattcccttattggcccctcccatgttccgtttctgtcctatcagagtgcccttttttcaatcctccccgcaattggctacttttagaataccgctgattggtgcattttacagagcactgattggtgcgttttacaattttcttgtaagacagaaaagttcctgattggtgcattttacaatcctcttgtaagaaaagttccccaagtccccactgcactcagggagtccagctggcttcacttgtcactcccgccttggcctcccagaatgctgggattacaggcatgagccactggcttggcctagcaccaagtcttgatgaaccacccagagggacatcacacctcatgccaggtgacagggattgtcacagtccctccaggcctctccctcctctgggaggagtcagtgaagttggttggtacaggagcccaggaccacctgctttgcccgccagggcttacctgacagttggccggcaagtacttaccattattattgttttaacttcatgatcaacgttttaaaaaatcaggagcggtctcattaaaactcagatttccgctttctcttgaaaattcagcagctctggcaaccctgagttccaggtcaggctggaactgggggcgccccatgggaagaggggagggcgcgcgccccctctcgggaggtatttgcctcgagaggccccactaggagcccacactacgctctcctggggggtcccctaggacggggagggaactaataattactgggccctccccagcggcagccgtggctcctacattagctggtttaattctccaaacaggtcttggaggaaggcatccttctattctactgatcagaaagctggacaaagtcccactgccaggctacacagttggtgccatttgcggaggtgacctttgacctttaacccacgcggccacccgcccgagctcttacccctgctgcccctcgcgcgtcccactccccgtccctgccggatccgcttccctgcgctgggcccagcgcgccgccagggaaggggccggagcctgggagcccgccccgccgtcgcccgtcctccgcccgcaggcccacccgcagcggtcacgtgaaggaccgagcgccgcgcgcccaggcggggcctccggcctgcacgaggagggcagagtccgttgcggctgccgccccgacgcccgcgcatccccgctcgccgcgcccgccgccgcgatgtccggggccggcctagccgcggtggtgagctgcctgcgcccgcagcccggcgaggagccgcagacccatgaggtaaggaggacttcctggctgtgctcggagggcgcccggacggc

SEQ ID NO: 24271 - DNA, 2300 bp, Homo sapien
aagaataaatggaagatataaagaatcatatcgtgtggcagaaggtgataagggcaatgcaaggaagtaaaagatcaagggggaggggagcaggagggcagcggtgggctgaagagttcagtagggtggggatcagggtctgcctccctaagaaggtacgatctgagcaaacacttgggtgtctggggaatgcatcatccaggctaagggaatagctagagcaaaggccctggggaatgtttgaggagcataaaggaagccattgaggctggagtggagtggagtgagtgaggggaaggggaaggagatggagccaaagacagcagggctcctgcgtgccctgccttgtgaaggcattggagaaggtttggcctctattttcaaccaccactgttgactttgcccctacctcttgattgtcacattgcagtgttttaaaaagaattccacaaaatcctgtggaatctaggggataactggcaaatagaattgggtggaattctcaggctgaatatggactttgttcattttcccagctgaaactacctagtagctgcagagtagagtagagatgcctctgtgctagtaggtctgggtttgcaatcccagtgctgccattttcaagctgtgtgacctgaggcagtctgatgctcctctctgaacctgcatttcctaagctctaatgtggatgttgtaatcagtacttcttatgggctgaattgtatctcctcaaaattcatgtgttgaagtcctaacccccagtatcacagaatatggtagggtctttaaagaggtaatccaagtaaaatgaggtccttagagcaggccctgatccaataggactgtccttattagaagaggaaacttggacacagatacacacagagggagcaccgtgtgaagacacagagaggagatggccagctaccagccaagcagagagcccttactgtaaaccaaccctgccgcatcctgatctcagaattttggcttccagaactgtaaggaaacacatttctactgtttaagccacttggctgggagtacttggttatggcagcctgagcagactaaaccagcacctcaaagagttgttatagggtatgcttagtggtaactggttcctaaaggccttgctttctaaggctgactcctcaccctgcaaggatgcattctccccactggcagatatgcaaccaggaacaggcattaacacgctttattcccagagttttaatattttccattgcataaaatatttgttcatgaaaatgacaaaattgctattagattctatcaccacatctctgttgattttactttctgcaaacacatacaagtaatgtaggcatacagttaaaaatgaaaccttatcctgtagttccagctactagggaggctgaagcaagagaatggcatgaacctgggaggcggagcttgtcgtgagcccagatcaggccactacactccagccggggcaacagagcgcaactccgtctcaaaacaaacaaacaaaacaaaacaaaaaaaacttatagacaagtacaaaatgagaagaaaaagtccctttcccttcatgcctctacttcctgctgtattctcaaaggtaagcactgattacagtttacttatggatctttccaggaaaatattttatgcatttatcagaaaatgtaagtatatgcatcctttaaaattctgcataaatcaaactctgcagggtactatcttcccatcctcatttgatattttgtagatcttttcctattggctgtacagatcacctcattctgtctcctgggtcatacaatatagctcacataattctaagtctgaaggttggtccaaatggttccaagaatgcaggtaccaaaaagtagtctcttgaagaggccatcagagacctggctgtttgtatcttcctcctctgccatccacagtgtcatcttcacccaaggtggctggagaagctgttaggaatatgtggttttttaaaaattacattcataggaaaaggggagggaagagaagaagaaaacctctccccctaagctcatggctctttttagtcaggctgagccaactaaagtcatgtacttcccttagataggtaactgttgccaggaaaatgccctgtgtggattggcctggactaagcaggatcctcctctaaagagagagatgagatgaatgcctgacccaagtctgggatcttgggtgggaagcgtgtggatagtaggtcagaggtcagcagtgtctgtggtgtaggatgtaatcccatctccacagagctgcataca

SEQ ID NO: 24272 - DNA, 2300 bp, Homo sapien; identical to SEQ ID NO: 24256

SEQ ID NO: 24273 - DNA, 2300 bp, Homo sapien; identical to SEQ ID NO: 24255

SEQ ID NO: 24274 - DNA, 2300 bp, Homo sapien; identical to SEQ ID NO: 24254

SEQ ID NO: 24275 - DNA, 2300 bp, Homo sapien
gatttatcactcagactgatgctaaggaccagcctagattccattgagattgaaactgtaattagtgttttctgcatgctgctgctttataccaagggcaagaaattgtttggcttaaaacactttttctaaaaattgtcttctgttggagtaaaagaggaccatgcctatatcttaatttgtttttggttagatatctgataccttaatcagatggaaaatagcaatgaataaaaaattaaactgtaattgtaaggcaggagaatagcttgtataaaagatctttaactgacacaatatgtgatgctctaaggctctatcctagggatgagaagcttggtgattctgatttcctggctgggagtggattaaagcaggaaattaagagggaggcaggctttttttttttttttaggcagtatctgtctctcttgctccggctggagtgcagcagctggctccatctttgctcactgtaacctctgccttctgggctcaagcgatcttcccacctcagcgccccaagtagctggggatacagatgcgcaccaccacgtggacctggctaaggtttgcattttttggtagagacaggtgtcactatgttgcccaggctagtcttgaacttctgagcacagcagtctgcctgcctcggcctcccatagtgttgggactacaggtgtgtgttactgctcccagctgggaggcaggcttttaaaggcatccaaaggaagatggaaatgctggtaagaaaggaaaatggtggtacataaattatgtaactagcagcactgtgactgttaactcttgtacctttttactgtgagactttaatcccttagtttaggtctggcctaatttctctgatcgtaatactgtcaaggaacctagaggatatttacttattttagttgttacttgatttgagaaatggaaatttcctgtatttggtactgtaattagtaatttttcttctgttcgattttagctggatatagtactgttagaaattactttcttgcttaaagggtaaatgtatttccctttgttgtttgggaaattgttgctgtttagtattttgcattatgataactttaaaaatgtttattataatcacttctaatttattggcaaaactgttagtgctttattaaaatgtgatcaggaagaaaaagcaatctatatgttcatttcttatgtgtggttaacactggagaaaaatttggtaaatgtgacatttaatggtaaaatgagtatgtggtcaactctatgtacgtgtttttaagtattacccatttctttctatgaatacttttgagttatctgcataaatagtggtagttttgagtaacaatataaacgagtttagtggttgctttggtttaagatgtattcttcggttagcatttaaaagtacagttctaagtttaatttacttttgtattacttttaaaaaacagatacatatgtacttacattaatgtgcaagagagggatcccaaagctcacagatttctgggtcttctttatgaattggaagaaaacacagagaaagccgttgaatgttacagggtaagttataagattcaaatatagcctttgcatagccaaacacatgatgcccagagaaatttatataagtaagtcaaatatattttatgaatatcataaaacaggcattggtatcatagtacaattatgtgatacagcttggaacagatttagaattgtttaacacctataaattgtaagtctaacacggtcagaaatggtgttcttttgtgttttttgcattcaaatgacacaaatataatttttatttgattcatttctagaaaattccaagacacttttattttaacacctttaaagtaacatgttttctctagaagtagaattttttaagggttggagtgataatttttaacctttatgtataagtatatatactcctacatacatacatacaatttatttactaatctttaatttcttttctgatattagcgttcagtggaattaaacccaacacaaaaagatcttgtgttgaagattgcagaattgctttgtaaaaatgatgttactgatggaagagcaaaatactgggtcgaaagagcagcaaaacttttcccaggaagtcctgcaatttataaactaaaggtaaacaaacaaaacataaagggagaaaacttaagacataaccatttctaatatttggagtttaaattacttttcaatagcaaaccttaagctcaggtgtttgtgtttcctttaacatttttcttttaaaaagtgtatta

SEQ ID NO: 24276 - DNA, 2300 bp, Homo sapien
tgcatggtagagccagataccgaaagcctgttttctgcttggaagactaaaaagagaagcctcagcaaatgaaagcaacagggtaattgctgagagagagttaatcagtgaagcaaccccattaacctgtctataaaccccagggctcattcttgagctgctcctgcatagatctcgtcctgttcaacacaccaaagattgacagctgaactgagagaccatcacccacagacacaactggccactgggtggtgcacaagtcagacagaactgaatagtcctgtgaagactctggacactgaactgactttggaaccagactgcagaatggaggggtgggaacttgtggcttgaacctaatcaggtagattgcctggccaaaatgaaaatacctatcatctccataggatttaatttcattcaatgattttttttttttttagtaaatttgcagtgttttacagccttccccaaaatctaattccaaaatatctctatcaccccaacgagagactccattcacgttggcagtcacatgcactcccagatttcccctccacccagcccttggcaatcactagtctactttctgtgtctttgagtttgcctactctggatatttcatataaatgaaatgatatatgaggttttgtgattggcacctttaatttagaataatgttttcaaggctgattcatgttgtagtatgcattggtacttcattattttttatgcaaaagtaatattctattgtatggctataccacatttttctttgagacagagatctcactatgtcgcccaggctggagtttagtggctcttcacaggcctgatcacagctcctgcatggatcaaggagcatcactgcagctgcaaactgcagcttcaaactctccggctcaagcgaccctcctgcctcaacctccccagtagctgggcctacaggcacgtgtgtctgtgcccaataataccacattttaaaaatccatcttcagtagatggaaatttggattgtttccaccttttactaataaaaatagtactgctataaacattcatgtataggttttcttttgtttttgttttttcttttttgtagagatgggggtctcgctgtgttgcccaggctggtctcaaattcctggactcaagtgatcctcccatcaaaaactcccaaagtgctgggattacaggcgtgagccactatgcctggcctgtatacaagtttttgtgtagacatgtttacatccaattaatgaacacaggatgtctttccattgatttagctcctctttaatttccttcaacagtgttctgtagtttccagtctacaagtcttacacttttgggttaaatttattcataattattttattatttttgataatattataaatggaattgtttacttaattttacttgaattgttccttgctggtgtataagtagacatctcatttttttagttgacctcgtatggtacaatctctttgaactcatttattatcactgatagtttaggtctttttttttcgaggtttcattaaggttttctatagataagatcatgtcaagacaccctcagaccacagggcggcgccacgagcccggccgagtgcagctggagcgccgacgtcgccgaggatacacagtgctgaggcagaacgcaggttcgtcacagtgggcctccgtgggcggcgccgcacgctcgtcacagtgggcctccgccggctacgccgctgcttcagtggcttgcaggcactttcctcttggaagtggcgactgctgcggggctgagcggtgctcgcacgcgtctcgggagccaggttggcggcgcgatgaggcgcagcaaggccgatgtggagcggtacgtcgcctcggtgctgggtctcaccccgtcgcctcgacaggtgagtgggtctcgaagagagcgacggcggcctcgacccggccggggggggagggggggggcggcggcggcggcctcggcccggccggggggcggcggcggcggcggcctcggcccgtccggggggcggcggcggcggcggcggcggcggcggcggcggcctcggcccgggcaacgtccggatgaggggcggcggcggcggcggcggcggcggcggcctcggccccggcccgtccggggggcggcggcggcggcggcggcggcggcggcggcggcggcggcggcggcggcggcggccccggcccggccggggggcggcggcggcggcggcggccgcctcgatggctcaggcgtcatgtctcccgaggggcgctgctccgtggcgcgc

SEQ ID NO: 24277 - DNA, 2300 bp, Homo sapien
tgactaacctggcagtgggcaccagggtgcagatagaaagagctccagaagatgccctctatttctggctcaagtaacgggaaaagggtctcctaacattccgagggaatccagaagttcgttcctccccatttttcttttccctgttctctcatacctcagcccacaagcagtcccacagtggcactggcaccagccccaagaggagcccaggagccaagacgcaggagggaaccttctccaactgacagagctgtggtcccaagagggcagaaacaatccatgttgcttctcttccaattcagtcctcccactgcttggcttcagatgtagaaatgcatggtagagccagataccgaaagcctgttttctgcttggaagactaaaaagagaagcctcagcaaatgaaagcaacagggtaattgctgagagagagttaatcagtgaagcaaccccattaacctgtctataaaccccagggctcattcttgagctgctcctgcatagatctcgtcctgttcaacacaccaaagattgacagctgaactgagagaccatcacccacagacacaactggccactgggtggtgcacaagtcagacagaactgaatagtcctgtgaagactctggacactgaactgactttggaaccagactgcagaatggaggggtgggaacttgtggcttgaacctaatcaggtagattgcctggccaaaatgaaaatacctatcatctccataggatttaatttcattcaatgattttttttttttttagtaaatttgcagtgttttacagccttccccaaaatctaattccaaaatatctctatcaccccaacgagagactccattcacgttggcagtcacatgcactcccagatttcccctccacccagcccttggcaatcactagtctactttctgtgtctttgagtttgcctactctggatatttcatataaatgaaatgatatatgaggttttgtgattggcacctttaatttagaataatgttttcaaggctgattcatgttgtagtatgcattggtacttcattattttttatgcaaaagtaatattctattgtatggctataccacatttttctttgagacagagatctcactatgtcgcccaggctggagtttagtggctcttcacaggcctgatcacagctcctgcatggatcaaggagcatcactgcagctgcaaactgcagcttcaaactctccggctcaagcgaccctcctgcctcaacctccccagtagctgggcctacaggcacgtgtgtctgtgcccaataataccacattttaaaaatccatcttcagtagatggaaatttggattgtttccaccttttactaataaaaatagtactgctataaacattcatgtataggttttcttttgtttttgttttttcttttttgtagagatgggggtctcgctgtgttgcccaggctggtctcaaattcctggactcaagtgatcctcccatcaaaaactcccaaagtgctgggattacaggcgtgagccactatgcctggcctgtatacaagtttttgtgtagacatgtttacatccaattaatgaacacaggatgtctttccattgatttagctcctctttaatttccttcaacagtgttctgtagtttccagtctacaagtcttacacttttgggttaaatttattcataattattttattatttttgataatattataaatggaattgtttacttaattttacttgaattgttccttgctggtgtataagtagacatctcatttttttagttgacctcgtatggtacaatctctttgaactcatttattatcactgatagtttaggtctttttttttcgaggtttcattaaggttttctatagataagatcatgtcaagacaccctcagaccacagggcggcgccacgagcccggccgagtgcagctggagcgccgacgtcgccgaggatacacagtgctgaggcagaacgcaggttcgtcacagtgggcctccgtgggcggcgccgcacgctcgtcacagtgggcctccgccggctacgccgctgcttcagtggcttgcaggcactttcctcttggaagtggcgactgctgcggggctgagcggtgctcgcacgcgtctcgggagccaggttggcggcgcgatgaggcgcagcaaggccgatgtggagcggtacgtcgcctcggtgctgggtctcaccccgtcgcctcgacaggtgagtgggtctcgaagagagcgacggcggcctcgacccggccgggggggg

SEQ ID NO: 24278 - DNA, 2300 bp, Homo sapien
ctcaaccgaggtgaggggaaaagttagggagccttaggaaagctctgaggagggaccccaattagggggaccgtagttagggtatgaggtttgtgagatcaggactggaattgctgcaagagaccctatgattgggtggcagcagcacgttgtggagatgagcctgcttcctcagcctcttcctcttgtcagaaccctttgcctctccctacacacgcacacacacatgcatgcaccatgctacagaaacctttctcagtcttgccattctctcaaattatgcgttggtcttcccttcatcttcagattctttaaagagtaatcaaagttcccacttctagcatgatgaagtgaggaggtcaacaaatctttccaaaatgtaactgtatagctggacaaaccatttagcattctgcaattttaccaaaggcacggcacaaatggggatgtgtttaagaatgaaagctggccaggcgcggtggctcacgcctgtaaccccagcactttgggaggctgaagcagaaggaccacttgagctcaggagttcaaaaacagcctgggcaacttggtgagacccccgtctgtacaaaaaaaaaatcaaaaaaggcatggtggtgcacacttgtggtcccagctacatgggaggctaaggcgggagaatcatttgagcccaggagattgaggctgcagtgagctgtgatcacaccactgcactccaacctgggcaacagagtgagacagaccctgtccctaaagaaaaaaaagaagaattaaagtgagccttggataagaccagcctgtgtccgtggcatctttgcccaggctgctacccccatttaccccagctgttgataacacacacagcggcccccagcagggcagcctgtggagataagctcccctgccacctcgctgcaggggctggaggcaagagtgaggaaggttttgatttgcagcatggctagttaaggtggtgatatcagtgaccaggaggaagaaaggccactgactcctagcctgaggctctgggcctttggagacgagcaaacgacctgcagattagtcatggatgtaagagggagctccgggaggtcggagagccagagggagcttagtaaactcttcacactacccaaatggactgaaggctcatagctggcagagattagagcaagcccaagccatgtccatatgcccagggcacacagcctgtgtgtgtgccggtgccagtgttaggaagtaaaagccggaacacccttgcaaatggcccggggcgtgcctcctccccattgcacatagatccagcagcagatggtggaaaccatattggctttaactgatgtttgactgacgaactatgcaaacaagaagcgacctctagggagtcagtctgaaaaattaaagcaaacaaatgccaacaataaaacttagcaatgacctgagtgagtgcacactgtggaggagacaggcttcctgcatggagtccagccaggagacagtacagaatgcatggagcagctattggaagacattgaaaactaaatagttgcaggcagctttcccaagaagaccagaacttgaagtaccaccaaaccggtggtgagataaccatgtttcccctatggcatcccgtgactaacctggcagtgggcaccagggtgcagatagaaagagctccagaagatgccctctatttctggctcaagtaacgggaaaagggtctcctaacattccgagggaatccagaagttcgttcctccccatttttcttttccctgttctctcatacctcagcccacaagcagtcccacagtggcactggcaccagccccaagaggagcccaggagccaagacgcaggagggaaccttctccaactgacagagctgtggtcccaagagggcagaaacaatccatgttgcttctcttccaattcagtcctcccactgcttggcttcagatgtagaaatgcatggtagagccagataccgaaagcctgttttctgcttggaagactaaaaagagaagcctcagcaaatgaaagcaacagggtaattgctgagagagagttaatcagtgaagcaaccccattaacctgtctataaaccccagggctcattcttgagctgctcctgcatagatctcgtcctgttcaacacaccaaagattgacagctgaactgagagaccatcacccacagacacaactggccactgggtggtgcacaagtcagacagaactgaatagtcctgtgaagactctggacactgaactgactttggaaccagactgcagaatgga

SEQ ID NO: 24279 - DNA, 2300 bp, Homo sapien; identical to SEQ ID NO: 24253

SEQ ID NO: 24280 - DNA, 2300 bp, Homo sapien; identical to SEQ ID NO: 24251

SEQ ID NO: 24281 - DNA, 2300 bp, Homo sapien
ccatataaaagtatgcttataaattgttaagaaaaacaccagccaggcatgggtggctcaagcctgtaatcaatcccagaactttgggagaccgaggctggtggtttgcttgagctcaagagtttgagaccaggctaggcaacatggcaaaaccctgtctctacaaaaaaatacaagaaattagctggacatggaagcatgtgtctgtagtcccagctactcaggaagctgaggtgggaggatcacttgagcctgggaggaggaggctgcagtgagctgagattgcaccactgcattccagcctagatgacagagtgagcccctgcctcaaaacacaaacaaacacacactaccaaatgtctagggcaagaatagttattttacagactaatggaaaaaaatataaaaacctcatcctcattcgtcagcaaaaatgataacctacaccattttctcacctaccaaattagtaaagattaaaaatcatcataatattcaattctgaagaaatattctgaacaataccagagattttctccaccagacaccaaaacacataagaaagttggaggccgaggtaggtggatcacaaggtcaggagttcacgatcagcctggccaacatagtgaaacctcatctttattaaaaatagaaaaaattagctgggcatggtggcgggcgcctgtaatcccagctgctcaggaggctgaggcaggagaattacttgaacccaggaagcggaggttgcagtgagcggagattgcaccactgcactccagcctgggcgatagtgggagattccgtctcaaaaaaaaagaaagttgtagtaaatacacctatgaaatgatcaagaagagatctactgactaaagcaaaggtatagatattttagaattggatcttgtatatatgaaaatttagtacatggtaaagatattttaaatcaatggggaaaggctgagcagatcaataaatgatttacagacaacaggcaatctacttggaaaatatatcctgatgctattcatacagagaagtttgaaaaagggaggcttctagttaaagacagtggcttgatatactccaaaaatctcaccaacatgacagtgaaggaattctaacacttcacatagctgttgaaggaggctaggagcggtgtgtccctaattgctagacaagttcagaaatctacaatgctagctacacctcagaatggaagtgaaggtggaggtgaagataggaacattgtaaaattctgtttaaaagcagatgctggccgggcactgtggctcaagcctgtaatcccaacactttggggggccaaggtgggcggatcacgaggtcaggagatcaagaccatcctggtaacacggtgaaaccctgtctctactaaaaatacaaaaaaaattagccaggcatggtggcaggcgcctgtagtcccagctactcaggaggctgaggcaggagaatggcgtgaacccgggaggcggagcttgcagtgagttgagaccatgccactgccctccagcctgggagacagtgagactccatctcaaaaaaaaaaaaaaaaaaagaatttaataagatggccataaaaattaaggcaatctcaaagaaaattagggggaaaaaaggacaaagatagaaaatggtgaaatttaagaaaattaaatgaccagtccaggatagcctaacagagagtatgaggaaaaaatatccacctctgaaaatatatatcaagaaaattccccagaattgcaaaactagaacatttaagcactaagtataatggatgaaaagataaataccagatacatcactatgtcacaatacagcagggaaaaatgattctacacccctctagagaaaaacaaacatcacatcaaagaaccaacaatcagaaggactctgggtttttccacaccaatagcgcaagccaaaaaacaatgaaggagtgtctttaaaaactctgagggaatgtaagttccctcctagaacattgtgcccaaccaaattatcaaccaaatgtgacggtaaaataaagatgcttttagacatgcaagagacctcaaaaactaacccctcaaacatgctgctgttgccttttttttttttttttttaaataagctactggagaaagtgtgccttcgaaatgaggacagtaaggagagataacgacatgggaaccagggatataccacaggaaaggagccagggagaacaatttattaacaatttcttgcaactatccagggaaaatataaattatacaaaaagaaatccaaacaaatcagaaaaa

SEQ ID NO: 24282 - DNA, 2300 bp, Homo sapien
gggagggagcttcaccagttcaacatgagcagccaccggggttgatcatgaatccccgtttcatgcctcctgggaaaggtgtgagaaggagggaggcaccccgaggcttcttgccacacaagcagcacccgcagcccagcattgcacacctgcgagcactcagtaggtcctggcatcaagaaggggaaaggccaggatccaagacccgctgggatgtgcccagtcccacggaccccccagcctccatggagccctcggtgtctggggtggcctcatggccccgtttctcaagatgaggttggaggcttctgtgtgtagagagcactggcttgggcatcagtggttctgtgtctgtgtcagacaccaacaagaaacccttgatatacatattgtagcaggacgagccgcagacaaaactcctgacactggattaaagaaggaagaagtttattcggccgagagcgttggcagactcgcatcttaaaagccgagctccccaaaaaagaaattcctagcccttttaagggcttacaacttgaaggggggggtccatgtgaaacggttgtgatagatggagcaagcgtggggaacgtgactgggggctacatgcatcggctaacagaacaaaaagttttacagcgctttctcatacaatgtctggaacttacagataacacaagtagttttggtcaggggttaacattattattattattttaaccaccaaggccgggtggtggcgccaaggtcgtctagctatttatcttacttctgtttctttctaactttttgctgtctcacttttctcctgtcttataaactagggaaaaggggaggtggtggagaagaagctgggagggacaacaggagaagtggtggtctcattccatagtataagcacattttttccaataagtcaaccttagcttactgtaactttttcactttataaacttagtattttaacttttcaaaaaacaaacaaacaaaaaacaaaagaaacatcagcctattacatatttcctctttagacatctggactcctctacaaagaggtgtctatttttgattttatggtgtctaagaacttggtctcccagagtgccctgtcccccaaaagatgttcaaagctggcattctataatctacccaaactcttctgcttttgtgttaattacagctggctgcagagagagtccagtcccgtgagccccatcttccgcttgaagctgtttgacaggtcccctgtgtggctcagggcccagcctttcagatcagttcaataaaacccaggggtctactccaaggacactaacccatcactttccagtgcctcgtataattacgcagccgaccctagaacgccctccccgcctccacgtcccctctacatgaaggcgctaagcccaaaactcctcaggtttttccacaggccgtcgtcactccctctttgccacggcgtttgagattctgggctaagactattggtttcagcatctgggatgttttctcacagccgaggacgctgaatagaaaactgccagaaagcgggaggggtccccggcagcaggtcccgttttttctccccacctgcctcccgggtgctgcggcttccgccacgacagtctcgaccctgcacacggatttttttcctccgttccatgaaccaaacataatgattctggtttacatatttaagcgaaggggagaagaaacgcgactctcaggacccaagggctgaggcagggtttttctgtctcaaagacctccagttaagacatttttctcctgcaaagcctttcctacaatgatggcttaatcgtgtaattatgtaaaccagtcacaacctggatagctaaaacaaaaaaaccaattccctacgcccgagccaagcctgctccccctcgccgtgccgcatcccaaacaccccgcgctcgctcagccaacggccaggtttcggttcaaccgaaaaccacgggaagtgggaggagctactggctcaagggagggaggtgggacttgacctccgagcaacggccccggtgattggccaaccttctgccgccgccaccaatgggcaggcgccctgaaacgttcggcgagccgactgcggctgcgcggggtattcgaatcggcggcggcttctagtttgcggttcaggtttggccgctgccggccagcgtcctctggccatggacaccccggaaaatgtccttcagtaagtgtccgtctggtggggtggggaagcccagggggctggggcgcctggggttcgggcccggcccgccccagacctgcct

SEQ ID NO: 24283 - DNA, 2300 bp, Homo sapien
tcacttgagcccaggagtttgaggttatagtgatctgtgactacaccactgcaactgcactccagcttgggcaatagaatgagactctgcctcaaaaagaaaaaaaaaatggtatcatctgcaaatagttatagttttacttctctctttacaagttgggtgacttttatttctttttcttgcctaattgtcctggctagacagttcaataaaatgttaaataacagtaatgtgagcagacatccatgtcatgttcctgatattagggtgaaagctttcaggtattcactattaagaatgatgttagctgtgggtttttcatggcttccctttattgggttgagaaagttccctagtttgttgagtattttgttttgtttcttattatgaaagcaggatggatttcatcaaatgcttttttcctatatctgttgagttgggatgatcatgtggagttttttcttcattctattaaaacgatgtattatattgactgattttcatatgttgactcactcttgcactcaagggatatatctcatatacaattttttaatatgctgctggattcagattatttgtattttattgaggatttttgcctctgtattcataagggatattggttgccagttttcatctttgtgatgtctttgtctggctttggtatcagggaaatacttgcctcatagaatgaagaagtggtcttttttcttccaaattttggaagaatttgagatggattggcatcaattcctctataaatgtttggtagaaatctgctatgaagcaatctggccttgggcttttctttgttggaagattttttaaattaccaattcagtctcttcatctgttgtattcagattgcttatttttttttcttctgtcagtttgactagttttgtgtgtttctaggaatttgtcaatttcatctgttatctattttgttggcatgcaattgttcatagcactctcttgtaattcttttgatttctgttaggatggtagtaaagtctccactttaattcttgatttttttcttctctctctctctctctgtctctcactctctctctcttttaatcagtctagctaaaagtttgtcttcattttttaaagtagagatggggtctcactatgttgcccagtctggtgtcaaactcctggcctcaagcaatcctcctacctcagccacccaaagttctgggaatgcagttgtgagccaccacattttgccagccaaatttgcctattttatcaatcttttccaagaataaacgtttggttttgttgattctttccatcatttttctgtcttctatttcatttatccctgctccagtctttgttattttttccccttctgctctttgggtttaattgctttcctttttctagttccttaaggttgaagttcagttgatttgaatcttttttcttttcaatgtgggcacttacagccatacatttctctctgcctgctgcctttgctgcatctcataggtttgggaatgttttgtttttctgaaagtattttcaattttctcttgttatttctttttgatccatcagttatttaagagtgtgccatttaatttccacaaatttctgaattttctaaatttccttctgctattgatttctaagtttattccattgtgtcaaagaagatactttgtatgccttcacttgttttacacttattgaggcttcatttgtggattaacctatggtcatcctggaagttgttccattagcacttgaaaataatgtatgttttgctgttgtttagtgaaatgctatatatatgtctgttcaattcagttggtttaaagtgttgttcaagtcttctgtttccttgtttatcatttctttagctgttcttctttttttttttttttttagatggagtcttgctttgtcacgtcacccaggctgaagtgcagtgatgcaatctcggctcactgcaacttctgcctctcgggttcaagcgattctcttgcctcagcctcccgagtagctgggattatgggcacccgcccccacacccgactaatttctgtatttttagttgagacggggtttcaccatgttggccaggctggtctcaaactcctgaccttaagtgatccacccacctcggcctcccaaagtgctgggattacaggtgtgagccactgcacctggccatggttagttgttctattcattattgaaaggagggtgttgaatttttcaacttttattatttaactgtctatttctcacttcaattctgttagtttttgcttcatata

SEQ ID NO: 24284 - DNA, 2300 bp, Homo sapien
aggtctccggatcaagaggagccacatcctgacttgatgcaaggaccactctgtatcccccaggggcctcagacttgatgttgtggaggtgtggggctttggctgcttccctggaaggatggagagtatattttgcctgtggaagggagagtgtgaccagaagggcagattgaatagtcactagctctgcttacagatgattttgggtgttgacctcctgggcatgtccagggtggtacctcccttcccccatcgagacaggagtgagctgctttgtccagtggattgtgagtagaagttatgtgtgtctcttccagctggaagctttaaaagccagtgtggccacacaatcatggctgttctgtcagccaggacctggaccgaggggacatggaacagaacccccaggtagcatgagtgagaaataaactcttgtctttttaggccctaagatttgaggaagtgtatgtgaagtcgtttcggggttgtttgttaccactacactattttggctgatatagaaggaaatactcctcttctgctttgcacagggtggtgcttggagctgcagcatccatcttacaactggtagaagacaagttaaaaaaaaaaaggtaacgattacatatagagaaaggatggcggatggtggagcagaaagatgcaaaggacctgggtccccagggtagagccatcaaattcacccctggggctttcctaccaccaagcttcctgtgatgtgagaaaacaaagccccttttatcatggatgactgggtattattactcgcagctgcacaggtgtggtagacagaggaatgactcgccaaaggtgctcatgttttaatccctagtaccggagagtgtgtttctgatatggcaaaatggacattgctggtgtgattaaagtatggatcttgtggtgggaagattattcccattgaccatggattattcccatgggtcccatgtaaacaagtccaagggaggcaagaaggtcaaagtcagtagaagatggaacgatgaaagcagagcttgaagtgatgcattttgaagacagacgaaggggccaggagctaagaaatgcaggcagcctctaggagctagtaaagacaaggaaatgcatttttccctggagctgtgagaaggaacccagctctgccaacaccttgattttaaccctgtaagtcctattttggacttctgacttccagaaatgtaagagaataaattggtgctatcttaagccactcactttgtgggaatttgttactggaaacgaatacagatggcatccactaacctcacgacagcagaccacaccatcatctccccagcaaagtagcctctggaagggaacggctaacatttccttgagtatttaaaaggagaatcaacaaggtatatgagaattagggagcagaaaggaaggaacattttccacttaggttataactcattttcctccagccacaacaaaaaaaggagtgtcctgggaaatgagtatcgtgttccggtcgatcacctcgtcatgaatgcagcttccagctaccctggactgcagtgctgtagacctgggacgcctttagattaccgtgatattagagttcacagtaatgcccagtgcggggaagaggtgagatacagctgaggaggggccagagctggagccaggctatcttgggtcgtgggggtcaggcaaagtggctggccgggagatctgctgagtgggtcagccggtcagtcctgagcagccgggcctctggtgcccaggtccacgtgactggcaccctttctaggggtctagtacttgtttcttacggctcacaaatcttgagggacagttgataactggagggtagagttttcgcttcctcggaagggcaaggggaggccaccgtagaagcgcccgctcgcgccggacctcccgcccgggaagccagggcagggcggggccggggagggaggggagaggaaggtgaggagggaggagacgggccgggaggggtggagagggagagggcgtgcgcctggggcctcacctgctgggagctggaggaggcgcggagcgaagccggccctgccagccacgcggagaagcagaggcaggtgagcgcgatgcagccggcgccgggtctggggctcggggactcctccctgcaccgctacctggacggcgacttctggagcctcaagaacgagctgcgcggactcctcggcggcgcccgctcttccggcaaaggtaccgcgctgcggccgtcgcccctgcccgcgcccccgaagccgccgagcgtgtcccct

SEQ ID NO: 24285 - DNA, 2300 bp, Homo sapien
ctttgcacgatcaatagcttgttggtttagttcagtcacatcttcaatactgtcaactccaattaaatgtgcagttccactctctgccatttctcctgggctcccaacttgccccaggtgccctgtattcagagctggcaccagggccagttcctttttggcaagaggcttaaaggtaacccaggtggcagtggagactggggagagccaagaagtgaggggagcatttccactatcggcttccagagagtaggacagagaagacggagttttgagccgagcctgagaacaaaacccctgcgttttcttcctgcttcttcatgaccagtgttagtttcagactgttttgagctgaaatccttggacatattcagagacaaactgcatggtacattctaagatttttccctcctaagaaagagactcatttacaagttcttccattttaggagcttgaacatatgaacctcttttgggaaactttattatatgcattgatcagggaaatagagagacattttcaaaggttgaaatgagggatttctttttataaaaataaaaattgggctgctactctaagcagtggtgggaataggtcatggctgtctatcagtcttgctttatccaagcgtacggttttggccttcagttccctggctttcatttaaaccaagatccatgtcatggaggcaggaaggttcagggcctgggaaacagcgaggaaccaagtgatttgcccagaaggagtgaacaccagcagacaaagtgcgactcacagatgcggaccctgggacaagccatctaagggcccagatcgttggatattccatcctttcttagaaatcttgcaggtgggatatttggagatgaggggcatggagagctgagcatataccaccagggcttttagaggttttggtgttggatgagttaaaggtcaaaactttgctatgaagtagtctagcgagataattgaagaaagcctttatacattaaagccaggcaggctcagccaaacagcacacatgtcagcctggcattataaagaggagagactgggagggagagaacaaacaccttttaaagattgaaaactggcaacttattttctggatcagattattccttgaaaaatcactttaatctcagccattttcaaagctgaggtggaggtgaaataaatgaattgaggtgatagcacagccatgttggtttcaagacgtggagccaggtgaccttcccattgtcttctcttctgctgtgaaatcccctggaaacggaaccctgcactgtgtggttctgtttttcacagtattcattgcttttttttttttttttgagatggagtctcgctctgtcgcccaggctggagtgcagtggcgcaatcacggctcactgcaagctctgcctcccaggttcacgccattctcctgcctcagcctcccgagtagctgggactacaggcacccgccaccatgcctggctaattttttgtatttttagtagagacggggtttcaccatgttagccaggatggtctcgatctcctgacctcgtgatccacccacctcggccccccaaagtgctgggattacagtattcattgctttgagccagggagttgaaatgagccatgggaagggaaacactgttgctctgctttttctgtgtaggagtttgtaattgacacgccgtgtgaaaatgcggagaagatgtatattggaaatgccatgtacgggaattatgcagctgtctttgcccagctcatcatagatggaagatctcaaggtttgttaccaatacagacaactagaataattctcttcattagtactatttaccagtgaaaaaccatttcacagagctgcttttatcttgtaaataattcagtactaactttatctcctaatatgcatgaagaaatttatcattacattttgacattatatgctctcatgcttggtgcacagttgtagaactgaatgagtttgaggatcacagaaatgttatactattccaggacatgagtaaagctataggaaggagagcttaataatgatctcgatgccttccttagggccccactgtttcatcgttcctgtccgggatgaaaacggaagcttgtacccaggagtcacagctattgatatgatgtacaaggagggtgagtccccaggtgcccttttcctgtgctcactcttcctacctgctccccacctgactcaaggagaatctaacctacgttatattaccgaagcactgagggtggagaaaacttccccagagaagatgtccagatt

SEQ ID NO: 24286 - DNA, 2300 bp, Homo sapien
agacctttgatcgtatttgcaagatgcactaaaatgaactttcactgaccaagatttcaaagtttgtaattaatactcttgaaaaatccctgactaatctgtcaactctcaacgtctttaaccacacagttcaaaaccatgaggtggcgtacacagcccctaaactttccacatattgtcatatgattattcaagataattttccctttgggtttgcattatgaaactcaaccaactttggtaatatattcaccggtgggggaaatacaatgatttgaatgagtgtaaaatagagtatgggttttatctatctggtgccaaaaacagaacgtagggccagaggtaggaattaaatgaggcagatttcaatataaagaaaattttaaaaaaataaacttgaaaaggaacccaatggctggtgaaaaggagggtttcttcactcataagtgttcagggagtgtgccctccaatggcaccctagagaagaaaaatgaactggctgtgaagaggagttgactgccaagattctttctaaatctaaagttctggagcagtttaaaatactccttctagccttctccatttttcctagactgcaacagaaacctcagaatgattattgtctcaatggacggatccggcatcattcctgttagttattgtttgactcttagttattgtttgactctgattccaggtacccacccacctctgttcctggctgtcaagatgataataataattaccatcctttcactcacaaatggtatgctggattcctacccagtgttaggtacaattctggactttagaggtttaatggtacacactacaggaacaggtctcacatcgtgaagctgttgaggcgttttaaaaatttttaaaaatatatgatctctttaatacaaaataaacttgagaagataatatagcattgattattacacagttacagtatttttattaccagggggtatttttatatggggctaagcagtgtattattaaagtttagttttgttaccaaacatgcttccatactataagcataaaaattgcacatagtgtaggggtcctctgccctgccagtttatgacccatttatgctggacaaagtacttcaagcttacccatatctttacaaagaaaattcaccagcttttgaaaaagacaaatgaataggtatactttaaaaataaaaaagtatgaacaagttataggttcttgcaaaaacattttttaaggtcaaacctaaacatgggcactattgctctacaagcaataagaatgtacagtccactggaaatagccagtgagtggaatttgagaatatctgctttaaagaaagcagaagcactcagccctcaagggatgacactgtgtttgactatattaatatgtatatttgggagtgagggaaaaattgtaacatcagtttggcttcccacctccatctagttgcagtactcaatttatttttctgctctttttgactctccctacagtttccttatttcagttgggagagtaggatggccaaggatgggcagtgactaagctttgcagtcctctgaacaaaccatattttcccagcatggcatggtgttagtcctataatagatgttcagggtgggaagtgcccagtacacttggagggacaccccagctattcctaggactccatgcagaaggttttcctgcctcttcccatatgtctcacccctgttctcagcataagatgaccacatgctgttttttgtgaaaaatcccttacccaaacttgaaatgtcccttcattagcccctttcgtctggctaccttggtagagtctttttctccatccctttaatctgggctgagttatgacttgctttgccagtagaatatggggaacatgtcactgtgtgatttccagagtttaggccttaagaagctttgaatcccccattatcactctcctataaccgtgagaatacctgctgtgcagaagcccagtctagcctgctggaggacaaaaggccacgtagagatggaccaaggtgccttggccaacagccagcacccactgccagatatgagagagaggccatcttggacatcctagtcctgttgaactcagatgactgcagccacaggagtgatcccaggtaagactagccaaagaactgtccaggctgcctgcccacagaataagtatcagtcattatcaccggttaatgcacagaaatagaaatttttaacctgactaagcaaaacaacaaataaacttacttgctataaggaatcaattccacctcctt

SEQ ID NO: 24287 - DNA, 2300 bp, Homo sapien
ctctgcgctccggcccagttccgggaggacctcccgacggcgcgggagaaggctgtaagggctcttggcccccgacgcggcctgggtctcgggggacgcatgaacccgccacctctggccggcttccttttagtgccccaaatagcagcgcttagcccgttgcttcccccgactcttgtttttcaaagtgttcacagggtcgcgagagcgagcgacgcgggggcggcgaggctgcaaggctgcacaggaacagacgacaagaaatagggctttcttctgcgtggttcttttccggtccctgtctgagtcgcccgaccccgcggggagcgcggagcattgcggcgtgcggcgggcttcgggctctcagcccgcgcagcaagttgtgttgcttttccccgggtgcgacgcgggacggccgcgaagagcaaagttcgtccgcggtaggaacttcgaggcccggttaggaccgatctccggcctccgagtctacttagccgtgtccacgctcgtgccttttccctcttgcagcgaaataactgggcggggcccgacgcgcgtcctccagcgactccgggaacccaaggcctccttcacctcgctcaaaattcacccgaaaatgcgctgagactttggcatggggctgcgctgtgtcccactgacgttacagaagcgcttatgaatttaaaaactgctccaggcggccggacggcgggacaacgcctcctcacttgctcctctacggcaaggccccttccttctccctgccggctgcggtggtgtgtagggtggtccctttacagagtttccttaatccatctagcctgacctcacctgcgggatgttccatttcccgatccacctcccacacccccgctgcagttgtctagaagctggggctggggaactgaggcgcgggaggagcagacaggagggccggggttggggcgccagccacgcgttgggagagcagacccgggtgcagactcagaggactggagaggcggcatggagtttggtctcctgggaggtagagtgaggtgctgcggactccagggaggaaagggatgggtggggaggcgggaggggaggagggacggggtattttgcgctcccgcaccgcggcccgaactcagctgttctgccttcactggcctcagccagtcgagggagctcctacgaggttatctgcgagcccagcaaatcttgggggtcctagccaaatgcagtgcgcaacgttctctctcacttggaggccgccattcacctcgtttttttttttcctaaaaggatttttttttctgagtgcttttttcatttccctattttacctgctttgcacatgcctcccgccctcacccgggaggcggcgaagacgcccactgggaccgcgcctggccgttttctgggcgcgtcctgcccccacggcctctgtctcttagggcgactgggcgcggaagaaaagctggagagcccctgcggggtggcaggaggagggtgcctgagtcccgcgagaggcccgggcgaggaagatgcgcagcctgctgatccgcgtcccgcccggcgccagggaccctcagagggaggagagctcaaagacctcgccccgcgccttcgcgaggaccaacccagtccccgcgcctgccccagagcggcttagaaactcagggcacagtgagagcgcagggcgcctcccgaggcttcacaccgccggccgggccagcggaggctgtgaccggagcgccccctctgtgccgcgcacgccgcggccgccgccgggttggggtaggtgagcgggaggctagggtacacttcggggtgggggatgggcgcgcacatggccgccagcaggcagagttactccggtaaacacgccagggacggcggcgcgcgcgggaggcaacccagcggggcaacccccgcctttacctgtccgagcctgcacgcgccggcggccgcggcgccgaggggggcggagcttgccagcccgcgcgccggggcgggacctagcgggggcggggtccgcagtgattgggcgtaggagcggggccgccagccagagctgggctgcagggccgcgcaggtttcacttcgctccgcgcagccgcctggtctgcagtttgttggagctctgcgtccagcgccgctgccgctgccgccgccgccgccgccgccgccgccgccgccgccgccgccactaccaccacttgattcttgcagccaccctgcgaaccctgccacactgcgatcgcatcatcgcggtattcggttcgctgcgttcccgccgccaccgcctcggcgcc

SEQ ID NO: 24288 - DNA, 2300 bp, Homo sapien
accgaatcagacagaacttctctgaggtgcacaccgtgaggtgcacatctctaaatggggagggggcggcggagggcgacgaagcgaacgcctgcaaggtctacaactaggtccgcaggctaggcgacaccggtgcgcgccgcgccgccttcatcccacagaccctcccctcagaaggcaatcacaccgaaactcacgtccgcgccttcccttcagagcgcagcgtccgggccagggaccaagccccgcggcgtccggcccgcgcccttcgccgaccgggcgccccctgaccgtcaccacgaaagcagcgcaggagacaaagcccgggactcgggttcagagtccccggcgcagcgcaaagcccgcgccttcccgccagcccgccgccgcgctccgccgggcagccgagggctccgcacgccgcgcctctggcccgcgctgccccggccgcagccgccgggaacatcctccgcctcctcccgctcctcccctcgcgctctgcgcccgccgccgccggcaccgccgacctccccgcgccgctggcgccgggtgcccgcgttcccaattggtccgcgcgcggtcgctccgcgccgcagccaatcggcagccgcggtgggggcggcgcctacgggtcaggccgccaaaggcgaggcgattgttgacaaactcgcctccgagcgctgctctggccgtggtcgtggcggctgccgcttcgtcggaggatttgagggccggctggcccggccaccctgcccatccctgtgctccttccggacacaagccttagcagctcccgccgtcctggacagccagtcacctggagacaaagcaggacttgcgccgcgcccggacccgcagggccatccccaggcccagtcctcgccacttgtccttgttttggcccgtcgggggcagaccctaacggccgtcaccgccctggctgtggcaactattctcctccaacaacttcctctctctcctggtgcgccgcagacacgagtcaaagccgaagagccacccctggccgcggacgcgcacgtccgcgaccatcgagtaaattcacaccctccgccctggcgtccgtcgggccctccaccagcagcgccaaccctggggcaacaggtcccagagggcacggcgccgccagcctgcaccgcgaaccgggtcgggtgtgctcgggcatgcgtgagccgctaagatagcccggcccagggaccgagcaggttctgccggccgcgactagtcccctgcgcggtccaggtggtcaggggaggacctagatttctcgctgccagggaatcgtgcggatggcacaggccgcaggactcctgcagagcaagcaggggccccaggtacgcttgagaaagcgaacgcagcagtggccccgaaaccttggcctgaatgagtaaaaggaaaagccgtgtctcgtcagttaaatcaccaccgcagttccgcaaatcctccgcaacaggcccacgcgccccaaaaaaccaagacacgaaacaccctcacactgcgcggccgctactctgagggcgccggagccggcggcgagactttccagctgggcgcacagcccgatactacgagcaggtcctcagctcccgggccggcgccgaaaggcacgcgctgcctctcctcctgcccggacctacgacccttcaccaggcccgcgcgcagcatcccgtcccaagccgcacttcggccaagagcctgcaggttccgcgtgaacgacttttctttaaagagaacctgcccgagagggaacccgatccacacggatccccacctcccgccggcgacaagcggcgccgatgcaagcgtctccgctcgcacgtgcacgggaagcgggcagtaggtggtgccgttcgggctccagcgctagtcttccttcggtgccaggcccgcgccccgggatttggaggtatttaccttgcgtttctcagtccgagagtcagagtcagacatttgggggaacaagggccaagaaagggcgccgaggcggtggcggcgggaacgcagcgaaccgaataccgcgatgatgcgatcgcagtgtggcagggttcgcagggtggctgcaagaatcaagtggtggtagtggcggcggcggcggcggcggcggcggcggcggcggcggcggcagcggcagcggcgctggacgcagagctccaacaaactgcagaccaggcggctgcgcggagcgaagtgaaacctgcgcggccctgcagcccagctctggctggcggccccgctcctacgcccaatcactgcggaccccgcccccgctaggtcccgccccg

SEQ ID NO: 24289 - DNA, 2300 bp, Homo sapien
ttttggggcgcgtgggcctgttgcggaggatttgcggaactgcggtggtgatttaactgacgagacacggcttttccttttactcattcaggccaaggtttcggggccactgctgcgttcgctttctcaagcgtacctggggcccctgcttgctctgcaggagtcctgcggcctgtgccatccgcacgattccctggcagcgagaaatctaggtcctcccctgaccacctggaccgcgcaggggactagtcgcggccggcagaacctgctcggtccctgggccgggctatcttagcggctcacgcatgcccgagcacacccgacccggttcgcggtgcaggctggcggcgccgtgccctctgggacctgttgccccagggttggcgctgctggtggagggcccgacggacgccagggcggagggtgtgaatttactcgatggtcgcggacgtgcgcgtccgcggccaggggtggctcttcggctttgactcgtgtctgcggcgcaccaggagagagaggaagttgttggaggagaatagttgccacagccagggcggtgacggccgttagggtctgcccccgacgggccaaaacaaggacaagtggcgaggactgggcctggggatggccctgcgggtccgggcgcggcgcaagtcctgctttgtctccaggtgactggctgtccaggacggcgggagctgctaaggcttgtgtccggaaggagcacagggatgggcagggtggccgggccagccggccctcaaatcctccgacgaagcggcagccgccacgaccacggccagagcagcgctcggaggcgagtttgtcaacaatcgcctcgcctttggcggcctgacccgtaggcgccgcccccaccgcggctgccgattggctgcggcgcggagcgaccgcgcgcggaccaattgggaacgcgggcacccggcgccagcggcgcggggaggtcggcggtgccggcggcggcgggcgcagagcgcgaggggaggagcgggaggaggcggaggatgttcccggcggctgcggccggggcagcgcgggccagaggcgcggcgtgcggagccctcggctgcccggcggagcgcggcggcgggctggcgggaaggcgcgggctttgcgctgcgccggggactctgaacccgagtcccgggctttgtctcctgcgctgctttcgtggtgacggtcagggggcgcccggtcggcgaagggcgcgggccggacgccgcggggcttggtccctggcccggacgctgcgctctgaagggaaggcgcggacgtgagtttcggtgtgattgccttctgaggggagggtctgtgggatgaaggcggcgcggcgcgcaccggtgtcgcctagcctgcggacctagttgtagaccttgcaggcgttcgcttcgtcgccctccgccgccccctccccatttagagatgtgcacctcacggtgtgcacctcagagaagttctgtctgattcggtgcggcgtgcggtacgggagcgggagggagggagcacgggcggagagagcgccagagccgggccgagccgcgctggagttacaaactctattgtgacgcacttactacgactgacggccgctgccagaccttccccagacttgctgccctcagcattttcggcaaacaatggggccggagcagggaacgcggccagccgcctgcaatcgctgcatctgcgcccgctcctgtgctccggcgtcctacctaaccccgggaagtcagagccgctgggagtttctgacttactcgaagaagtctgtcctgggcaaagagcacacacgaatagacttcagattagctgcttctctggaaacgcatgtgtgtgtgcaccagttccgcaagctgttgacattgttactgtattttgtttgggggtaccctctaccaaaaaaaaattacacctttattattttaggtgcaatttttttatttgggagattgtcagaaaagtatagaacaaagtatttgggattaaccctaagaatttttaatcgctaggtgagagctaatttgtttattcatcgatttttttttttgcttaaaataatcttagtttttattttacttgcagaaaaaaagaccaaatggcaaagcaaccttctgatgtaagttctgagtgtgaccgagaaggtagacaattgcagcctgcggagaggcctccccagctcagacctggggcccctacctccctacagacagagccacaaggtaatcctgaaggcaatcacggaggtgaaggggacagctgcccccacggcagccctcagggcc

SEQ ID NO: 24290 - DNA, 2300 bp, Homo sapien
ttttattcgctattgttttgaaaaatggcaggcactacagacatacaaagtgcagagagtggaaagacaacaatgtgttttagggccaggcagcccagagctgcccaggctggcaccctgcccagaagtgggagtgatctggcagaggccagggccttgcaggaggatttttgcagacacccaacttcctgcatcagtggggtcgagtgatctctggagtgccttccgacctggagaggtcatttcaagtctctgcaatggtagcgatggtagctccagcaagggagggaaaaggggcttccactggctcttggacactccagctgtcatttttgggaatgtgcttatctgccccagagggaaatagatgattgagaaaggaggcaaccaggggacttaggctttaccagcagtgacctactagctccggtgtgtttgcctcagacagcaggccaaggctagtgtcacggcagtttagggggtcctgcacattcactgtgccaacgagcggtattttgcaaacttattataaacagattatatttcttatcctaatgtggctgttggctacctgcccatgaattttagcctccaggagaaaaacaattgcttgagctgagtgttctgtgcttttactttccatacattactcagggctccttccagttcccccaacccttaatctctctctttctctctctctctcgctttcattctctctctctctccatctttttccttcttttcagaaagtcctctttcatcttgggcataactagaaaatctgtaagctgtgctttctgccatgcattagccaacagggtcctttcctcccaagccagggaagaaagcacaaaaagcaatgtccaggctgggcctctcagggtccacagcatcacaggcaaaggaagcaactgtctccatgcctaccaacggatccacacacatctcgctgggcagcatctctgccccaggaagcagcgcgcttactacactgggcacccagatgtctggtcttgcgtggcaggcagccactttctcccggccttttcttgtcccaaaagtcagaggggcaggccagttccagaatgggattccaggcagaccaggagactaggagtgcatgtgaacaactgcaaggggatgcgtctgtctgcctggtgtccgtgtgttcatgtgcacacctgtgcacgcgctcccccagacttacacacactcgtgaacacatgctcacacaagttcatgcacgggagtagctccaagcctctcactcagcactttgctattaatagctcacttttctaaaaaagtctgcttagccgtttgtaagaataaccaccactgcctgtgtgacagcccaggcccccgcagggaggacaggaccggccctctgctaggactgcctgactgcctgcctcacgttagaatccagagggagggccaagaggggagatgaaaacccttcctgagtggccagggcagcctccagtgcctgtgcccagggacaaggcaactcactggtaatgtctgcgggcagttggccaggcccctgagagccaagatgccaccttcttcatggtgacagcagggagcatgctccatgaaaccagaatgagcctgttctccactctggggtcctgctgtaaaagccaagaagcagagagccaagctgagcccaccaagagcttggcacgaggctgtcacccacaacttctcgctgatccaaaagacaggctctgaggctggaaattcaagtgtggtggtgctgtgacacagcacacagccaccgtgcacttgtgtccctggcagccgcaatccgggcctgagagggcccagtgtctgtgggtgtttgtatttaattgcagtggggtgagaaaggccaatggttgggttttatttcaaacctgctttgaggagaagtaacattaggtggcccagagctgtgaaatgtgtcctggtcataaatgcttcaccatcaattaacacctccagaatacctaagagttgccagcaacttcccattcaaataacctcttaaaccttcctccacaccacactgcccattccctcgcaggcagacctgcatggtttgatgacgactggtcacactgctggccctatctgtataaaagtccagacagttgggctgtgaggggaaatgcctacctcagagtagcttaagaaagaaagatattggtttacttctgaaaagctcaagaccagctgagtttaatggcatcattaaactcattagacatggggctgggaagtggctgccagcagtttggtgcacagcctgt

SEQ ID NO: 24291 - DNA, 2300 bp, Homo sapien
ttgaacaaacagcctagctcttagaccccaaggaggtggtagcgaattggcagacaaggtctcacctttttttgtctttctagtgaaacacatataagcccaattatgtaaggccatcataaatttcccccaggagactggcacagggagatgggggctactctcaccttctgcagcacacaccaagaatctctgctgtgcttgggttcatgactcaccccttccctcaaagccagctcttcctgagtcaggaccatgtcctttgagtcctgaggtgcagcaaggaaactgtccagacttggcttcaaaagccaggctactttccagcaaagagccaaatggctggttgcttagaatttttagaacaggttcatctccaaggacatggagtctattcacataaatcaacctgatcaaaggccagagaagctaaaactgtcacatacccattatctactggcataatcaaggccaaagggattcataaggaggcggtgggttttggagggagagtgcttgctgctatttcaccttggacctgagtcccctcttgtgtgccccttgctctgcatcatctcagggccttgcctcactcctccatcttcctcctccagctcctttacagatagggtggccagtgaaagactaggctgaaagggttagctgggaattcaaggaaaggcctgcagaggagtctgacatctaggaggctttgccttttgccccccacttccttcctctcttctgtctggaatgcagaagtgatggcaggagctccagcagccttcttgaagcataagataacttggaggaaggaagccagtgctaaggatggcggagtaggcagatggatgaactggctgcctgttgacccttgtcccagaaaacctgcttcctgtttgaggacggaacagaaagagcaatagaatcctttttctgtgcaagagaaattaagcctgactcttttcggagcccttgctattttatacattttcccttgtatctagctgaattgatagaaacttatcaatgtattaatcaacactccgtaagtgatttgtccagtgagaacagctaaaataatacattttctgtcatcattaaaaatcctgtgatttttagtccaataaatgttttaaagggcaggatgaagagaagagctacaagaccctgtaacagaagccctcactcgcagggttatcactcctaaaacaaaagataagcaggaaaaccacagtggataagatctgctgtcaaccttagcttttctgattacacaaagtgcaataacatctattttttttaatccgaaggaatcctctgacaccaccaagcatcctgcccactcctccttcctgagcgctcaacttccttctgatctattgtcggcttttccttgcctgagctctgtgatctaaccagaacccaacggaacctatagagagtccaatccttgcccgacagccctgagccaggcccatagctgcctagcctacagcactgggggcagagggaggtcctctggattatggcacagggggaagttgcaggaaaaactccccacaaattagcaccatctacaattgaccaacaaagtgcagatacttctcagcattcaaagcctaaacaatcaggatggagacgtataaagcattcaatgcttcacgttggcaggacgataccaggtatttcactgacaggtgaaatagcagagtgacgggacagagtgatcaaggcagagtgatctaaaggacacagtagtacttctttaggaccctggcagaatggaagagagcatctggcttctaaggcactgcacaaacttgaatgatcttcttcagaattgacaaggaaaggccatgttatgttcaccctgggttaagttttaagtgtatcttatttaatttttttcaatatgagtcatctccagatactgtgatgatttccaaataaccagaatctagatgactagaaatttactctagctggctttagacaggaagcgtgaggacagaatccagctgcttccactccagggtaggtctgaagccaaccgtcctcggtttcctggcctgtggcatcagtctggttggattacacacaaagccctgcagatctgctgcttttcctgattctcctgtcctgagtgagtgcaaggggctcccctgtcgtcgatgtgttctttgaagcagatgctgtgcctgatacctgctggagagtcccaccgccttgagtgagtcaacaaacctatcatccttcccatcttccaggatggatattggggtggggggaggttaaag

SEQ ID NO: 24292 - DNA, 2300 bp, Homo sapien
ctattttctttggggaaagagcatgcagatgttccgtgttttcaatgtagcggtgtataaaatgtcatcattgtttcctttctggtggaatattcagagccagcttaaagataatctactccagaaagttccatattagcaattatgtgggggctggtgctcatatgcctcaatgaatgatttatttattagtatattgggaatggcctccctcttctcacactagcaccttttccccactttccagcccatttccaaatgagaagggctgaagtcaatcaggaattaagatttagcatttgtgggattatcttcgaatgcgacactgggggggacacagtttcactcactctccatggtggcagtccaaattgctctttcgggaccctggctgtgtctaaagcctcagaatgatccagaaggctcctataacagtgccactgtggaagaaaccacttctaatatggcaggaaggtgtggccctgcttggagcccatgttttctaactatttcacgtttctttctttcatccctggtgttattttttgaaattaatttttattttcagttctcctaggaattaatgagttaacttaataaaagtaaaagtcttcataaagaaggtaaaggctggctttccacatagagaacaaacataacaacccacatcctctgcagagctcctggtcaatgcattcttctagtggggctgccacgcccctggggcctcaggcaagcaagccccttgtggatgacaggggctgggctcaaagcagtctctggggctgtgcctccttcctgttctccactcttctctaaaggaaatgcactgcaatgaattgcacaatacagacattcctaaattctggaaaaccagcaggctttgaactctcctgggggaaaaaaaccataaaacacaaaactgcaaggaatgagactatttggccaaatggccaatatgctacaactttcatagggaactcaccgcacttggtattgcctgatggaaaaaaatgccctgaatttcccgataaaagatttgagatgtggcaaaggaataaatattttttccctaagataaatctagctgtaggtgaaaactgggtctcatgcctcggacaaaatattatttccttatttactctaagtctatatcagaatatagcctacatagcatcaggtactaagccaaaaaaggctccaagggcaccattgttcatccatgactttgactgtgtcaccccccagaaaccttgagttgggcaaatgaaatcacagtagcctttggtggcttcttgagcagctgctaaggatcacatggattctgctcacacccagtgcttctcataatttaaaaatgcttgaagctgtgggaggctgcccggccctctgcattattcaaaagaaaaccaggaggcagcgacaattcttgattcttgcagataaacattctccaacaactattaagagttggattgctctaccttcatttaattccttggtgctttactatttgaatctagaatattcttgaagtctgaaagatggatagaaaagaggtaagtcatgtaaacttataaacagggcacgaaccccgctaacagacagctttgaagagatgatgattttagatcttgtgaattgttatgtcagaggaatacatgcagaagaaaacaggcaccgaaatagttattaccagagcaaagtaaatctgaacacctaaaagaataagaaagtatcttatgcttctctctactctgaactgccttgaaaagagcaagaatttcatacatgagcctgtagcacattacaaaatctgagtatgtatttgaaattcaaatgcacacaaagttcatgcattttattttccagttgttctcaagactcctaaataaagcatttcccctgtgtgggcgacccctgggtcccatgtggggtcagtgtttgggtctctctgagaggatcaggaaggctgctcttccaggaagggctgcagggaccctgggaaccggaccagtccagctcacaagtatgaagagaatgtcgggagaggaagtggtggctatgagtcagcatgagtcatctcgttccaatgagaatgaaggctgaggtgtgcgccttttttttttttccttcttagtcgtgtgtacatcattgggaatggagggaaataaatgactggatggtcgctgctttttaagtttcaaattgacattccagacaagcggtgcctgagcccgtgcctgtcttcagatcttcacagcacagttcctgggaaggtggagccaccagcctctccc

SEQ ID NO: 24293 - DNA, 2300 bp, Homo sapien
taatagatatttagtacctcatgtaccctaggcatagagctaggggatatagggaatacaaagaaatgttagacaaaatgctatcttcgaagctcgtaattgagccaatagtcaaagtgcctcctcatttaacaagttccatgaatctagacaccaaagaaaaacagaactttattctaggctttctcatagggactgatttaatcttagacacagtaaataatcatttaccttagtggaaaatggtaaaagcttcatctcctgtgaacatggtattgggaaaacactatttccagccaagaactgccagtaataccttatattaaattcattccttttctttcaggtccatcctttccaaggatggggttttatatgttaaactccgggcgggtcagctctcctacaaagaagatccaatgggatggcaaagtttgttggctcagactgttgctaacaggaactctgaagcccgggctttcaaggtagtattattgattggtaaaaacggaaagaaataattctaaattgccggcttcctcgcccattgctataaacttcaaaggtggatctgcttcctttttcattgttgcagattgtaaagactgactgtggctctgtttgctttttatgtgataaaataaataataaaatataatgaatataaaatctgtatataataagtaatatatatataataaagtaaaatactgtaagttaatgtttacatttagcagcaaggacagtcacaccatatcttgacactgtaacaaatagtgattttattattgatcttcaaatcggtgaagatttacttaatttcatagcaaaaatagaaaacgagttttgcaagctagcaattattaactccatttaaaaaccaccatttgtttccttaatcttggtgaggataaactgatgacagattcagacttcttttattagtttgctttattatttgcacagtactcgactgccagtgcagtagtgtttgaaataaggaaatagttacgataaatgagggtaggaagcaatctcattcccacggcggggtcagcacatattttgctctatattcttgactcagataagtttccaacacaagaaatttgtcccataatcaggcattaagacttctgaatttaacttcagtttcctgtaattccatgagcaactgtgtccctgctggtgatacaaagtagagtagtctaaagtagttaggaccctaaggaataattagacggcaaaagtggggcaggcggactggatgagtggcagccagaggactgagttagcatcctttgttcttccaagtacggagacagcagtttattttaattcaactcatatttcattttagtcagttacttatgaccaagcctttataatggttcccaggattgaaatgtataaatagttcccagggttgacattggtgaattttgtttggcagtattcagtaagttgtttatgaaatacttttgaaagatttttggacacagtttaacttaaatttgtagtattgcttcttctaaaaattagagcatattccaaagactctaacccaatttgtgaagaaaatagataagtttagacttgagtttgaacgaagaaagtatataaaaattaaaagctatttctatttcctgcctactggagttcagaaataaaatataaacctcagtggaaaatagtaataccttcatatttcattttcaatcttgaaccttgagtgatactgtttttttcccaagtttaaaaagttgtggtaaaatgcacacaatttattgtcttaaccattgcaagttacagctcagtaatactaagtgcattcacattgttgcacaaccatcaccaccatccatctctagaactgtttcatcttgcagacctgagatctatacctgcaacaataacgcacaaccatcaccaccatccatctctagaactgtttcatcttgcagacctgagatctatacctgcaacaataacccctcattctacttcccctagtccctggcaaccaccgttctattttatgtctctgtgattttgattatactaagtacctcatttatgtggtttcatacactgtttatctttttgtggctggcttgagtgatattcttttttccttaccttttcagtaacaattctagtttctggtaggctttttaattagtcagtgaaggagggaaaagccttttttggatgagttgtgtaaacaggaagacctgtttgttattggccttttgataaattagtagctcatgttaacttgtgcaaaagcttcttgtaac

SEQ ID NO: 24294 - DNA, 2300 bp, Homo sapien
tatcacagtaacctaagccatcattttaaactacactacaatgtataaccaacgacagaagaaagatagctgttttacaaaagtagcctaatctgaagaccacactctgatggtaggtgcagcacaagaatattgttaagttaatacacttctgacatgtggcctcatgcctgtcatttaggaaagattttttgagttgttaaagccaattattggctagggtacagtggagagccacactcacgtactgctggtcatagctatttggcttagctattgtaaacgaagccattttccatttggtgacaagaatctttttttttttttttcgagatagagtctcgctctgtcgcccaggctgaagtgcagtggcgtgatctcgggtcactgcaagctccgcctcccgggttcatgccattctcctgcctcagcctcccatgtagctgggactacaggcacctgccaccacgcccagctaactttttgtatattttagtagagacggggtttcaccgtattagccaggatggtctccatctcctgaccttgtgatccgcctgcctcagcctcccaaagtgctgggattacaggcgtgagccactgcgcctggccggtgacaagaatctttatgtaatttgttagtgtcattttttctgatctttattgattttatttttaatagatttatagaaataaatgtatttgagtaagaagagggaagttactgtctataaagctttttaaaattgaagtctcattttatccttctttttttttttttgagacagagtctcactctgttgcccaggctggagtgtagtggtgcgatctcagctcactgcaagctccgcctcccaggttcacgccattctcctgtctcagcctcctgagtagctgggactacaggcgccagccactgcgcctggctaatttttttgtatttttagtagagacggggtttcaccgtgttagccaggatggtctcgatctcctgacctcgtgatccacccatcttggcctcccaaagtgctgggattacaggtgtgagccactgcgcctgggcgatttttttttgttttttcttctgagatggagtcttcctctgttgcccaggctgcagtgcagtggtgtgatctcagctcactgcaacctccatctcctgggttcaagtgattctcctccctcagcctcccgagtagctgggattccaggcatgtgccaccaggcctggctaacttttgtctttttagtagagatggggtttcatcatgttggccaggctcatctcgaactcctgacctcaggtgatccacctgccttggcctcccaaagtgctgggattacaggtgtgagccactgtgcccagcctatttttcttttatgagatcttaaaatatgaaaacttttttgtttttacattctaaaatagaaatcttaaagtttaaaaaactgtttgagaaccccaaagaaaaatattgccatacccacatggatgtttgatgtactgtgtttcaaggacgtgtgtatatgtatgtgcaagtatgtatgtgtagaagaactttgctgtctgagaagaattgacatcctgtcttcccccttcttccctatcaatccttaaggaaaaagaaaaaaaaaatctgagaagataaaaacagatgcctatgttgagtagaaaggggtttttgagagtgattgattttataagtggtcagtttgatagtaaatattttcatgttatgatactttttacctccctgtaaaacctcttcactgtgaagactaaagtaaagaattattgggtcaaaggtcagttatataaaatttttaaaagataatttctccattactttttaatagaatcttatctgcctttaagatttctgttcatttgaagatattacttgagcttctgtcctgtcttagcttataggcaacggcagattgcagagctcatattgtcacagttgtttgttacccactctctgtcttttttgtgaacaggtatcatctccaggctctccggcacctctatgtgctggccgcggagcccaggcttctagtgcctgtggatgtggacacaaacacgccctgctatgccctcttagaagttacctacaaggtatctctccctatcatttacttgtaattttattaccactcatccgtctttgcaggtcataatatttcaaatgtgttgtccagtaaaaggtgataagtaatgaattgaactttcataaaaatggaagcttccaaagttattgtatatcctgccaggccattcatgctcatttaaatgatct

SEQ ID NO: 24295 - DNA, 2300 bp, Homo sapien
tctttttttttgatacagtatctctctctgttactcaggctggagtgcagtggtgggatcacagctcactgcacccatgacctcctgactcaagcgatcctcccacctcagcctcccaaagtgctgggatattacagacatgagccaccacatcaagcctggcaaactttttatgtaggagttcagacaagtatcttagcctctatgggccacatgcagtctctgttacatatttgtcttctgttttttttttccttaaccatttaagtacgtaaaacctattcttagctcacagactgtacaaaaacaggatacgagccagatttggtcatggaacatggtttgctgaccaaggatctaaatagatgcagagaaatcatttgataaaataaaatatccatgattaaaaaaaatcctcagcatctagaaatagaaggggacttcctcaaatagacgagggacattcaaaattttcactgtgcctcctgatgaggaggaagggatggccatgacttttttcttggtgtttgcaaagagtagggcagatatagtgaaaagtttctgtcctggtcagtcattcttttcccaacactttggctggaaagagtaagattttcttagggcgtgttttgtctgtgaacgttggcatgtctgtgttataggcactttgaaagcctaaggcctggttacgtaaggaatcaaaccagaaacctagggaattcatcattaggtcattcctgggtctcaggttactagccagtttgtcttcttttcttcactttttcagaatcttctgttagttgcattataaattttattcagtttttttttctttttggtgattaatgagggaatagcatggtatgtgcttattccatcttttcgtaaattaggggtttgagatagcttttaaaaaattatgcataattagttctcactgttatttttgttttttaagcctaaggattttattggggcaacttctgttattttgttagcttttgagtagtgtgttaacatgaatacgtacgttgttaatatctcattttagttctgagcatctcctttttagtcttatcaagttttcagcttgtacagatgtgaatttctgtttttgctaagtaccctacagatagccaaaataaggagtggttagcacggattgtcaactcattcttttttttttttgagacagagtttcgttcttgttgcctgggctggagtgcagtggcgcgatctcggctcactgcaagttctgcctgccgggttcacaccattctcctgcctcagcctcagagtagctgggactacaggcgcccgccaccacgcccggctaattttttttttttaatttttagtagagatggggtttcactgtgttaggcaggatgctcttgaactcctgaccttgtgatccgcccgcctcggcctcccaaagtgttaggattacaggcgtgagccaccgcgcccggccgctgttcttactgtctttatgaccaaaaaggtagaagagtacatagtgtgcagatttttatataatgtgttgactatattaacattcctctccttgcctgcaaaaaaaagtcttcagtaatgaagagaaggaatccaaccaagagaaattataccaaggtgtgagaggtctaggtgggcagatggcttcagcccagaagttcaagaccagcctggataacatggtgaaaccctgtctctaccaaaaaatacaaaattaaccaggcatagtggcatgtgcctatagttccagctactcaggaggctgaagtgggaggatcacttgagcctggtaggttgaggctgcagtgagctgagatcatgccactgtactccacccacgggaaaagagtgagatcttatctcaaaaaaaaaaaaaattataccaacatatttgcagttggatagtggaattggatagattattgacatttgaattgtttctttgctgtgtttggtgagtataaacttagaaatatcaaaagaaatatatgtttatattccttaacattttatttaaggatatgatgcattaaaggcaatatttttttttccacatgtttttattgcttaaaggtgggaaaggtttttattcctggactgccagctccctctctgacgatgtccaacacaatgcctcggcccagtactccactagatggcgttagtactccaaagcctcttagtaaactccttggatcattggacgaggtaagaaaaggactaggtgttgccaaaaagttaacattttttaaagaagtttggttaaacattagttctttccatgg

SEQ ID NO: 24296 - DNA, 2300 bp, Homo sapien
ggactatctgcagtttttctgtaaatctaaactttattattatactttaagttttagggtacatgtgcacaatgtgcaggttagttacatatgtatacatgtgccatgctggtgtgctgcacccattaactcatcatttagcattaggtatatctcctaaagctatccctcccccctccccccaccccacaacagtccccagagtgtgatgttccccttcctgggtccatgtgttctcattgttcaattcccacctatgagtgagaatatgcggtgtttggttttttgttcttgcgatagtttactgagaatgatgatttccaatttcatccatgtccctacaaaggacatgaactcatcattttttatggctgcatagtattccatggtgtatatgtgccacattttcttaatccagtctatcattgttggacatttgggttggttccaagtctttgctattgtgaatagtgccgcaataaacatatgtgtgcatgtgtctttatagcagcatgatttatagtcctttgggtatatacccagtaatgggatggctgggtcaaatggtatttctagatccctgaggaattgccacaccgacttccacaagggttgaactagtttacagtcccaccaacagtgtaaaagtgttcctatttctccacatcctctccagcacctgttgtttcctgactttttaatgattaccattctaactggtgtgagatggtatctcactgtggttttgatttgcatttctctgatggccagtgatggtgagcattttttcatgtgttttttggctgcataaatgtcttcttttgagaagtgtctgttcacgtccttcgcccactttttgatggggttgctaaactttttttttttaaaaaagtttaaaatattggccgggcgcagtggctcacgcctgtaatcctagcactttgggaggccgaggcgggaggatcacgaggtcaggagttcgagaccagcctggccatcgtggtgaaaccctgtctctactaaaaatacaaaagttagctggacgtggtggcgggcgcctgtaatcccaccttcttggaaggctgatgcaggagaattgcttgaactcgggaggcggaggttgcagtgagccgagattgtgccacggcactccagcctgggcgaaagagcgagactctgtctcaagaaaaacacacacacacacacacacacacacacacacacacacaaacaaaagtttaaaatatcaattaggtatatttgtatttaactgtttcatgaatctttgtttctaacctttctcctataacccattctttttttttttttttttttgagacaaggtcttgctctgttgcccaggctggatggagtgcagtggcgcgatcatagctcactgtggcctcaaactccctgctcaagtgatcctccagactcccaagcagctgggactacaggtgcgcaccacgcctccaggctaattaaaaaaatttttcttttgtggagacagggtctcgctatattgcccaggctggtttcaaactcttgggctccagcaatcctgtcgcctcgcctcccaaagtgctgggattacaggcgcgagtggccgctggggttcttaacttgggtctttgaatcgccttaagaagtgtctctgaatctgggaattgcaagcaacgtttctgtgaggaccttcacacagttcatccactcttcgaagagtatggaccgaaaaaggcatagagcattcactgcacgtagagaaaatcagcaacccctgctccccaccctcagcctgaggtgcctacctccacgtggggtcaggaggcggaagcgaaaccagaagaaaaaaccctgagatctataaggcagttcaggtccctagtgacatgagctaaagagaacttggacgccaggactgtagcagacagagtccggcttcggggttcgcatcagtcgcacggaaggtggaaatagcccccaagttgtaacccgccgcggtcttccctcaacagcgcaggcgccaggactgctaggacgccgcgcacctcccgcgatgccccgccccggcgcgaggcaagacgggaaagtcaagatggacgcgtccatttgaacgtctcgcacgccttcctgccattagcactcgagcccgctgctgttgcccgttcttcctccagaataggggagggagagggaatgagaagctgctgcggcccaagagtcactgtgaaggaccccgccgctgccctcgggcctcctcggcccctgcgcctccggggagcagccggggctcgccgcgc

SEQ ID NO: 24297 - DNA, 2300 bp, Homo sapien
aaagagtacaatatggaaagtggggaaatgtaacatcatagtagagaaatctgacaaacactatctcagttaggtgatcaaggttgacatcagcagcgataagtgatactgttgataagtacctttgatatgatgtgatgaaaatgacactttatgatcttccttcctgaaatccatatccccaggctaatcatgaagaaacatcagacaaatttcagttaagggatattctacaaactaatgcagtggcttgcacctggagtcccatctgcttggggggttgaagcaggaggactgcttgagcacaggagttcaaggctgcagtgagctgtgtttgtgccaatgcactctagcctaggcaacacagcaagactctcttaaaaaaaactgaataaagtatgaattttaattactaataatgtgttgatatttcattaattttaacaaatgtactatactaatgtaaaatactaataatagggaaactggatgtagaaactgggtatagggtatgtgggaaatttttggactatctgcagtttttctgtaaatctaaactttattattatactttaagttttagggtacatgtgcacaatgtgcaggttagttacatatgtatacatgtgccatgctggtgtgctgcacccattaactcatcatttagcattaggtatatctcctaaagctatccctcccccctccccccaccccacaacagtccccagagtgtgatgttccccttcctgggtccatgtgttctcattgttcaattcccacctatgagtgagaatatgcggtgtttggttttttgttcttgcgatagtttactgagaatgatgatttccaatttcatccatgtccctacaaaggacatgaactcatcattttttatggctgcatagtattccatggtgtatatgtgccacattttcttaatccagtctatcattgttggacatttgggttggttccaagtctttgctattgtgaatagtgccgcaataaacatatgtgtgcatgtgtctttatagcagcatgatttatagtcctttgggtatatacccagtaatgggatggctgggtcaaatggtatttctagatccctgaggaattgccacaccgacttccacaagggttgaactagtttacagtcccaccaacagtgtaaaagtgttcctatttctccacatcctctccagcacctgttgtttcctgactttttaatgattaccattctaactggtgtgagatggtatctcactgtggttttgatttgcatttctctgatggccagtgatggtgagcattttttcatgtgttttttggctgcataaatgtcttcttttgagaagtgtctgttcacgtccttcgcccactttttgatggggttgctaaactttttttttttaaaaaagtttaaaatattggccgggcgcagtggctcacgcctgtaatcctagcactttgggaggccgaggcgggaggatcacgaggtcaggagttcgagaccagcctggccatcgtggtgaaaccctgtctctactaaaaatacaaaagttagctggacgtggtggcgggcgcctgtaatcccaccttcttggaaggctgatgcaggagaattgcttgaactcgggaggcggaggttgcagtgagccgagattgtgccacggcactccagcctgggcgaaagagcgagactctgtctcaagaaaaacacacacacacacacacacacacacacacacacacacaaacaaaagtttaaaatatcaattaggtatatttgtatttaactgtttcatgaatctttgtttctaacctttctcctataacccattctttttttttttttttttttgagacaaggtcttgctctgttgcccaggctggatggagtgcagtggcgcgatcatagctcactgtggcctcaaactccctgctcaagtgatcctccagactcccaagcagctgggactacaggtgcgcaccacgcctccaggctaattaaaaaaatttttcttttgtggagacagggtctcgctatattgcccaggctggtttcaaactcttgggctccagcaatcctgtcgcctcgcctcccaaagtgctgggattacaggcgcgagtggccgctggggttcttaacttgggtctttgaatcgccttaagaagtgtctctgaatctgggaattgcaagcaacgtttctgtgaggaccttcacacagttcatccactcttcgaagagtatggaccgaaaaaggcatagagcattcactgcacgtagagaaaatcagcaa

SEQ ID NO: 24298 - DNA, 2300 bp, Homo sapien
ccccaaccatttgagcctaaggtcccaggcagatatggaggagcaaggacaacctatttcccctgtgctctgtccaaacctccgatccacagaattcaggaatctaataaaatggctgacattttactcccactatgtttggggtggtatatcaaacaccggtagatagctgaagagtattgtacaaggcaggcctcaacaagaaagtgagatttgagctgacttggaggagagccaactgggaagctgtgtgtctaggggaagagcatttcaggcagagagaacagccagtgcaaacctttgggcggaggagtgcttggtatatgtgagcaatagcaaggaaattgcaggagaacagctctgccgaggtgtccttggcaatcttgcacatctctcgaggccatgtaggcaaggtatgaccacggtctgacccaagtcttgttggactgccctgtgatttcccctaaagcagggatgggtaagcctggtgaggagccactggtaggcagtttcctatccctaccccatgggagactgctgcaaggccatttctcttccttctccaacgtttcagttgactgcaggactttccatatccctccctccaccgcccagcccgcttccctccaagcatacagcggcaggctcctgtgaagtctataaaactgcttggtgtaatttagacttggctactcagcggcagggctcatgttgtcttatttatttatttatttatttatttatttttgttaaattatgtagacccataggataacactgacccttccagtttggtgttatcttgtaggcctaaggatgcatggagctgacaccacactgattttgcttttgctgtcggtgtaagtaataacctgtctaaacccatctgggctgcctgtctccttcccgtagccaaatctacgggaagtgtccagccagtgtaggggtcaagggaccgcttgacgagaccaacgtaaattgaagaggcgtaaggagatgaggccaaagaggaaaggggaccaggtcacgtagaacctcgtagaccactgcagaaccttggcttacgtacgcagagacagcaggaaccactgataggtttagggagatttgaggagagggacatgatttggcttatgttatgttgttaaagggaccacattaaaatacattcattctaaaagtgttacctttaagaaactacgtatataaattaagttactgttgccattattagcgtaagtagttacatttctcttacgactcactctctgctactgcctcttggaccctgcacaccttgtggaggcccatgagagtgacgtgctgtggttccccctctccccactcctgctctgcactttgtcattcacgttcatctccctccttgagtgtcacctctctctggctcgtcacggagccacggcaaagcgtcctttcccaggaacccctccccctggggaggtgagctcctcgccgccagggccgtgtcgcgcacctcgggccgggtacccaggcggcgctcggcggcgagcggaatggatgtggaggagcgctcggcagggagcgctgccgccctggccttggcctctgggagcggcgcggccagggttttctgtgtcagccaagcccggaatgcgggggcgcctctggaccctcctcttgggtctgggggctgcctcgggcatcctctactcctctcccaccttctgtccttccccatctcccacccacacgtgtggggccccggacccgcgcagcggccagagccttccgctgtggacctccagtccacccctccccttcacttctctttccggctccctccgggtctctcagccccctccccttcctctccgcccccttccccgccgtctgcccagcggcggccttcggcccgccccttctctccaaccccctccctttcccctttacgcccctcctccccctcgtcctcccgccccctcccaccccaacctgctgggcccgccgggactcgcccccctgcccgctcctctcctccagccccggccggcctcggctcggcccccggcccgccccttccagccctcggcacctcccgccggccgcttggctccgccactcggcactcactgcccgggccgcccggacagggagcttcgctggcgcgcttggccggcgacaggacaggttcgggacgtccatctgtccatccgtccggagagaaattacagatccgcagccccgggatggggccggccccgctgccgctgctgctgggcctcttcctccccgcgctctggcgtagaggtgagtgcgcc

SEQ ID NO: 24299 - DNA, 2300 bp, Homo sapien
ctactaaaaaatataaaaaaattagcctggcgtggtggctggcgcctgtaatcccagctactcaggaggctgaggcaggagaatggcgtgaaccaggaaagcggagcttgcagtgagccgagttcgcgccagtgcactccagcctgggcgacagagcgcgactcagtctcaaaaacaaaacaaaacaaaaaatcattgcctctccagtgttcttaactaaaggtgccatctgcctaacttaatttaggaatgcctgtatgttttggtactgtttaaatattcccagctttgccactctccgtctcacaccaacatccagtcatctggaagatctttccattcctccagttctctcgtaactaaaacgatttcagacttacccctcactcccacaggtaactcgcccttaactcttcttgtagaacttaaatttcatgtattgttctctccttctgtccctcacttacttcctaaatctctggtggatgttcccctgtggtcctgttacagttattctgacctaaacagaactgatcacgttgcttactgggaagatgcacatgcaatctctagtgtatagtaggtcctcaataattactggtgactggtaaagcagccaaggcctttggactataaatcgatcttattctacgttaataacaatattagcacaggattctattcccttgctggatattatttacatttgataatgaatgaactaattctctttgacagcaaaacatgtattcagcttacagccgaaaatgcaagggaaggtacacaataagacggatccaagccctgacccctctgagctttaagccagtcaagtaactacttgttctgaaaagtattaactgtcctattaacgttaaccttcacaacacaatgccttgtgttcaactggccttggcctcaaagcactttcctggcacattccctgaatttaaagaacggtttccatacagctgagagggtcgaggcaggggtaagtgtagaagacgcaagaaatggagacaccctgggaacagaactctagactgcactccaaccgtagcacttactaggcattcgactccaggaccttgacactcgcgctcgctggcggcgagccccgcctccccactgcgcctcatctcccagacaggccccgcctccccactcaggccccgcctccccactcaggcccgtctcctcactcaggccacgcctccccgcccagtcccgtctccgtactagggcttgctccaagccctgcttcctcgcccaacctggcctccccactacggcctaaccccaagcccttctcgtccagccccgtctccacactactgcctggtcctcaactccgcctccccactccgaccccatctccctgaccagccccgcctttacgctcaggctccgcctccccgccgggtcttgcctccaaatcccggccccgcctccacgcggccccgcctccacgcggccccgcctccacgctcggcctggccccaagctcttccttcctggggcactctgtctccgcactccggcctggtcccgagccccgccccgcctccacacggccccgccaccacacggccccgcctccacgcggccccgcctccacgctcggcctggccccaagctcttccttcctggggcactctgtctccgcactccggcctggtcccgagccccgccccgcctccacacggccccgcctccacacggccccgcctccacacggccccgcctccacacggccccgcctccacacggccccgcctccacacggccccgcctccacacggccccgcctccacacggccccgcctccacacggccccgcctccacacggccccgcctccacgctcggcctggccccaagctcttccttcctggggcaccctgcctccgcactccgccctggtcccgagccccgccccgcctccacagtcccgagcccgcctccaaccctgccctgtccccacacccagcttggccccgagccacgcctcccaccccgcccccacactcccgagccccgcctcgtctccacactccggcggcgcctccctacccggccccgcctccgcgctcgggctgccagccctcccttgcacgttccggctcctcttctatcttcacgcccacgctaggccctgagcccagcctccacgtctcgccgccaactccacatcctggctcctatctctgccttccaggcatctcccagctgcacgctcgggcccggctcagagccctaagccctgcctcccggtcctggccgggtttcccagaactgcac

SEQ ID NO: 24300 - DNA, 2300 bp, Homo sapien
tctttttaaattatatatgtatatatgtatatatctatacatatacatatatgtgtacatatacctatacatgtatatgcatgtaaatacatatgagatctctctctgtcacccaggctggagtgcagtggtgcgatcatggctcactccagccctgaactcctggactcaagtgaccctcctggcaggttgtctcaggtagcctccagagtttctgggattatagatgtgagccattatagctggctttctgtattgttattagtattatatttctatttggattgaaccatgccattttccttgaactgcctttttggcttcatctctaaatattttacaccttcacactaaatacttcaatgtaaatttcctaagaacagagatattcatttatttttttcacagtataattatagaattcaaatttaacactgataaaatgctattatatataaaccttattaaaattttgcaactgggcagggtgggtcacacctgtaattcctgcgctttgggaacctgaggcgagaggatcacttaagcccaggagttaaagaccagcctgggcaacaagtgagaccctgtctctacaaaaaattaaaaaattagccagacacagtggcatgtgcctatagtcccagctgttcgggaggtttaggccggaggatcccttgagcccaggagtttaaagttgcaatgtgctgtgattgcaccactgcactccagcctgggagacagtgagaccttgtcttcaaaaaaaaaaaaaaaaaaaaaaagttcaccagtgtcccaatattgtcttttagagcaggcgcccccgctccccctgcacacacactccacaccccataccggaaccaattcaggtttgcatttcatttcctttccttgtttttgtttttagttcctgataatctggatttcccccctttttggtgtgtcatggcattgatagttttgaagtgcacagaccatttatttttgcaaaatgcccctgaatttgaatatttctgatgtttattcatgatcagattcaagttatacatttttggcaggaataccacagaatactgatttgtctcatttttggtgatgttaatttgatcagttggtcaaggacatatctgcaagattttttccattccaaagttactacttttctctttgttattaacaacaacttgtgaggaaaaacttttgaaactatgtaaatatgttgtggttttcatcaaaccttcagccacttgttttagcatcctttcatgattcttgcctgatgagtcagtcattactgtgctgattgctgaatggtgattttctagttccatactttcttcttcctttgttagcattctactataaggatgcactctctctactcccctaatcaatctgtcttatctgtcagtcatcaggtcggacttgttgatttttactttgttatataggttataatctattactgtttttatatattttgctcatattgtcccatatttggtctgtgggagccaactccactttttttgatgactgggagctgccattaaggagcctggttcattcatccattcaaggatgccaggaacctcaggtagttgtgtaaatgagcgtctcctctgcactcagctacctttgctgtatcttactgtttgctttctcttttttgtagttgaatgctactttctttctctgtaaaatctcttacacatgggataaaatacaagtagccccagaacaaagtatgttttatttctctgggaactatttcattgtagtatcttagtcagttttcttattgtaagtgtgcttgtgttatgtattactgtatctgaacacactggaatggctaaaaggttatgattatctcaattatattaaaattatattcgaaacagtttttatttggtattttattctattgcgtatttccaggtatttcaaactgaatatacttttggtattatttagacattaacttttatttatattctaggataagaagtgtgggaataaattataacatagaattttaccttatataggagctgttccaaaaacataaacttagtgttgatgaagacttttgtcattatttgaagaatgacaactgttggacaacaaaaaatgaaaacttagattgcaacagtgattcacaggtgtttccctctttgaatgtgagtatctgacttgccatgttaaagtttattttattcccagtgaatacaagtatcaactgaagtaatgttttatcggaattttgataaaggtggtatctgacttgccatgttaaaata

SEQ ID NO: 24301 - DNA, 2300 bp, Homo sapien
gtcaaccatgccccgattcagcttcttcatctgtgaaatcaagaatctcttccagctttatgactccacagaaagggcaggagaagagaaaagaaggcttgcttacatctgcccgatgtctggttaccagcgcatagccagaacaaggctgagagccagaacagctggccttccagagaaggtcgccatgtaaacacaaggtgggataggacacaaaatattaataaatgcagccacactgaccaggaggaagcttttcaaggatagggcagaggacagagagacagagagggagcagggcactggcttttggtacagacagcaaacacatgagagatcgaggcagaaaaccaccatctccacaggctgccctggatcgggccatgctgtcccgtcctctccacctggatagggagaagcaggggtatgaccatgtctctcttcaggatgttcaaccaggaatgcaaaataaaattacatggatcccttgcaggctgcagtggctcacacctataatcccagcactttgggaggctgaggcgggtgggtcatttgaggtcaggagttcaagacaagcctggccaacatggtgaaaacctgtctctactaaaaatacaaaaattagctaggcgtggtggtgcatgcctgtagccccagctgcttgggaggctgaggcaggagaattacttgaaccagggaggcaaggctgcagtgagctgagatcaggccactgcactccagcctaggcaacagagcaagacgccgtctcaaagaaaaaaaagatttacatgggtcccgttccacctcctttgcatgggaaggttgggggagcagcactgtaggatttcctgggcaaccaatgcccaggaggccagcctaaaccatgtcccctgctttttggggcactggctaggttctgaatgttggtgtctcccctaaatttatatgttggaaacctcattcccaagatgatggcattaggaggtgggacctttgggaggtgactaggtcatgagtgcagagccctcaaaattgggattagtgccctcagaaaagaggccccagagagctgcctttcccctgtgaggacacgggaaccagaactctggccctcgccaaacacctaatctattgacaccttgatcttggacctcccagtctccagaactgtgagaaacacgttctattgtttataagccactcagtttatggtattttgctatagcagtttgaagggactaagccaggactccagctttcctttctggcctctgctgggaaacagctcctgctctgtggtcacagtcttgtgggctccccgttccctgagctctgagtgggctcaacaaagtgaaatgtggaagaggaaaaagagatctggggcttgaccagacttgtgtgtcccaggacatctgcagtgactgccttcagaaaaccttccaggaagaacgtcagtcatgccttccgggagctcaggtctgaggcatctggttgtaccacagccctgatggcaggggacttcagactgctcatgccggcctggcacttcctgattcgacttcagcaaggcaggcaatgttctagaacctgacctccgatttaaactgagtttctccttcccttgagcaaggaggacagtgaatcagaaggacgtagatcccctcactgtatcactgtgtgtgtatctactcactgtgcgtgcgtgttctcacggccccattgcattatttaaagggacactagtttattcggatggagagctcagtccaccccacgtcaagcttatgaagcccatttcctggcccccttctaggaatgtcgggaggagggtgtcgcgtgggctttgaagtaggacagacctgggtttgggtttctgttctgccacttgtccttggtgactgagcctcagtctacttggttgggaaataggacggtcgggagtgaacccgcccagggtgggcttccagtcacccgcacatatgcggggcactggccgcccatccctgccaggccccgaggatgcccgcgctcgtcctcggcgtcgcgggttgggcgcgctcccgggcgcattcccggccgggcagcccctcctccctcgtccttagcccaggggccggcgcctccccgcctcgcgcggactgtctcgtgcgggcagctgcgggcgcacctggaccctcgcaaggcccgggcggcgccgatccccgcgggacgcgctgcgctcggggcctcccgcctccccccctgccccagccgccccccggccgcgcggcgccccgcaccctgcagggacggctgccgca

SEQ ID NO: 24302 - DNA, 2300 bp, Homo sapien
aatggaagtccccttgctcccttggggtcatttctggccctgggggcattgggcagtgagtgtaaagggcctgatccacaccatggcccgctgggaaaggagacgtggccagccagttcagtggtttcttgggctagcctggagtctttcaatcaggaacggatgtcctcccaggtctgctcaccctggggaatcctatttggcactagacttgattgcaggcagatcgagccagatgcctttgaagctgctccccttccctttgggtaccagccctccctccatatgctggctcagacctgcctctcagccagcggtgccaggatcagggtccattgtttgggcacagctgttgacaaaggcctgactgtgctggccactctcccctgacccataggggcaagggtttgtgcagccctggggctccagagaagactcccagggtgggttgaactttctttatcctttcaaactccctgccaggactttccatgctcttcagtaactgcctgaaacctaaaataaggacacgacacacatttttgttaaagaaaaaataagcacccataatttgactggacccaaacccatccatttgcacaagtctcaagtacaatttgtaactcaagtaagtaaaatgtgtatctcaaggaagtaatcatctctcctcctgtatataggaaaatgtgttcctctctggacaccagaatctctcaaaggaggcagcctcgatgggaagtgagacccaaggaactcagcgtggggctgggtgcctaagtactaagattgagacatgacagttgttcacatcaaagaccagaggcatgggggatattggtggtgactgggagggaactggaaagtccccgagccacccttggccccgttcttgccatctggttggccactatctgagacgtttccccgtctgctggagattagttccctctggaccttagatggaaggggagggggttatgagctctggagcagccctttcccatgctcaccccatctctgaaggaggggctggggtcagagagcaagaccagcaactggttgcattgtccagaaagcctcaactgcccctggggagctgagagcatcagatgactcccgggctgatttgaacaaaaacagaggaccactgagctccaagacaggggtctctgctgtaccagaagaaaaaaaaaatgcatccagagaagcatcagactgtagtgtaaaaacatacaaacatgttagtatctcctgaacgggtcagtatcacctcagtcctcctgcaatttaggccttttctctgattgcatgacaaaaagaatctaactagtaagataatgtgctcattccacaactatgtcctgagaggctagcacaggaaaaatgctgttctgggaggcctgaggcagcgtagcacgtggtgaagactcccaggcctggcttgatcttggctcggatccttcctggttgactgatctggggcaagttcctgccccttgtgaatcagtttcttcctctgaacagtggagataatagacattcccatctcatggggtcatagttgaagaaaatgaataatattcaaagaccaggtccataacaaatgctaaatacgtgacaggagagagaaagatgcagctgacacagtccccactgccacttagctcaccaagcaggaagagaaaaaccagacaaattagaaaagtatcagagggccaacgattgcctaagcggggtgctgcattggagggtggccacgagctactccaggttaagcaagcaggtagggaactctctaaggaggggacttctaagtcgaagtggaaagacaactctagaggactccactctagaggacctgggggcagattctccaggcagagggcccagccggtgcaaaggccccaaggtgggtgtagcctggggaggttcatggtaagagggcctggattccactggcagaacggattccgctggattccgtgggcaaacgggaagggaagggtcaaatgatggcggtgtgcctgagtacattgtcagggtccggggtcttggagtctttattcttggaataactaacatgaatggtgatgatggctaaataaaaagtggggtgtgttttctgattttcctactctctctaggggaaaatcccaagtgtttctgagtgggttggcagtggtgcaacagaaattatcctctcctgtaccacggcagtcctgtcacatctcccctccctgcatcctcacttgctttcgtaaaatctgtatttcccaaagacagaggtcagaggccaggct

SEQ ID NO: 24303 - DNA, 2300 bp, Homo sapien
ctcactcgcttgctactcacaaggttattaccactgggggccaacttggagctttactcaaggaaggcgatgcagcaatgggcagatattccccaatcaccaaaggccaccgagcatcctcggagggtccggcacctccctccgccccagctcaggctgccacggctgctcctcaaagaaccctaggttgtgtccggcccaggtgggattttgggcagggctacaccatcctgccagctgcactcctggacagggaggcccatcacgctccttaatggcctctggtccaggacacccctgatcagtgcatcctcatgggggatgctcagtgactctgtcacttgctttgacctgcacagttgaagcaacagttctgtttgtgcctgtttaaaatatgaacatggcaaatgacacttggaatttaccttaaatgcattttagaagtggctctgaatttccatctaaactgaatccaaatccaagccatcctaactttgggcattccctcgtcgcccatgcgtgatgctctgttgcaaaaagaagaggaacaggctagcttcaccccgtctctctccaaccacatcagtccttcgggaaatcttcacagagcagccaggattcgaaccatgtccctcatgctcagctactaccctggcctgagcttccctccccttcctcttgtacgggcacttcacaatcaaaccgcagcaggagtgctgctgagagagacctccagaggcccggtctcacacggagaacaagttgcatggcctttttgttttctttccaatgccccgtgtaactctgagctgtcttgatcctgttgcctgactcatgtctaactactttccacctcgtccactctattccagtcctgttgcctccttgacattcctcagacctgccaggcacatccccacctcaggatgtttgaccagctgtccctctgccctccccagacatctgtctggctgtgccttcaccttcaactcgttctggtgaggcctgccctgaccactgtattcaaaatgatgccctctctccagcatctccagcatcattccctgctttcattttctacatggccccacacttcgccattgcttattatctcccctgctagatggtgggcttcctgagggttgggttttgtctattttgttcatggatatagcccaagtccctaatatagtgcctgcctaagtccctaatatagtgcctggcacatagtaaagatgcaataaataaggctccattcattcatttgttcaagaatgatttatgatttatccagtattcactatgtgccaggcagtgggctggtgctggggatacacaggaacataggccagatgcattctgatggagaggactgaccgcatatctagaaagaggcaagtcaataagaaagttcggatggttacagatactgagaagacagcagagtgagcacctggggaagagtgtctggggaggtctgggttaggcacggtggccagggaacacgcggggaggtggtggcatatgagtggaaacctggagagtgagaaggagccagttgtggaagctctgaggaaagaacattccaggcagagagaagagcaaaatcccaggcctggagctggggctgagcccggcctgttcaggagacctaaagaaacccaggggggctggagccccagaaaatcagagtgagtaggtggcagtgatgaagcggatcattgcagggtgggcctcccacgcttcgaggccttgcacacagcacttagtgtctctgagccccagtctcatcaccttttgctaagcaggcatcgtaccacccatccccaagagagctttgaggacttgatgagacgcagcatgcagaatgaccagcacagtgcacagcctgcagcaggcatgcaacagagggcacttcgagatgggaagtcctgtaattcagtaatgtctaagggctgtggtccaggatgaggagctcgtaatccttccatctctccttacagtttcctgcccggctctgaacacccccgcagacggcagaaagtttggaagcaagtacttagtggatcacgaagtccattttacctgcaaccctgggttccggctggtcgggcccagcagcgtggtgtgtcttcccaatggcacctggacaggggagcagccccactgtagaggtatcgtctctccttcccatcccactgcgctggacccatcacagtatagcaagggtttcttgcatagaaagggtcattccttggaacattttctgcttggttctttaatcattcctcaaccacaga

SEQ ID NO: 24304 - DNA, 2300 bp, Homo sapien
gccatatgcagaagactgaaactgaaccacttcttacaccacagacaaaaatcaactcaagatggattaaagagttagatgtaaaatccaaaactacaaaaaccctggaagacaacgtaggcaataccatcctgacagaggaatggacaaagatttcatgacaaagataccaaaagcaattacaacaaaagcaaaaattgacaaacggattctaattaaacttaagagcttctgcatagcaaaagaaagtatcaaaggagtaaacagacaacctacagaatgggagaaaatatttgcaaactatgcatctgacaaaggtctaatatccagcgtctataaggaacttaaatttacaagagaaaaacaaacaaccccattaaaaagtgggcaacgtacatgaacagaaacttctcaaaagaaaacctacaacaggccaacaagcatatggaaaaaaaagctccatatcactgatgattaaagaaatgcaaatcaaaactatctggtatgagatactatctcacacccctcagaatggctattattaaaaagccaaaaagtaaccgatcctggagaggttgtggagaaaaggaaacccttatacactgttggtgggagtgtaaattagttcaaccattgtggaaagcagtatggtgattcctcaaagagctaaaagcagaactaccacttgacccagcaatcctattactgggtatatacccagagcaacacaaaacattctaccataaagacacatgcactcgaatatttgttgcagcactgttcacaatagcaaagacatggaaccaacctaaatgctcgtcaataacagactggataaagaaaatgcggtacatggggctgggcgtggtggctcacgcctgtaattccagcactttgggaggccgaggtgggcagatcacgaagtcaggagatcaagaccatcctggctaacatggtgaaaccccgtctctactaaaaaaatacaaaaaaatttgcccggtgtggtggcgggcgcctgtagtcccagctacttaggaggctgaggcaggagaatggcatgaacccgggaggcagagctcgcagtgagcggagatcgtgccactgcactccagcctgggcgacagagtgagactctgtctcaaaaaaaaaaaaaaaaaaaaaaacgaaagaaaaaaaagaaaagaaaatgtgggacatatacaccatggaatattacgcagccacaaaaaagaatgagatcatgtcttttgtggaaacatggatggagctggaggctaccatccttggcaaactaacataggaacagaaaaccaaatacggcatgttctcacttataactgggagttaattgataacaacttatgaacacaaagaaggaaacaacagacactgggtctacttgaggggttggggaggagggagaggagcagaaaaggtaactattgggtactgggcttaatacctgggtgatgtgtacaataaccccctgtgacacgtgtttatctatgtaacaaaccttcacatgttgaaggtcttcaaacctaaaattaaaaataataaaataaagaatacacacacacacacaaagaaacaaaaaatagtggcccatggttttaaactctagtgatcaccgttagaattttggggtgttcaagtctttttaagtgaagacgtggatttgccccagctgtccttctcggggtgcggcttggtggcctgcattttcctgcaccattctattccagggcgcttcctttcccgcgcccccttcgcgtaggccctggacgggtcgtctgggtctgtggttgattacttgtctctcctttccctactccagagtaagccctttgagaaggggccgtgcctccgtcttggttctgctcccggcccctacccaaggtcgggcccacggcaggtgcgccagggcccggcactgagcgtgtcttctccccgcagccgcccccgagggcagcgtggccggcgactccgccttcagccgcgcgccgcgctgtgcgcaggtggagcgggctcagcactgcagctgcgaggccggattccacctgagcggcgccgccggcgacagcgtctgccagggtaggcgcgggctccgccaggacactggggacagcacggggaggacatggggcggggaaggggctctcacccaccgccctcctgccggcacgggtggcttcctgcgcgcggtctcagaaggcctggccactttgcattataggtaagtgttgacctagtgatggctagaaggcagctaattcacagaaatcagagctcgccccgcc

SEQ ID NO: 24305 - DNA, 2300 bp, Homo sapien
aatttctctatgacactttttatagtttcttttttattagttagatattactatgtagtaaactacttaaaaacttagtggcttaaaacaaggaccatttatttatgtgggttagtaatttggactgggatcatctgagagtctttggttctctgcaggactccatcatgtgtgtgctcagctgtatgttgcctaggaggctttgcttttagggttttgctagctgttgactgggtgttttcgctgtcctccattagccttatcttctacatgcctctcccttatcgtcagcagggtagcctgagtttattgtcctgaagaaggcaggcatataagagacagcagacacatacaaagcctcttggggccttggcttggtattggcaggccacttctgcattctactagctaagacaagtcattctatcaggcaaaatcaactcagattaaagaggaggtgaaatagatcctacctctttatgggaggagctgcaaagtcacattgcaaaggacatggatacaggaaaggttggagaaattggggccttttttggcatcaatctaacacaaacatatgtagccttttatatagtctttgtctgaaaatgctagtgtctgatgcctttgcaggtcagatgttttagctgctttttacctaccaatctaattttcatttgtgtctggttatcttttgctgtatgttggatattttatataaaaaagtgtgtatggtaacaatttgggttctataataatgcttcctgctaaagagggggtaattctagtttttatctccttaattcaattttttctctgaatttttagtaatgattcatgttccataggtgatggcctacaatataaacaacatgggaaagtagaatttccctggggaagatgtctggcttcaaatagttcccttcactaatcggtaaagggatcctgattcatgccaagaatcaaacactcccttcacttacagaagcaagtcaggttctctatcactggcccaacctagggtttgagccttcctttctacaggtcccttaaatggcattacattgagcaaaactgagcaatttcctgttctgcaacagcatgctctattttcctgccttcatacaattctctctacttggaatgcccacttcctcttttcctatggaaatatctcaagacccagctcaaatactcccttctcaagaagccttcccaactggatgcaattttttccctcttctgaattctcttagtatttggtactttttaacggacttttctgtcttgaggttacttgtgtattcattttaattcccattcaattgtagagaccctacaagttacattacctgactacacatctgtttattcatttcaaaactgtgaatggtaatagaacatcttttacagggctgttgtgaggattaagttagctaacatgtgaaacgctatttctaaggaatagtagtggagtgctcagataaatgttagctgttactaccatcccttagaaatactgtgattttgatggaagagttttcaccaaggtgaaagcagaatcctaacaactaattttaaaaattctgggctggggccgggcgcggtggctcacgcctgtaatcccagcactttggaaggctggggcgggcggatcacgagatcaagagatcgagaccatcctggccaacatggtgaaatcccgtctctactaaaaatacaaaaattagctgggcgtggtggcagacacctgtagtcccagctactcaggaggctgaagcaggagacttgcttgaacccgggaggcggaggttgcagtgagccgagatcacgccactgcagtccagcctggacgacagagcttgactctgtctttaaataaacaaacaaacaaacaaataaataaataaaataaacaaaattctactatctgaggtaaaggacgaaaaagcttacagaagggcaaccacggcggcgcctgcgcagagccgaggcgaaggaggcagggagagacccggcctgcccagagtcgcggagggcggtgcagcgcatgcgcggggcaggtgaggctgcgcggggcggagcctgtggccctggcgcggctctgggtccgtctcgtcgcgtccgggttgtcactctctcgggttgttactctgtagcttcccggctcgcgaaagggaggacctgtctgggtcatggattttgagaatcttttctcaaaaccccccaacccggccctcggcaaaacggccacggactctgacgaaaggtgatcccatatcttttcatcttttgaatgcagg

SEQ ID NO: 24306 - DNA, 2300 bp, Homo sapien
tggcgcatgccaacggttcgaaaaggaggcttttcatccagagagaactgcactgtcctacgccatcacaaaccaaacaccttaacgaaggcttgaaagaaattctcagacctccagatacaggagacaggggaaaacagaagtgcaagaaagaacagcaactgtttaccacaagggcctctggataacttcaagaaagcagttacccaaattagctacagaaaggcctaaattaactaaaacagttacgataaaaccgaagtcctgagattttaatgtaactccaaatgttaacatagtttcttcatagtaccttcatagtaccttttgaaagctccctacaaatttattatggtaaagtgtggctataagtacaggtcctgtcactggctgcattcaactgaaaaaaaaaaaaaaatagtgcgaccacagctcctgtcactggctgtattcaactttaaaaaaaaaaaaaggggcgacttttttttttttttaagacggagtttcgcttttgttgcccaggctggagcgcaatgactcgacctcggctcaccgcaacctccgcctcccgggttcaagcgattctcttgcctcagcttcccgattagctgggattacaggcatgggctaccacgcctggcttatttttatttttagtagagactgggtttctccatgttggtcaggcgggtatcgaactcccgacctctggtgatctgcccgcctcagcctcccaaagtgctgggattacaggcgtgagccattacgcccggcctttattttcaatgtatatgttaatatcaaaaactttacatttccaatttaatccactcattgcaattgtttttgaatgcattccatttatgtattagtaaaatgtattattaaggaaagacaaattaagtcagatatttggattaatcattgagtctatcattttagtaaaaagcaaggaactttccttcaggactaatatattaaataggccaaaacactgacttgtcatttaaaaattttttaaggtcacttcataagtataaaaaactcatgcatggtcgggcgcggtggctcacggctgtaaccccagcactttgggagacccaggagggcggatcacctgaagtcaggagttcgagaccagcctggccaaaatggggaaaccccatctctactaaaaatacaaaaattagccaggcgtggtggcgcgtgcctgcagtcccagctactcgggaggctgaggcaggaaaattgcttgaacccaggaggcagaggttgcagtgagccgagagcgcgacactgcactccagcctgggcgacagaggagactccatctcagaaaaaaaaaaaaaaaaaaaaaaaaaaaaaaaaaaaaaaggcatgcctaatagtatttataaaatactcgcatacattttacatgttaatattattacgaaataaagtaacgtttatataattatttcaatagctattcctatttaagtaataattgggtaaatttaacagcaaatacaagaaaaaactgcatggcaagctattttccttaaaacatgattctgaacactaaacgttacaaaaacagatacttgctacaactgtgaaggagaaactgcatttccctattattacaagaacaaaggttttcacaaaaaaatttaaggactctacagccgccttgttctttgttatcccacccctgcccgcctcggctaacggttttggggcccgtttgcttggtgcgtctggaactcctcgggcggcgggcgtctcgcaggaaaaaccgcggcccgtactgcgccgggagcagaagcgctggtggccctcgtaggtcccgtgggctgcctccccctcctgcagacactcgaggagccatccggccgcgtctctcgccgcccggccccgccactaggctgccgcctccgccgctgcacagagaagggcgaagacccgcccctgcaggtgattgacgggcactctcctccaatggtcaacgcgctcggccccggcgggctgggcaagggccgcggctcgcggaggaatctctcttgccctttagtcccgggcaaggtgttgcggccggcgccattttctcgagccgcctgtttcgggtgccgccatgttggtgaggagaaatcaccgttacggccactgtccaaatccccgcgtcgctgcacgccgcccgcccgctcccacgccacagccaccggcggcgaatagagactagagcggcagcgccggcagcgcggggccgttgcccagtgtttgcagttagagccccatctctctggcgtggttgttaa

SEQ ID NO: 24307 - DNA, 2300 bp, Homo sapien
ttgaaatatatcaagtattaatatagtcacagttttaataaaaggaaatataaccatcatttaactagttaatttaatcttcaacttaatctaagcaattattttttgttttgctttagttttcatagtggctttaaaaaatgtcagaaacactgttttggctacaatcataaattcccttttgaacttctgaagtgctagactaagaatggagttcataaactttaaaaagtactacttaaaacaaatcaaaaatatgatagtgtttttaaaatttaaaattgatgagtgaattggttttcttgattagttatgcattttttctctattttataattagaaagatctaatacttcattgcatttcattaaatacgtagtctcatgttggtattttgccagagtagtattttattttattttatttatttatttatttatttatttatttatttattttgagacaggttctcactgtgtcacccaggctggagtgcagtggtgcgatcttggctcactgcaacttcctttcacctcctggattcaagcagttctcctgcctcagactcctgagtagctgagactacaggtgtatgctaccacattcagctcatttttgtattttttggtagagacggtgtttcaccatgttggccaggctcttctcgaactcctgacttcaagtgatccacctgcctcagcctcccaaagtgctgggattacaggcgtgaaccgctgtgcccggccagagtagtattttaatatcacatttaaaatgcactaacctggccaggcacagtgggtcacacctgtaatcccagcactttgggaggctgaggcaggcggatcacaaggtcaggagttcgagaccagcctggccaacatagtgaaaccccatctctactaaatatacaaaaattagccgggcatgttggtgcgcgcctgtaatcccagctacttgggaggctgaggcaggagaattgtttgaacccaagaggcagaggtcgcagtgagccaagatcatgccactgcactccagcctgggcaacaagagcgagactctgtctcaaaagaaataaataaataaaataaaatgcactaagctaaagatgaattatttggtttggatttgtctagatccttaagttgtaattatgtgcaattttttctcgctttactaaaaaaaattgacagaggatacaatagaactaataaaaatatttcagtgaatagagacagacctgaatactgtcatttaataaacttctagtactaaagtgtattctttgttttcacatgctttagtaaggaagcaataaaactaatcatgtttgttgtaataaacagtttctaataagcaacttattcactagatgtttttcactattagggaaagctctgttttttctattagacccttgatatagacattttctttttataaaattttccacacatacagttttttattaaatataatgtaatttgagaattttccagtgttaggagaaatagtatgttttaccacactcctccaccccaagctatttaactatcttttccctattttcaaaaaggccttttcattttttggaggaaaaatttatgtatgattgtgtgtatttttactttttcctgtgtgtaagatactgagacatagaacatagaaagcaaaggctaaagcataaagataacaatatttaattatctcagggtaacatttaggcttttgaagttagtgttaagtagtatcatagataagtactgatcaagagtcagaactaataactgtcttttctcctttctccaaacttgctggggggaaaaggatgtcctgtgctactgtcaattgctatatataattgaaaaatcctgataatgattgtccattttcacttagcgtggacatatatcaggaagctacataacatcaaagaagggtcaacataacaaaaaatttaaaagtaaagaatatgatgagtacagcacctacagtgatgacaacttcggtaactacagtgatgacaactttggtaactacggtcaggaaacagaggaagattttgccaatcagctgaaacaatacaggcaagctaaagaaacctcaaatattgctttagggtcatcattttctaaagaatcaggaaaaaaacagagaatgaaaggagttcagcaaggtaagtttgaaattacagtctgtcttagaatgtgagaaccttattaaaacaggcagctatggagtaaaaacttagaaacttatccctgttcaagattagcttattcttgtagaacctaaattca

SEQ ID NO: 24308 - DNA, 2300 bp, Homo sapien
ggttagagatagcacatatctggcatgcacgcagattgttgcttccacctttgttttcggttcccacctgctgcttgccatcagtgctttcccatatggaatccttatacagcttctgaaacttctcagcatagtaatcctgaagaaccctgcctggtgggtggatttggcattttcacttgattatgaggctgcattgtcattgataatgccttcagattgtgggaaataggtctccacatatttgattattttgaagagcaattccttaggctattggcggaagacctctggatccagattttcattttctaacaccaccatttcagccctgctgccagtccccaagcgtctgtgcacctgggccctaagtcacattgttgagcattcgtttagtcctgacaactcaggaaagcaaggaggtctcagccaatgaggaacaagaaatctatagcaaatatcacaattcatttgaaccattaaaagtatttctactaatgtcaggaagataagtatgtccactattttggtaatattatatattgtatcctggtcaatgaaataagagaaataaaagttataaagattagaagtggagtggcagcctaattatttgggaagtttccctcaacccaaaggaatcaacagacaaaactattggaaataataattaaattagcaagatgtcaggaaagaagagcaacattcaaaaactgaatgtctttttatatgccagcaataaccaattacaaattattataaaaagttggatgtttatatagtagattctaattttactgtaaaaggttatatatgcctgaaaaagaggactagtaggagagaaccaataaaattttatctctgggtagtgggattaggggtgattcttatttatctttgtacttttctgtgtttttcaaaacagtaagttttagaacagctaacggtaagcagcaagtgggctaaaatgaaagcatgaggtctatttcgtgtttctacctatcgacgctatggaacaaattgcttcttaaacacacagtattctattctgatgtaaaaaaagtacttaaccaatatctgtttagaagtgttaacattcttgtttgtttctttttctttgaactaagaaatattattatttctgtctacaggccaccagcattttataccagtgcctcaccaccaggaccacaatttcagggaagcagtccacaccctcaacatatctatagttctgggtcaagtccaggtcctggacctaacatgtctcagggacacagtagtcctgtgatgcacccaggctcccctggacatcacccatgtgcaggacctcctggtctaccagtgccacagagcccacctttaccacctggtccacctgaaattgtaggtcctcaaaatcaagctggagtgcttgttcaaccagacacatctttgacaccaccaagtatgggtggggcttaccactccccaggctttccaggacatgtgatgaaagtacccagagagaatcactgttctccaggttcatcataccagcaaagtcctggtgaaatgcagctcaacaccaattatgagtccctgcaaaacccagctgagttttacgataattactatgcacagcattctatacataattttcagccacccaataactctggtggtaagtttacttttttgaaataatttattcctaatttaaaatacagtcctatttttcattaaaagcatgacagaaacgtaagttttaagtaaagctgagtaaaattgataagattgaaaccttaaaatgttttcagtttgccaaacttttgaaacaatagaattttagataacttttagaaatattttaaatgatataatttgataatccagtgtgcctgtgatgaaagctttcatttcttatgactggtgaagttttgtgctcactcaatgactgtctctccccatgttatacatgtagatgggatgtggcatggtgaatttgcccagcagcagcctcctgttgttcaagactcacctaaccatgggagtgggtctgatggcagcagcactaggacaggccatggccctctgcctgtaccaggcctcctccctgcagtgcaaagagctctttttgtaagacttactcagagataccaagaagatgaagaacaaaccagcacccaacctcatagggcaccaagcaaggaagaaggtgtgtcagaagttattaatagcatcttacctatttggatgggttaaaatttttaaatggccgaggcaggtgaatcacctgaggtcaggagttcgagaccaac

SEQ ID NO: 24309 - DNA, 2300 bp, Homo sapien
ctggctggagtgcagtggtccgatcatggctcactgcaacctccgcctcccggattcaagtgattctcctgcctcagcctcccaagtagctgggactacagatgcacgccagctaatttttctatttttagtagagacgaggtttcaccatgttggccaggatggtctcaatctcctgaccttgtgatctgcccgccttggcctcccaaagtgctgggattacaggtgtgagccaccacgcccagtcattttgttgtttttttatctataacaattatatatataagtatatttttaatgtgccacttattaattgaagaaagtggtcatttatgctatagcagttctatatttgggttttaatcattacagggtaacactgagcttgttccaattgcctataaataggaagatccaggtgcaattgggtgggatggtggacaaaaatacatcatagatggtattgtgtgctttctaagacatgaggaggcccagaatgtccagacaacttacttttgactgattgaccttatctagttggtgttctttaacatgttccccatcccctgtaaaccctaataactaaactgataagagtcatcctcaaaattgagcaggcatctgaatcatctggtatacttactaaaattccaattgctggtccccaatttctgacccaagattctgcatttttagcaatttgttgctgatacttctggtctggggcccataccttgagaacccccggtctagaggcctgataagattcaggcttaattttttttacagacatacttcataagtagtattgatagtttctttgaatctggtttttaataatctttctaatgatgaaggaggaatgttctcaatactgacagtaatctcagttcttcaaactataggataggtttctatagccacaatagtatttttgtcacaagggcccaaataagaatacatcatgtatatttttaatacttattcaaattacaaattcactgtctttaatttattctaacaaaagtaaacctaattttatagttataaaaaagaagaaatctacttctagtcacctaagagtaaaactgcccttataaaaaacaagacagaaatctcaaaattataactaattttatagttataaaattaaccaggactttaagaacgtttgcattttaaaattaaagttttcaatagttttcaatacaacaatgatactatctcaaaatactcagcatgtctaacaggcctcttttaaaagctcagcatgtttaatgtaggtgttgctaacgtccaggtggctcctataagttaagggtccattgatttagaagttctaaaagagactaacctaagggataccaataacagatatttttaaagaatttcatagaggagatacacattagaaacccagaactctaagatgtgcatttgctaagtcctgtaaacagacaggaaaacacatttacattagtttgccctttaaagattatttcctacttgtctcttatcaatgtgagtacataaaagagaccttattacaattaaaaacaatgatggtttagcagcagatttagataccttacattctctctttaagagagagaatgtaaggcctggtgcggtggctcacacctgtaatccagcactttggcaggccgaggagggtagatcacctgaggtcaggagttcgagaccagcctggccaacatggtgaaaccccgtctctactcagaatacaaaaattagccgggcatggtggcgcatgcctgtaatcccagcaacttgggaggctgaggtaggagaactgcttgaacccaggaggcagaggttgcagtgagccgagatggtgccattgcactccagcccaagcaacaagagcaaaactcctatctcaaaaaaaaaaaaaaaaaaaagaatgtaaactacaagatggttcaaaagaaattacacagaattcagcatgggagaaacaaaaaacaagagtgggaaaagacatcaaacatgtttttactaatcgaagttctaaaaggagagacaagaatacagcacagataatatatgaagagaatggctggaaatctttcagaactgttgaaggatatctatccacagattcaaaaacccagtaaaatctcaagcagtattaaaaaaaaaagaagaaatctacttctagtcacataagagtaaaactgcccctaaaaaagacagagagaaatctcaaaagcagccagagaaagaagacacattgcctcacaatagacttctcaacagcattggtgtaatactatctc

SEQ ID NO: 24310 - DNA, 2300 bp, Homo sapien
ggatttatcactcagactgatgctaaggaccagcctagattccattgagattgaaactgcaattagtgttttctgcatgctgctgctttataccaagggcaagaaattgtttggcttaaaacactttttctaaaaattgtcttctgttggagtaaaagaggaccatgcctatatcttaatttgtttttggttagatatctgataccttaatcagatggaaaatagcaatgaataaaaaactaaactgtaattgtaaggcaggagaatagcttgtataaaagatctttaattgacacaatatgtgatgctgtaaggctctatcctagggataagaagcttggtgattctgatttcctggctgggagtggattaaagcaggaaattaagagggaggcaggcttttttttttttttaggcagtatctgtctctcttgctccggctggagtgcagcagctggctccatctttgctcactgtaacctctgccttctgggctcaagcgatcttcccacctcagcgccccaagtagctggggatacagatgcgcaccaccacgtggacctggctaaggtttgcattttttggtagagacaggtgtcactatgttgcccaggctagtcttgaacttctgagcacagcagtctgcctgcctcggcctcccatagtgttgggactacaggtgtgtgttactgctcccagctgggaggcaggcttttaaaggcatccaaaggaagatggaaatgctggtaagaaaggaaaatggtggtacataaattatgtaactagcagcactgtgactgttaactcttgtacctttttactgtgagactttaatcccttagtttaggtctggcctaatttctctgatcgtaatactgtcaaggaacctagaggatatttacttattttagttgttacttgatttgagaaatggaaatttcctgtatttggtactgtaattagtaatttttcttctgttcgattttagctggatatagtactgttagaaattactttcttgcttaaagggtaaatgtatttccctttgttgtttgggaaattgttgctgtttagtattttgcattatgataactttaaaaatgtttattataatcacttctaatttattggcaaaactgttagtgctttattaaaatgtgatcaggaagaaaaagcaatctatatgttcatttcttatgtgtggttaacactggagaaaaatttggtaaatgtgacatttaatggtaaaatgagtatgtggtcaactctatgtacgtgtttttaagtattacccatttctttctatgaatacttttgagttatctgcataaatagtggtagttttgagtaacaatataaacgagtttagtggttgctttggtttaagatgtattcttcggttagcatttaaaagtacagttctaagtttaatttacttttgtattacttttaaaaaacagatacatatgtacttacattaatgtgcaagagagggatcccaaagctcacagatttctgggtcttctttatgaattggaagaaaacacagagaaagccgttgaatgttacagggtaagttataggattcaaatatagcctttgcatagccaaacacatgatgcccagagaaatttatataagtaagtcaaatatattttataaatatcataaaacaggcattggtatcatagtacaattatgtgacacagcttggaacagatttagaattgtttaacacctataaattgtaagtctaacacggtcagaaatggtgttcttttgtgttttttgcattcaaatgacacaaatataatttttatttgattcatttctagaaaattccaagacacttttattttaacacctttaaagtaacatgttttctctagaagtagaattttttaagggttggagtgataatttttaacctttatgtataagtatatatactcctacatacatacatacaatttatttactaatctttaatttcttttctgatattagcgttcagtggaattaaacccaacacaaaaagatcttgtgttgaagattgcagaattgctttgtaaaaatgatgttactgatggaagagcaaaatactgggtcgaaagagcagcaaaacttttcccaggaagtcctgcaatttataaactaaaggtaaacaaacaaaacataaagggagaaaacttaagacataaccatttctaatatttggagtttaaattacttttcaatagcaaaccttaagctcaggtgtttgtgtttcctttaacatttttcttttaaaaagtgtatta

SEQ ID NO: 24311 - DNA, 2300 bp, Homo sapien
tgcgagctgctcatcctggcttcttgggagcagcgtggcctgagcaagggaggctgcccaggaccggcgcctgtggggcggggctggtcacagggtcttggtccccgagggctgattcctgctgaatgcttcaatggccaagggtggatccctctccttccagcctgaggctgtttcaggaagaaacagtcaggccccggcaggtttccctgcccaaggggagagtctgaggaggggccgactcggcaggtggagcagggggccactttcatcgagtttgtgttcagaactcactccagggtccttttcttttggggccaggcaggcagcaccgtgtgggacattattagcaaggagaggaggggcccgggagagctcacagggcgttttgggagctccgtagacaggcaggtcctgaggacttttggaaaggatagaacaaggtcccgggcagctttgtggtggtcgagagcgagggaggaggtggcctccctgagcgtggatggctggatgcaggccccagacccaggggcagaggccgagaagggaaggcgggggcccagggaccacacttggcagggtggagggggcagggggagccacttgctggggaaacttcaccggatgatctgggctgaggacgcgcgagtgtggaagaaacggcgcctcccccgtgccagatgctgcccaccaccggcacagggccagagttggggtcagcagggcagccgtgtgcccccagtgggagcttggaggtcacggaggaaatgcgagaccagatgcaggcaggggagtcctccggagcctgcaggagggggccgctggctcaggggcaccgggagacccccacatggacagggtggaaagggctttcttcaaagccaggatcttgtccccatcacagcgtcccgctacgcattgggagcgcttgctgccaggaggctccccagtcccgcagcagcccctcagcggctgccctccaaggaaggggcgcacagacactccagggctccacagcgcgcgggccaggggccccatctacccccggggcagcgggactgggcgtgagcccggcctgggacacagcccctgcgactgcaccattgttaggggccttctcggagctggcagacctagaaccaggcctagggggtgggggtgtgcctggatgtgtgttgcgggggtctgaacccttagttaggaccgggggccctcctttccacttcgtgcagtccctggggtctggggcatcctagccatgcgtggggcctccctgctgggattggagaccccctgacagctggggctggtcccagcattttcgctcttcccccagaaggactcagatgcagggtcttctctgctccccgtcacacagagggtggcacccccgatgggaactctcatttatcaccaaaccagaagataatggagaaactgacagagaagggctgcaagcagctaccgcagggcggtgtgtggatgcagatgggatgggcagatggaggcgggggccagcatcgctgccttcttgcccctcccagaggaccccaggtccccagctcgggcgccccaccagactggtaacacctgcgtctgctgtttggcaccgggggatgaatcacttgcttttctttcaacagtgttctgtagtttccagtctacaagtcttacacttttgggttaaatttattcataattattttattatttttgataatattataaatggaattgtttacttaattttacttgaattgttccttgctggtgtataagtagacatctcattttttttagttgacctcgtatggtacaatctctttgaactcatttattatcactgatggtttgtctttttttttttttttttgagctttcattaaggttttctatagataagatcatgtcaagacaccctcagaccacagggcggcgccaccagcccggccgagtgcagctggagcgccgacgtccccgaggatacacagtgctgaggcagaacgcaggttcgtcacagtgggcctccgtgggcggcgccgcacgctcgtcacagtgggcctccgccggctacgccgctgcttcagtggcttgcaggcactttcctcttggaagtggcgactgctgcggggctgagcggtgctcgcacgcgtctcgggagccaggttggcggcgcgatgaggcgcagcaaggccgatgtggagcggtacgtcgcctcggtgctgggtctcaccccgtcgcctcgacaggtgagtgggtctggaagagagcggcggcctcgacccggccgggcggcggcg

SEQ ID NO: 24312 - DNA, 2300 bp, Homo sapien
tcaggcgctgcggctcatgcctgtaatcccagcactttgggagaccaaggcgggcagatcacttgaggtcaggagttgggagatcagtctggccaatatggtgaaaccctgtctctaccaaaaatataaaaagtagccaggcatagtggcctgtgcctgtagtcccagctactcaggagggtgaggcaggagaatctcttgaaacccggaggtggaagttgccgtgagctgagatcacgccattgcactccagcctgggcgacagtgcaagactccctaacagacacacacacacacacacacacacacacacacacacgttccaaggaggaaagatgagttaccttacaaagaaaagggaataagctgggtgtggtggctcacgcctgtaatcccaacagtttgggaggctgaggtgggaggatggcttgagttgaggagttcgagaccagcctgggcaatatggtgagaccctgtctcaaaaaaaagtggggtggggaataagtagtaccgtacagaacctacagctaaaagaaacaaaaatggtgctcgctacaaaaagtgagaaaaaggaaaaaggtagcttctggatttggaaattcaaaggtcactggtgttcctaatgagatccacggttgtggagtggcagagagaagccacctgtggcacaggagtcgtcagtaggagtcgcaggaggaattgatgcagcatggtgggagtggacgtcactttcaaggtgatcagccgtgaagagcggcaaacacagcgtcttggctcgagttcccccaaacggtgccccctggaacaagaatttgagcacgagtacagtagtttttttgggaggtgatcccaggaaacatcggtagtcagggaaaggaaggaagccaacagaagatgccctgatgagcaagttgcagctgtggacaaccgcagccgtggcctacagaggaccaccgcaatacgcctaggacacacgcctccccgcagggcacgtgcggagggcgagagggccagggcattctcgaccaactctatccctcgtggagggagagcagctgggaaggagtgcaagcacccagcacctctaagtctgccccatttctgctctgagcgggctctccacagccagcggttgcctgcaggtggagccggtgcgcaagacaggcgagtgagcgcctggcggccccgtggaatctgggcaacgatgggaaggagaagggcgcttttacaatgtgctcgggtagataccgtgagcatcgggggacaggaaggggagaggccccagggtgttctttatctacaggagagtaaaagatgcaaggcgcagggctgatgtgggtaatttatgagggactgtaggaagtttgggggagctctgatgatcattgccttctctttgtatctcaaatgcagcagcacagtcttcagagtgggctatcagaaccgaagggacttttaagagccactctccgccgctcataaggggaaatcgaggtccggagaagggaaagcaagtggctgaatgccggtaaaaggcaggaaaagagcggagcccagggctccagggggtcggtttgggacctgcttccaccagcagagtctaaggtcatccccttggccgtgcgccaccctgggctcagccgaaggaaggagcactcgacacaaacaaaaccgacgctccgggtctccgtagtcgttaagcaaagaggaagaggaagcgcttcttcattaggccacaggaccgggccttagaacttttgggttttatccattaaaggtcctttggcaatagaagaaaaacccagatcgagccctgcaaactgggatcttccgccggcaccgccccccggctgcgacccggggctcggaaagaaccaccccaggcccgggctccggttccaccgcacagtccgcccgctgcggtaaagccgcgcccaccgccgcgggtctccaaccctgcgccgccgccgcccccgggggagggtacggaaagggcgcggcgccgccgcccacgggctcctccagagcgcggcggggccgggccgcgcggaatcacgggacagaggcggggccgcgccggcgggggcgggcgtgcgagcggcgctttcctctccggcacccggcgggcgcccgggcgcggcgccgccggcacccgagaggcgcggtagccggcgcgggcggcgggggccgggccgcggcgggcgcccgggcggggtccgcgctgagccgccttctcggccgcctggtccctgcggcggctgcccggcggcccgggcgcgcggcgcttcgccatgtacacc

SEQ ID NO: 24313 - DNA, 2300 bp, Homo sapien
atagcgatgtgtttgtgtgtgatactagaaatgacacatggccctgacgtgcatgctgcgatacaacaagaaagtgaagtattatctcaccatatcaataaagttgtgcttaatggaaaaatattttataatgcatccgtttttaaattaaaggcaaattaaattttaggcctgacccagtggctcatgcctgtaatccagcactttgggaggctgaggtgggtggtttacctgaggtcaggagtttgagaccagcttggccaacatggtgaaaccctgtctctattaacaatacaaaaattagctgggtgtgggccgggcgcggtggctcacgcctgtaatcccagcactttgggaggccgaggcgggtggatcacgaggtcaggagatcgagactatcctggctaacacggtgaaaccccgtctctactaaaagtacaaaaaaattagctgggcgtggtggtgggcacctgtagtcccagctactgggaggctgaggcaggagaatggcgtgaacccaggaggcagagcttgcagtgagccgaggtcgcgctactgcacttcagcctgggcgacagagcgagactccatctccaaaaaaaaaaatttgctgggtgtggtcacgggcgtctgtaatcccagctactcgggagtctgaggtgggagaacgttttcaacccgggaggtagaggttgcagtgagccaggatcgcaccactgcactccagcctgggagacagactgagaccccgtctcaaataaaaaaaataaaaataaaataaaaaattaaactttaaattcagttcctgagtcacactgactacatttcaaatgctcagtagccacttgtggttggctagtgaccactggatgggacaatgcagatacggagttgaactttcagtgagttaaaaatttatttattttgttccttcaagttcaagtagcttttcagttctttcccttacgctttaaaataaatttgtttttaatatctatctacaatgtcgttatttccaccatttgttcacagactgggttttgtaggtgaatcttaacatggacttggcatgaacagttctgttctaaacagaagagggagcacagctcagggaaggccagtgcatgtctgtgggcaggttcctccctgtctctgattcctggggagtaagagcaggtttccagttaagacttgggggttttgtagtagcttgagctgttaaaaaaaaaaaaaagacttgggagttcgggcctgcatgttggctggtcctcactacctttatgatctcaggaagtttacttctccatgacccagttcctaatttgtgaaatgtgatgccagtgcctctagctccaggggtctgattgcagagtagatgcagagggaagcccctgtgtgctaagtgccttgcctgactttatcttctgtggtgttatggtatttggggagcaggaggtatatttcactatgaccactggtgtcctatgttccgttagaaaaataccttttttattctgtcaccaaagccagcctgagctaaaagcaagagctttaaaaagtctttagataattcagattcctacgtagccttttctcccatagagagttgggccaggatagtctttttgctacttaaattttcctctcttccccatttcatttttttagtatgggtatggttcaacaacatatttgttgaaaagatatcggctcaggattgtgtccggttaagtttcattagagatgcattttaaaaggagcataagtgttggacattaagccttttgaattaattggggtatgcctttcaggttgcatctaacagctgtgcgctccccaataacgcatttgagctttgtccagggagactaagagcaaatagagatgttagaagactgagtcatgctttgcctcccggaaagtctctgggggaaaggagtggcctttctgaagggagtgacaaagtgcactaagaagggaggctgatcctcttctgtcatctgccaggctaatcaagacaagccctgaactggctgagtcctgcacatggttccctgaatcttatgtgatttatccaaccaatctcaagactccagttgctccagcacagaatggaattcagccaccaatcagtaactcaaggacagatgaaagagaattctttctcgcctcttataacagaaagaaagaggatggagagggcaacgtttggattgcaaagtcatcagccggtgccaaaggtgagttggcactgctgtccccttctctattcctggtaagttgctattgtgatgtattta

SEQ ID NO: 24314 - DNA, 2300 bp, Homo sapien
agtgcttaggcactacgaatttctgtaaaactgacgtttcatggttgtagccagccaagatagcgttgacacctgtatggagaaagagttggtaggataatcctgggtgctcttgaggggagaagggagcatgtgggggactggagtaaggaagggagggaaaaaggtgagcgggacattgaaagcctcttgtggggtttttgctgttcgtatttcctttctggatttatagagagctcttggtttgaattggattggtttgtcttttgctttttccctgttaggtgaaggcattctcatctcctcagaggcttcagagcttctcgatttcatagacaaccagggccaagtgcacgtgatccagaaatatcttgagcaccctctgctgcttgagccaggtcatcgcaagtttgacatccggtaatgcattcatgtccatagcttttgtttttattcatctgaaaaaactgccatggtatgtggtgggaagggggacatggaatatgaggaagcgtttgaccatgtttaatatgttaccaaaattgagcacagctgaatggaacttaccttctgtacctaattttctatttttctttcttgttttttccatctagaaaatgttactacgattatggattttcttttttaaaaaatattcttttctggctgggcacagtggctcacgcttgtaatcccagcactttgggaggccagggtggatggatcacctgaggtcaggagttcgagaccagcctggccaacatggtgaaaccccgtctctagtaaaaatacaaaattagccaggcatggtggcaggcacctgtaatcccatctactcaggaggctgaggaaggagaatcacttgaaccagggaggggaggttgcagtgagctgagattgcaccattgcactccagcctgggtaacagagtgagactcctgtgtcaaaaaaaaaaaaaaaaaaatcttttctataaaaatgacttgtggattcaaagaaatgaatataaatgtatggtcttgctcatggaataaactgagagatgtgcatggaacacgtaattcagacacaacaggttgtgcaaccttgccaaataatttctcctcacttcattgtttgtgtcccactctgtggattttatgaccacacctcaggggattttaagtttctgagcaaagggcttggcatggagaaagaggttgtgtggtgcattctaaagctaaacagccctccctctccaacttacccttggccttgctgtcagctcattgccaaggactctgtctccttgattgcttcataacgatttgtcgcttcttgaacatcaacataggtcagatcatcttcaggaggaacactctttaagattactcaaagaggagacataacaaatggaggtttcataggttaaccttaaaatccaacccatccagggcttggtgtggtggctcatgcctgtaatcccagcactttgagaggccaaggtgggtggatcacctgatgtcagtattttgagaccagcctggctaacatggtgaaaccctgtctctacaaaaaatacaaaaatcacccgggcgtggtggcatgcgcctgtaatcccagctactgaggaggctgaggcaggagaattgcttgaacccggaaggcggaggttgcagtgagccgagatcacaccattgcactccagcctgggcaacaaaagcaaaactccatctcaaaaaaaaaaaaaaaatcatctgatttttttatcttttgatcaaatttccctgttatttatggtaaaatgttttgtttgcctcattgtagtgataactcactatcttagctaaatcataacatgcctcttatagttttagaaacttcctccttccctagttgcctcccactccttacctaccccataaaagaagtcaagatgtggggattgatgtatataatatgcagaaactttggatgacttgagtaaagcagtgtttttgttgaattgcagaagctgggtcttggtggatcatcagtataatatctacctctatagagagggtgtgcttcggactgcttcagaaccatatcatgttgataatttccaagacaaaacctgccatttgaccaatcactgcattcaaaaagagtattcaaagaactacgggaagtatgaagaaggaaatgaaatgttcttcaaggagttcaatcagtacctaacaagtgctttgaacattaccctagaaagtagtatcttactacaaatcaaacatataataaggtaacttaattgtatctttttggattacgtgtttcttctt

SEQ ID NO: 24315 - DNA, 2300 bp, Homo sapien
acccaggaggcggaggttgccatgagccaagatcatgccattgcactccagcctgggcaacaagagcaaaactccgtctcaaaaaaaaaaaaaaaaaaaaggaaacagagaattaaagctgataagctgatatttgtattcatctcatataaaatctttcaagcacacctcatgtcttccttctcctttgaccaccccgttctaatgagcatttcccctcctgcctcataggaactgcctcctgagcgtggagcctgccattagcaccaagcacctcccttaccagagcttccagctcttcggctttgacttcatggtcgatgaggagctgaaggtgtggctcattgaggtcaacggtgcccctgcatgtgctcagtaagcctgcacgtcattgtgtttttacaagtgggaagttggttctgcagttgggatagtctgtgggtacaagtgtagtcactttgactgctgtgagggaggatgccacagtgataggagacccttgggaggactctatctggcagggggctttgctgagtcacttcctttcctatttccccgtgtataggccagataggcccagtgtggtagctcatgcttgtaatcccagcactttgggaggccaagacaggtagactgtcaggtagactgtctgagcccaggagttcaagaccagcctgggcagcctggcaaaaccccatctctacaaaaaatacagaaattagtcaggcatggtgctgtgtgcctatagtcccagctgctcgggaggctgaggtgggaggatcacttgagcctgggaggttgaggctgcagtgagccatgactgcaccactgcattgcagcctgggcgacagagagaccctgtctcaaaagtaaaaaatgtaagcagctagcctgtgctcaggtgggtgggagatgccatgagagtgttaaagttcattactgccagagagacccgtatgacaagctgagtaagcaggatcctatgatgtggcgacccagaagttcagagcctcctgaggcaggaaggagtcagagaaggcatcttagacatggggggtctggagctggggtgcaagaaaagagggttccgctgcaccaaaggttggtggggagagtcttccaaaagaggtgcagcgtcctgtgggctctcaccctgtcccgggctctgcaggtctgggagatgcccagaggaacagaagctcctgagaacctgctctccggaacttctgcttctctcgggagaaggctggttgtagcatgagcgtcatggagtcattaaggaggaaggaaggtaagagaggaccttctgtggaaggccttacgtgtcagggaaagtcactcggactcaattctcttgtgctgagggttcttctgaagatcctctttcatgatgtcaagaccctttcgtggttcccatctacatcttgaagaaattgagtgatttttcaaaatgtttaagagaaagtcccgtacctgcaagggacgatgtcaacacaccaaagttgttctttacttagaagctaggcctttgccattgcctgatggttacgacaggcatgattgcatgattccatcttgttcatcagtctctgcagccgataagtgcttatcaggtgctgcctacctggccaggctctgtatgaggccatgggttcacagtggggagcaaagagagacacaggccctacctttcgtggggagagactgtgagcagacagataccaggcagatgtcaattacaagcgaggacaagtgcttcaatggagaacaaaggatgttgaaaggtaacgtaactgagccaagggcccacgatgggaagtgatgttggaactgagatctgaaggccaaacgcaagttagatgggctaagggcggaataaggcagggatccgcaccttccctcaccaaatcaacagtggtgtgcccagtctcacccactgtcctttcctatcaggggtttgtccctccatggtgctctagacctttccctcctcccgctcctgtcttctcatctggcagttaacattgtcacctttttccctctctgatgcataattcttgtcagcatatgcagtcccagcagattttcccaactattcaaaaagatgtcctcccctgatgccacatcctgttccaatgatcacgccttctccagttcccttcacagccaagcttctggagagcagcttctgcacaagctgtcttctattcctctgttcccatccatgttccagtccattccaggctggctcccatcctgattgcctcacagaaactgttctttgcaggtccccagccaag

SEQ ID NO: 24316 - DNA, 2300 bp, Homo sapien
gagtttagcaagattgccagacacaagatcaatatacaaaactcaatggtatttctacatattacaaacaatttgaagttaagaaaacaattccatttatatcaacaccaaaaagaatgaaatacttaggaataaatttaacaaaagttcatttctacaccaaatactacaaaacatctctgaaagaaattaaagaacacctaaataaatggaaagacatcccatgtttatggattgggagataattattgttaggatgaaaataggccccaaattgatctaccaattgaacacaatcctgatcaagaatctcagccttctttgcagaaattgacaagctgggccgggtgtggtggctcacacctgtaatcccagcactttgggcggccaaggcagatggattacttgaggtcaggaattcaagaccagcttggccaacatggtaaaaccctgtctctattaaaaatacaaaattagccaggcatggtggtgcatgcctgtaatctcagctatttgggaggctgaggcaggaggtagaggttgcagtgagccaagatcatgccactgcactccatcctcagcaacaagagcaaaactctgtctcaaaaaaacaaaaaacaaaaaaaaaaaaaaaagagaaagaaattgacaagctaagctgacgctaaaatccatattgaaatacaaaggatcaaataaatctggagaaagaagaacaaagttggaggatgtgcacttcctgatttcaaaatttattacaaagctgtattaatcaaatctgtgtagtttgtagacagatatacagataaatgtagatagacatacagatcaagagaatagaactgagagtcaaaaataaacccttgcatctatagtgaactgattttcgacaaggaggccaagacaatttgatgagggaaagaatagtctttttaacaaatggtgttaggacaactggatatccacatgcaaaggaataaagtgatatgcctttctcacaccatatacaaaaattagctcagaatgagtcaaagacttaaatgtaagagttgaaactacaaaactcttagtagaaaatataggtgaaaatccccatgattgaaaaatatctagtatttgatagcacaacagggtgactgcagtcagcaataatttgttgtaccttcaaaaataactgaggaagtacaattggaatgttcatgacagaaatgatgaatgcttgaggtgatggaaaccccatctaccctcctgtgatgattacatcgtatgcctatatgaaaacatctcatatacctcataaatatgctaattatgtacccataaatttttttttaaatcctcatgaccttggattacacaatgatgtcttagatatgatataaaaagacaggcaacaaaagaaaaaaactacacttcaaaattaaaacgttttgcttcaaaggacaccagcaagaaagtaaaaacccacagaatgggagaaaaatatttgcaaatcatggatctgacaaggactagtataggctatataaagaactacaactactcagttggccgggcgcgcgcggtggctcatgcctgtaatcccagcatttagggaggcaaggcgagaggatcactagaggccggaagttcaagaccagcctgtgcaacagactcccggctcgaattttttataaaaagtgatataggaatgaaaagtaccagctgaactaggaaaggggaagttgacagtaaggagggactatcaggggcaggaggatactgggtagtggtggtttaattcattgttttaattgtggtgatggctgcatggttgtatacataggtcaaaacttaacgcgtacactttaaatgtgtggtttattgtatgccagttataacgcaatatagctgttaaacacaaacacaataaagttgaaaaaccagcaggcattccctgattaatcagtattctggggaggtaaggggctcacaggaacgcaaaagaaattcaggctgtaaatccagttggacgccccgctgccccatcccctccatccgggaccgcccgactcctctcccacctccttccccaggcctcccccaggcctccagtccggaagatgcgacgaggttagcggggcccgaccactccttggcttcccaggggtgagcctcgcgagttaggagttgggtagagagtcagcccggggcccggcatccgctttttcgttgaagcaacgactttggccggatgactccccagggtcggcatcagcgtgggactgggaacaggtgaagggaaacagaagagagcctga

SEQ ID NO: 24317 - DNA, 2300 bp, Homo sapien
aggaggtagaggttgcagtgagccaagatcatgccactgcactccatcctcagcaacaagagcaaaactctgtctcaaaaaaacaaaaaacaaaaaaaaaaaaaaaagagaaagaaattgacaagctaagctgacgctaaaatccatattgaaatacaaaggatcaaataaatctggagaaagaagaacaaagttggaggatgtgcacttcctgatttcaaaatttattacaaagctgtattaatcaaatctgtgtagtttgtagacagatatacagataaatgtagatagacatacagatcaagagaatagaactgagagtcaaaaataaacccttgcatctatagtgaactgattttcgacaaggaggccaagacaatttgatgagggaaagaatagtctttttaacaaatggtgttaggacaactggatatccacatgcaaaggaataaagtgatatgcctttctcacaccatatacaaaaattagctcagaatgagtcaaagacttaaatgtaagagttgaaactacaaaactcttagtagaaaatataggtgaaaatccccatgattgaaaaatatctagtatttgatagcacaacagggtgactgcagtcagcaataatttgttgtaccttcaaaaataactgaggaagtacaattggaatgttcatgacagaaatgatgaatgcttgaggtgatggaaaccccatctaccctcctgtgatgattacatcgtatgcctatatgaaaacatctcatatacctcataaatatgctaattatgtacccataaatttttttttaaatcctcatgaccttggattacacaatgatgtcttagatatgatataaaaagacaggcaacaaaagaaaaaaactacacttcaaaattaaaacgttttgcttcaaaggacaccagcaagaaagtaaaaacccacagaatgggagaaaaatatttgcaaatcatggatctgacaaggactagtataggctatataaagaactacaactactcagttggccgggcgcgcgcggtggctcatgcctgtaatcccagcatttagggaggcaaggcgagaggatcactagaggccggaagttcaagaccagcctgtgcaacagactcccggctcgaattttttataaaaagtgatataggaatgaaaagtaccagctgaactaggaaaggggaagttgacagtaaggagggactatcaggggcaggaggatactgggtagtggtggtttaattcattgttttaattgtggtgatggctgcatggttgtatacataggtcaaaacttaacgcgtacactttaaatgtgtggtttattgtatgccagttataacgcaatatagctgttaaacacaaacacaataaagttgaaaaaccagcaggcattccctgattaatcagtattctggggaggtaaggggctcacaggaacgcaaaagaaattcaggctgtaaatccagttggacgccccgctgccccatcccctccatccgggaccgcccgactcctctcccacctccttccccaggcctcccccaggcctccagtccggaagatgcgacgaggttagcggggcccgaccactccttggcttcccaggggtgagcctcgcgagttaggagttgggtagagagtcagcccggggcccggcatccgctttttcgttgaagcaacgactttggccggatgactccccagggtcggcatcagcgtgggactgggaacaggtgaagggaaacagaagagagcctgagaagaccgctctcctccgatcctaattgactgagccaatgagagccaaagaggtcacatgctcaactgggcggggagcgggtttccacctgcggcatctttcgcgagcggggagatgagtggggcggaatatgggagaaagggagggcccgccacgctctggctggacacggccttaatcggcccgttcactcgacgtttttggttctacgttgaccccgagaaaccgaaaccgcagggcctagggcgggtggaacgagagggaactacatttcccagcaggctgcggaaacgggactgcggccactacttccggcgtgtaccgagagactggcgtccggcgtgtaccgagagactggcgtccggtgtgcaggtggccacatggatcctggcagccggtggcggaacctgcccagcgggcctagcctaaagcacttgactgacccctcttatggaatcccgcgggaacagcaaaaggcagcgttgcaggagctgacgcgggcgcacgtggagtccttcaactacgctg

SEQ ID NO: 24318 - DNA, 2300 bp, Homo sapien
atataaaattgaaaaatagcaaccatattttctgtattattgtagattaaccataaaacacttcagttagcctttctggttttgattttaaacccaaataaggaagtagacatagttatgaaaaaaaagggagaagaacacaaacaaatcagttgtcaagatccagggcttcttattccatcttgactgtgaagatgaagtgttcagtgtacacctgataaaaacatttatgacacaggaagatgtaggctcaagaaaggaatctaaacagcaaccagcagaggtggagcagtgatgccaggctcttctactcaaacttgattctctagtttcacttgataaagtccaaacctacattaatacccttgttgggtgagctaacagcttccttcactccctggtaattcccttatctgtacattacagatttttagcagtgtacttacaaatcctactagtgtgtagtcagttgtgagattcattgtaacattttataaaatatattccttcttcccacacctctccaaaatttattccttccaagtactaaaaatttaatattactgcaccacagtgatattaaatgcagtgtcagtgccagagaatatgcagaaatgaaatgtgtcacttccagtgctgtcttctggaagaatagttaggtcttccaagtgtgagtgttcaaacactgatagtttgaagaggtggattatcaatagtcaatggctaatgtgttgactcaggggcctgctggaaaaggtatacatgagtgacctatgtacatcttccacgttttcttccaaatatcaaatataggagagaacctatctcaaacattctcttaggtattttcagtggtttctgaaccacccatagaaagcgctgatggtgtatagtctttttttcttttatttttagttgacatgtaataactgtacatatttatcgggtatacagtgatttttccatatatgtcaataatgtataatgatcaaatcagagtaattaacacattcatcacctcaaacatgtatcatttttttgtgttgtgaacattcgaaatcccctcttctagctttttgaaaatatacaataaggctgggtgtggtggctcacgcctgtaatcccagcactttggaagctgaggcaagaggattgcttgagcccaggagtttgagaccagcctaggcaacaaagtgagacccccatctctacaaaaaaaatttaaaaattagccaggcatggtggcacatacctatggtcccacctacttaggaggttaaggcaggagaatcccttgaacccaggaggttgaggctgcagtgaaaaaatatacaacaaatatagttaactgtattcaacctacattgctgcagaataccagaactcattcctccagtctagctgtaattttggaattgcaggctgctttaggcttttcacttagtgttggcagcatagattaagatggactgtgtagttcgtgtgattggttttagatgtataacaagtataatgggtgaaggagggcatcacattgaagagctatcctttctgcacctgaaaagccctctttcaggtttttggttttgatgtatgttagtagacgtttgttaaagatcgtacagattacatgggaataaatatgaagtttgtgataattgaaacacatactattttattttattgagaatagggtcttgccctgtttcccaggctggagtgcagtggcacagtcatggctcactgaagccttaggctcctggactcaagcgatccttccgcctcagcctcccaagtagctggaactacaggcacgccccaccccctcaccccaccccctctggctaatttttttgtagacagggttttgtttcaccattttgcccagtctcatgttgaactcttggtctcaagcgatccacccaatcctgggattatagatgtgagccaccacacctggctcacatactattttatattaattttttttccttatttcaggaaaaactggaaggttggttagtgtctattaaaatagcttttgataagaaggctcagaagaccagtgtttccatgaacactgacaatttgatgaggatttttacaatgggcatagaccttacaaaaccatttgaatacctttttgctactgggaatctgcgttctaaaacaggtaaaattaaatcgatcgttttagttatgtttttcaaattagttgcttagtgtagatttgcctgtccctgagagttctttttaaaagcaaaccccacgaaaaaagtaaatttctcataactatgact

SEQ ID NO: 24319 - DNA, 2300 bp, Homo sapien
tttgggggttaatgcatttaatgcatttaggtggcttagaaataaaaatattaagacatacagtgaaatgctccctcccataggcccctgtccccttgctacttctttcctgtgtgtccttgctgaagcaatttaaacttccacaagcaatacaaaagccttcaggcttaccccggagatattgcaggtttggttccagagcgctgcaataaagtgagccacatgaatttctcggtttcccacagtgcatatgaaagttatgtttacactatgctgtaaatatttcaattttaagaatactttattgctaaaaaatattaaatcatctgacccttcagtaagttgtaatctttttgctggtggaaggtcttgcctcagtgttgctggctgctgactgatctgggcggtggttgctgaaggttaggatggcttgtgacaatttcttttttttctttttttttttttttttgcgacggagtttcgctcttgcccaggctggagtgcagtggcgcgatctcggctcaccgcaacctccacctcccaggttcaagtgattctcctgcctcagccttgcgagtagccgggaccacaggcatgcaccatcatgcccggataattttttttgtatttttagtagcgacggggtttttccatgttggtcaggttggtgtcgaactctcgacctcaggtgatctgcctgcctcggcctcccaaagtgctgggattacaggtgtgagtgactgcacccggccagcttgtgacaatttctttcttttttttttttctttttttttttgaaatggagtcttgctctgtcacccaggctggagtgcagtggcgtgatctcggctcactgtaagctctgcctcccgggttcacgccattctcctgcctcagcctcccgagtagctgggactacaggcgcccgccaccacgcccggctaatttttttgtattttttatagagacggggtttcaccgtgttagccaggatggtctcgatctcctgacctcgtgatctgcccgcctctgcctcccaaagtgctgggattacaggcgtgagccaccacgcctggcctgtgacaatttcttaaaataaaacaagtttgcgacaccaattgcatcttcctttcacaaaagatttctctgtagcatgtgatgctgtttgatagcattttacccacagaggagattatttccaagttgcagtcagtcccctcaaaccctgccgctgttttatcaactaagtttatgaaataatctaaatcctttattgtcatttcaacaatgtttacagcatcttctcatttcttgagatcccatctcaagaaaccatttctgctgggcacagtggcttaggcctgtaattccagcactttgggaggccaaggcgagaggattgcttgagcccaggagttcgagaccagcctaggcaacacagggagaccctgtctctacaaaaaaaaaatttaaaaattagccaagcatgatggcacgcacctgtcagctactcgggaggctgaggtgggaggactgcttgaatctgggaggttgaggttgcagtgagccatgatcatgccactgcactgcagcctgagcgacagagcaagaccctgtctcaaaaataaaacaaacccattttttttgctcatcctctaagaagcaattcctcatccattcagtctgattatgggattgcagcaattcactcatagcttcaggctctacttctaattctagtggtcttgctatttctaccacatctacaagtccagtagtaacatcagagatcactaatcacagatcaccataacagatataataataataatatttgaaatattgcaagaattaccaaaatgccagcacagagacacaaagggaacacttgtcgttggaaaaatggcattgataagcctgcttgaaatatctgaagtgcagttaaaagaaataatgcctgtacctgttttagagacaaggataatttgatatctgaactgatacagcagctgttgaccccatctggagggaatctggaatgttggatgaagcattctgatgtgattgtgctgtttgtttcctttaccaggggtcactcccattgatggagctccccaccgatcatacagtgagtgctaccctgtcctgctggacggtgtcatggttggctgggtggataaggatcttgctccaggcatcgcagattctcttcgtcattttaaggtgggcttgaggctttgtgaattgtcctatcccttgaccttaggtttttcagttcctttctagttttggggttaacc

SEQ ID NO: 24320 - DNA, 2300 bp, Homo sapien
ttaagtacattcatgttgtggagtcatcaccatcttcagaactttctcatcatcacaaattgaaactctgtaaccattaaacaatcattcctctttttttttttttttgaggcagagtctcgctctgtcgcccaggctgcagtgcagtggtgtgatcttggctcactgcagcctccgcctcccatgttcaagcaattctcctgcctcggtctcccaagtagctgggattacaggtgcacaccaccatgcctgggtaatttttatatttttagtagagatggggtttctccatgttgccccggctggtctcgaactcctgacctcaaatgagctacctgcctcattagtctcagattttatcttttttatagagaatttattttcattctcttttttttggttagcattgtggagcatcggaggatgaggacacttaagatctgctctcttagtaaatttcaagcatgcaatatagtattcttaactatagtcacatgctgtacatgagatctccagaaacttaattttgttgcataactgaagctttatactctttgaccaacatctccccgtgtccccctccaccaaacattctctcatttttaatgataatgcatctagctgtgaatccccatgagttctgacacatgggtttgttgttgttgttgttgttgttgttgttttcaggtttctgtaatttaggtttttatttctcctttcacccaggagtttgttggagtttttttgttttgtttttgagacagggtcactctgtcacccaggctggagtgcagtggcatgatcatggctcactgcagcctcaacctcctgggctcaagtgatcctcccacctcagcctcccgattagctgggactacaggcacgtaccaccacactcaggtaattttttaatttttgtagagacggggtttcatcatgttgcccaggctggtcttgaacctctgggctcaagtgatccacccactttggcctcctaaagtgctgggattacaggtataagccacccccggcccacccatgagtttttggtttattaaatttacaaataaaaccagtaatctactgtattttagatcacagaggacagaatttcctttagtgtatcgacacgtgcattcatggtgtgctttatccttagcctcagtagttagtgatttgcctactagctggggtgagcacccaaggaagtagggcttttaccatggctgagtgtggatgagtggtattccatggggcataagactggcagcgacagccatggccttgggacaggtttgttaaactctgtttttgttaaaaacaggtgttgagagagaaaagaattcctccctggatggaagtggtccttatacccatgacaggaaaaccaagtctgtacccaggattgttcctttttaccactccttgtagactggtacggcctgtgcagaacttagcattgggcaaagaagagctaattggaactatggaacaggtaaatacatatgtgtgatggatgagtgtatgtgcttgtttgtatagtatacaactttcagagacttaactcttccttttttaaaagggttgttaatgttacaacaacagttggacatttgaaagaaagtcagactttccacctcctctatgatcagcacagagcaatttccatgtctgatctcactccacagaacctgagagagggctggtggtcacattacctgcctcccatcttatctagctcccagaactcctttgtacctggctctgcctcagccgtgaagtgaaaacattccattagattcacactcagtctttgcctacatatttacagttgcaaaattataggctttgtgctacttaaaaatttttcttcctattccccttcacaattggtctggggtagttttagagtgagatacgtaaagcaagtggtatttctaactggtcgcttccctgtgcttcccagttgatcccttcagcactcatgatgctgggtggggatggttttctcttgagtctttgagtactgaactctgagaaatggtaagagtaaatgtgtaaccagttgcagttattttgtgccttggacatctgctcttccagatcttcatgaatgtcgctatctttgaggatgaagtttttgctggagttaccacacaccaggaactctttccacacagcctgctgagtgtgattgccaacttcatccctttctctgatcacaaccagagtccacggaacatgtaccaatgccagatgggtaaggaagagggatgatgttacagtcacaatcaggaaag

SEQ ID NO: 24321 - DNA, 2300 bp, Homo sapien
gagtgacagcggcagaagaaaatctgagtataagtggaccagtacagtttaaatccatgttgttcaagggtgaactgtaaactgtttgatttaatgggcaacccacgcacccaagtggttataagtggtactacaaaatgtattataaaaataccgtagaattttttttttttttttgagacagagtcatgctctgtcacccaggctggagtgcagtggtgtggtctcggctcactacaacctccgcagcaattctcgtgcctcaacctcctgagtagctccaggactacaggtgcctgccaccatccctggctaattttttgtattttttgtagagacacggtttcaccatgttagccaggctggtctcgaactcctgacctcaagcgattcgcccacctcgacctcccaaagtgctgggattacaggcgtgagccactgcacccagctgaacacaatctgtaccttccatgtactgatttatgtctttgtctgtaactcctgtccacctaaaatgtacaaaaccaaactgtaattctactgtctcaggcacactttctcaggacctcttgagcctgtgttccccaggccatggtcactcatattggctcaaaataaatctctttaaaacatttcagtttggtttttctgttaacaggtggttaatttttcctagttctttaatgagatccctagaaaccgggtttaagacaattgattttttttttttgctttctcggtcagataatttcagaaactccctccctgtgcacctgtgggcattcccacttccacacaccaacaagacaaggttagacagatcttctaaggcagcttctaaggcctttcagcatgtcaaaatgcatctttggggtatccgtttctgagtaccaacaagggaacggaatgggttaagatttcattctctcagtagaggaaaatctagggattcattctacatttgaagccaaaaacagttatctgactccttccagagcctttaaatgttgatcccttcccctcttctcccatcaaacatacacttggaagtttaagaagaatggagggatctcaaggtgtaaagttttctttctgtgcgatgaccagtgctggtcctcggatgtcaactgccaaccagggtagctcatggttacaacctcccgtacagctctcacttatccagaactactgaggctccaagctcagtatcaaactgttcacttgcactatgtcctctatgatgtcactgtcatcatcattttacagacacactgcgactccaagtggtcgttactagttcacaatcaagtagctctcgttcatcttctcgttcatcttcaactctatgattaactgcaaaatgttctgctcattttgactagagtcttgaaagatctgcaaacgaaacggcaggactgatgctcagttctctgaccaggggatatccagtctcttatgtggggaaactcacgcccaggtctaacctcacacttttaagacagatgagaaggaagggggaaatgttgctacattaggaggaattaattacaaagagaggaagtaactagcttgatagtctcatggagtcaggattaaacgccatgtctgtcctggcgtacgctaagggatggggaaacgtctgggtcccaggctgggtaaatggcaggcccaagccgaattagttcggctcttggtttgactccctcttccctcctgttccaagcgctcgcatgaacctgggtgccagggggattatcagcgtctgcgcaaggccgatggtggcagcgcggcgttaggaatcaggccccctatccctgagcccaacagcctaccgctacagcacccaacgaaaatgggaacaacatgttgagacgctgcagcaacagcaggcgcttcccaccagctacagtcggagatttggagcgcttgtgtctgaggctcaatcccgtcaggtgccgcgcaactcagcggcgcattctctttggacccgaggcaccaccatactttccattgcttacttccgttaaaccccgagcgctgccatggcaagccggaaatagggatgaagcaatttagccagaagagggcggaagtggctactcagggcgccgccatgacgagccgggccggaagaagaggtagggcgccgccgtgacagattagtcctaaagggaacggggttgttagttcaattggctaccggaaaaaaccaggctgggctgggcgccgccatgacaaccgataccggaaaaggcgggtcgttccccccggacagccctacgccggcaaaggtctcgaga

SEQ ID NO: 24322 - DNA, 2300 bp, Homo sapien
tcccttaggggaggacgaaggtgtcccagccaaggaagatcctggtctccaagggctgtaccctactgatccggaggcaaagcagtgagggcccaccccaattcctcacctcccattctactcttcggcagaagcatctcagtgttggaaagataaggatttcttcctaaaaaggaaggattacactatatcagagtctgaagatacagttttcatttgcaacgcaagggaattcctttgaatctctaccttatgatttccctgcaaacccactccgatggggctggagagtgctctctcactcagatgaatctctcaggggttgtccagcaggtgtttgccaacttgaagagctacctactatcacagacctataaaagtacgcctgtggacagactgaaaacaaacaaacaaaacacacacacaaacacacaaaacaaccgcacactgggagaagttctaggcaatttccttgcaaataactgctttgaaaattactgttttaaattggcagaacactaaggactttgaacagatcatcccttttactcaatgttttcataaccttgaagtgaaggtggagggagcagtacgttttaaggtgccaggattacactacggggtcagtgctcccggatatgaactttctttttcagaccgaccttgggacctacagctttgtaagttactcatacaactccatcaaatgttacaggtaggtcagaggacattcaggttgtttaagcctctataaatgactcaggcagcaacaatttacaacgtctttgtttctgctatgcagtgccctcctgctagagatggcaaaaatgtggggagggcttcagagcattctaagcctggtatttctggctggaatttttaaatctcactacaatcctgacaagagaccacgaccttaatctcccacggcatgactggttagtcttgatcgtaagccatataatcaacacccaaatgtgcataacacatctaaataatgtcaaaactacactatataccacgcaggggaccagaaatcaatctttacctcaaaaggataagcttccaggatgcaataacatccccttccacccttttctacaccctaaaacagtaatattcacggtaacagcaaagcggaaatcagcttttcctgaacatgtactgaattctagtcacattcacacacgttaattcatttaattccagccacaaggtaggcagcctctgttaacattttacaattgtgagaacgcagagatctgggactggctcaaggtgacacactgcagcaaggagtcagaatttgaatccgaagcagtgtccttccccctcgcaacagctgcggcgttacaaacacaggtcagccacggagaaattaatgacccacagccatccttgcagctctgcgccataactggggagacaagctggttcccgtgactcttcagtctgttttcacccaagtgcatgactgcgggagcaaagcgaccacgtgagcatcccccccccacccccccgcttcccccaggcgagggacagtgccaggccaaggacaagtcacaggtgcaacaacgtgccagaactggatccggagccccagggcgcaagatctcccgcagcgtcacccggcagagggacgggtgtggccaccgggcgcggcaggtcctgcgtgcgctgaaagtgcggctggaggcgcggacggctttccggagccccgagagaggagctaggaatgactttggtcgcagcctctgtaaccccgcatgacggcctctagggggacagcgaggtccccctcgatctctggctgtaatcagccggcggggccagacggtgccgagactccagggcgaggccgcagggagggggctgtcccgccccacgtggaccggctccccgctgggggcgtggccgccgaagcgggccgggccaatgagcgccaccgtcgggctcacccggctgggcacgccgggccgaggagggctgcgtcatgccgggggcggggcttcggggccggcgcgaggcgcggcggggtcacgcgggtcgctgcgcgggctataagtaggggccggcggggtgctccgctggagtgatggctgccggcgctctctgcgtggttcttcttctcggccgctgaaacccccgcggctgcttcctgggaaggtcgtgagtcccgctgagctgtccccggtgccgccgacccgggccgtgtgcccgtggctccagccgctgtcgcctcgatctcctcgtctcccgctccgccctcccttttccctggtgagtagtggcgccgcctc

SEQ ID NO: 24323 - DNA, 2300 bp, Homo sapien
ctatgggaggcagagtcctcatctagaagcttataaactggttatgataatcagcacggcagagacccatttaactggcagcttagttaaaaaagccacaggggacactgtcttgaactccaagtttacgtattatattagcctgaatataacagtggtttaaacaaataatgtgtatacagctacacaaaaccacgcaaaataaatttccttatttttttgctcccagtttctcctacttcttggcacatcatagtattcaatttttccttcctgactgccctcttgagtattaaaaactcgctttcagagaactccacaacatacaagaaatgcacagaacaaagagctttttaaaattttccaaggccgcatacctatacaccaatcacatctgcaaaagtaccactgggtttgaaatcgattgggtgtgctccatgaaaggtcttcatacgggggagaaaggttaccttatggaggatgaatgcacgaaccaggaagaataaaattccagacataattccagaaagcagtggggacacgaaccaagacatcactggaatagaacacattaagaaaaaatatcaaataatgaaaatcagaaaccaaaaaccactttaaatgtttaagagttcaaaattcttgggtctgtccctcgacgttagaacacatcctcccatacctaatgccatggtaacatatgacgaaaacgaaaattaagaagccgtttggaattaaacataccaatttttatcagttcagaccacttgacaccctcctgcccctttgccacgagggagaaaccaatagttgcaccaacaatacaatgggttccagaaatagggagcttcaaaaacgaagccacgagttgccacacagcagaacctgaaacatagtaaagttttattaagtaaatatcaaaattccattatgtaagtggcacattcagaaaggttaatcggaaaggttatgcacaaaaatggaaccacccatgatacaaatttgctcacccaccacgaagaggacaaaacataaaaagaacttaccaaacatagcactgactgagccggccatcagcagcccttgagtcgagttgtacatctccacgtcaatcaagcccttccggatggtttcgctcactttggcccccagtaagacagagcccactgtttcaaagatgctagctaggatgcaggcttgcttcagggtcactacacctgagcccacagctgtaccaaaagaatttgctacatcattggctcccacggagaatgccaagacaaatgcaataatgaagcccaggatgagcatccataggtagtccaccaaaggaccagaagcggcggtagcagctgtagtactggtaatcagcgttgccattctctggagtagtggttgtttagtaagagaactactgagcgcctttcaagatgtgtaaacagaatatgaggtatcaaaaatgctataataaataatatatattatataaaattaaatactgtaaactacggcacagaaaccgagctggggagttactgctatacgctgcgtatgggcatctgttgtctggggtttctttggctcaggagggctaaaagcacggagcagaattccatggcggagaagagaaaggacgcaagttcatcctgcgggggaggggggaaataacaatagctgcgtgcccctggggggccagtggggcaccccgctctacccacgcgcccggggtcccgcaatagcctctgccggctactccagacccccatccccagtaggacgcgcgagaaggagaggcacgtggctccgggtcctccgcggcccgcgcgcgcccagcccagcccctgcgctgccagcccgcgcgcgccctccgcgcgaaaatcggaaaagggccgttcccgcgcgcgccgcccggggaccgccaaaaaggcccgcgggcgggcagacgggcggagtggaggcggccagcggcgaagagagaagccagccgcgccgcccacggcgtccgcctccagcgccacggcgtccgcgcccggccccggggagaagaaagagcctttacgaggcggcgccactactcaccagggaaaagggagggcggagcgggagacgaggagatcgaggcgacagcggctggagccacgggcacacggcccgggtcggcggcaccggggacagctcagcgggactcacgaccttcccaggaagcagccgcgggggtttcagcggccgagaagaagaaccacgcagagagcgccggcagccatcactccagcggagcaccccgccggcccctacttata

SEQ ID NO: 24324 - DNA, 2300 bp, Homo sapien
ttccattgtaaacagttctttgtgataaactaaaaagtctcccatgatgctcttaacactcattctttatgtggtagaagcaaagctcagagatgagtgaaattagaatcattttaaaaacagaaacttagatattttcgttgtgtcctttatggatcatttgtaagaaaaaccagtctctttcctttttgacttggaatgtagaccaacttaaattgtgatagacagtaatttcatgtatattttagtttgtgtgaccacatgatcaaaattgaaagcagaatttaaaatgaaaagatacatagtcaccatagaattgtagtttggggccgggcgcggtggctcatgcttgtaatcccagcactttgggaggccgaggtgggtggatcatgaggtcaggagttcaagaccagcctggccaagttggtgaaacctcatctctactaaaaactagaaaaactaaccaggtgcagtggcaggcgcctgtaatcccagctacttcggaggctgaggcaggagaatcacttgagcctggtaggcggaggttgcagtgagccaagatcgtgccactgtactccagcctgggcgacagagtgcgatgctgtctcaaaaaaaaaaaaaaaaagttcaaaaacaaaaaaagttttagttttgaagggacctcaatttgtttctaattttttttttttttttttttttgagacagagtctcgccctgtcactcaggttggagtgcagtggtgcgaacttgggtgactgcaaccactacctcccgggtttgagcgattctcctgcttcagcctcccgagtagctgggattacacatgtgcatcaccacgcccagctaatttttgtatttttagtagatacgtggtttcaccgtgttggtcagtctggtcttgaactcccaacctcaggtgatccacggacctcagcctcccaaagtgctgggattacaggcgtgagctgccgcgtctggccttgtgtctgatttttaaagattaatcattttggggtatgatagaatttccagtttataagtacaaacagtccctgacttcatggttcaaccttcagttatttgactttttgatgggtttataggtacataacctcattgtaagttgaggagcatctgtgatttcgtacataacaagcaaaataaagcaaaacaagcagaagtaactaagctattcctagatatcaactacagatcattataatatcttttatgggttttttttttttttttttaccttttttgtttttcagggatggggtcttgctgtgttgcccaggctggccttgtattcctgggctcagggtgttctcacacttcagtctcctgagtagctagagatcattataacatctgttagatttaaataggattgtatagtgctttacttcttttcgtttgtttttgtgacggagtttcgctcttgtcacccaggctggctggagtgcagtggcacgatcttggctcactgcaacctcgacctcctgggttcaagtgattctcctgcctcagcctcccaagtagctgggattatagaagcccaccaccacatccagctgatttttttaattttcagtggagacggggtttcaccatgttggccaggctggtcttgaactcgtgacctcaggtgctccacctgtctcagcctcccaaagtgctgggattacaggtgtgagccactgtgcctggccagtgctttacttctgtctttagtacaggctaatggtttggagcctactggcgtgcatatgacagtcagataatgactaatattactcattcttaaaccatgtgaacagtgttgctaggcaagtctttttttaaggtaagacttgtaagtgaaattaccactaaactttgtgtgtgagaaagacaaaactttttttttttttttttttttttttgagacaaagtctgactttgtcacccaggctggagtgcagtggcgcaatctcagctcactgcaacctccgccctgccaggttcaagtgattctcccacctcagcctcccgagtagctgggactacaggcgcccaccaccatgcccggctaatttttttttgtatttttagtagagatggggttttgccatgttgggcaggctggtctcgaactcctgacctcaagtgatctgcctgccacggcctcccaaagtgctgggattacaggcatgagccaccgtgcctggctgaaagacaaagcttttacaactattcttaaattatcaacttttgatagataatatccttgttttctgtatcttgctttgatactgct

SEQ ID NO: 24325 - DNA, 2300 bp, Homo sapien
ttcaagtgggctaggctggtgtgggttttcagatgatcattgagtttttctcccaaatttgtataggcactagcacagtaatcctgtgcacttaaatctggcagcagctgtcaggggtgatgggctggtatggggaacccctcagtccccagaggagggtttacacaatattgcagggggctgttgccctggggttttcaagatgcaccattttatctcctagtgctgggctttgacaaacttcctctgtggggtaccatcctcatctcggtgggatgtgcagttttctgtgcccttatcgtctggttctttgtatgtcccaggatgaagagaaaaattgaacgtaagtaataactaaacagcagaaaagtttaactactaatgttgtgtttattttttatttggccacctgtaaaaatctattagaagagattggcaaaataagagattttaaagggaaatttgaggatatgggtttgttgtccaaactgtttttagaaatggacttacatgacctaagacctgttcttaaaaatggacttacatgacctaagacctagtgataaagagtattcaacctatgctgtagagacaatctggggcattgaatttttttatgttccttgatcagttgccagtgacatgatagataaatagagaaatcatagcctacatttactgagaagtagaaggataccttaatgaaaaataaggggtagatacaagatattttcgtagaggaaatatttaccccaactgcttctgtgtataacttcagattcagacaagcaaagctaagtctaatgtgtacatgttgtatataggctagaatacatgtagacattgtattgcagtatacaatgcaaatacatatacaaacacacattgtgtgtctgctagaattgtagcacagattctagaagtaaacattttcaagtgtcaaggaatcatttaggccattaccacacactcatgtaattaaatactgagtaaattttggttagtatcggacttttttttccttaaaataatcattttctgcccttttcatcgatgtgaaggctgggttagcaagttgaagtttatcgtttcgaagctgagggatgcatagactgcagtggtgttaggaagaacgctgcgtcaccgcagctgaaccgaagagcctccgagaggttctgtgctagtctggctgtgccgagtgcacggtgggaaccaggctttcaggactctctggcctcattttccctctctgggaggagttgagacaagtcttgctttatgttagtcagtctgtagtttgactgaggtgcctggatggataggtcagcatactgagcactggcatgagagaggcagaagatactctggtctgcctgtgggatttacagccatgatgcacatctctttgttttatagaggtggaaattaaagttgtcgtctttagttccctgcattgagctgtgccactttgcttgaattggtggactgaaatttgagagaatcctcttttgaaaagaatagaattgggtacagttcagatttttagtttcagcttatcagccccatggttgagctactttcccctacagaatgagtcagcagggagctaagaagggttcttatatctgtaaagggttgtaaaaataaaaacaaaacaacaatgtgctacagaagcccgtaaaacctaaaatatttacagaaaaattttgggacccctgacatagggtgttctgcattgctggttgttcccaagtgagagttgctggcaaatgataaagcaggcaggaaaaatgttcctgaatgttaattgaagttcacatacattcttgttttgagatgagttttttgggggtggaggaaaggagacgtggaacaaagtagtatggccacaaccaaaccaaaaaagaccccccttttttttcctaggagaaataaagtgtagtccttctgaaagccccttaatggaaaaaaagaatagcttgaaagaagaccatgaagaaacaaagttgtctgttggtgatattgaaaacaagcatcctgtttctgaggtagggcctgccactgtgcccctccaggctgtggtggaggagagaacagtctcattcaaacttggagatttggaggaagctccagagagagagaggcttcccagcgtggacttgaaagaggaaaccagcatagatagcaccgtgaatggtgagttggaattcctggtttcacttttgttacctgcagtggtgaggaggcttattgttttggatttgatgctttttgtattgaatgtcaccttggtgatcttg

SEQ ID NO: 24326 - DNA, 2300 bp, Homo sapien
agataacttttatccttttaagagtgccaccttcatttagtttagtttagccattttagagagaaagtgctgaaaccgactgtaaacttgtctgtcttttttttttttttttttttttgagacggagtcttgctgtgttgcccaggctggagtgcagtggcacgatcttggatgactgcaacctctgctttctgggttcaagtggttctcccacctcagcctcctgagtagctgggattacaggcatgcgcaaccatgcctggttaatcttggtattgttagtagagatggggtttcaccgtgctggccaggcttgtctcaaactcccgacctagtgatctgcccgccttggcctcccaaagtgctgggattacaggtgtgagccactgcgccaggcccttttctttcttcctttccttttcttcatttcctttcctttcccttccttccttccttccctccctccctccctccctccctcctttctttctctttctttctttcctttctttctttctttttctttctttctttctttctctttctttctttctttctttctttctttctttctttctttctttctttctttctttctttctttttcttttcttttcttttcttttcccttccttccttccttccttccttctttcttcctttttctttccctttttattgacaggatctcactctgttgcccagcctggagtgcagcaatctcggctcattgcaacctccaacccctgggttcaagcaattctcctgcctcagcctcccgagaagctgccaagaggctaattttttttttctcctgcctcaggctcccaagagggcaattttttttttcttcgtatttttagtagagacagggtttcaccatcttggccaggctggtcttgatctcctgaccacgtatccacccaccttggcctcccaaagtgctgggattacaggcgtgagccactgtgcccagccttgtctttctttttaaaagagggcctggcacttcagttaagtctttctggatgatccaggtcaccgctccaaatggaagtcacatgcttggttgtggagccagtggtatgggccctcagggagtatttagaactctacactaaatggccccagtggttctgctttttgacacttccttttgtactttctgccacccccccattctgagatcccagttatcttcccaattcttatagcccttggcatgcttctagcaatgtcttctctaaatggccttgagctgggaaatttgataaccaaatgtgtcagaattgtgcataaagcaagagtactgagttatttcttttatcatgagtacagtacggagcctcctgactttgtatcccgtcatttgcctcattctgggttctccgctactctccaggccgctgaggtccatggatgcataagccctaggaatgaggagggtgcagtggacatgaattgctcttcctagatccttgctgcttttgctctagagaaaaggatgggataccagagcctgtcctggctgactcctccctcaaaggggctcgggggagatgggagcacagggtggggccagctgggtcagtggtgcctgaagcttctgagggagaggagagtggctgggccccactgatagtgtgcaggaggctgaggaagggacacttgcctcctcctcactctgggtgacgatggccagtgtagactggagagagccggagggactggtctcccctcaaggcccgaagcaggactggcaccagcggtgagatgggcacctggggtgggggccaggggtctcagcccataaacaccccacacgccacagcagcacacaggggctcctttaaatacacagctatggggactcccaaaatgcagacgtacacttgcactcacaagggacgcacttccatagctgtaacaacccatcagggaactgaccacacacactccggcgggaggtcctcttcacttccttccctccacgaagatctctccccttcaccacggacacagtgacatgtgctatccaattgtgacaaacacatcatctctgaatttggacactggggtcccatttcagaaggtgacaaccctcacaccaacaactgcacctactttcttacagggttggatgcctataacatgcctgcatggtgggacagcaagcggctgattgcccgcacacactcagatgcacgcttgcacacatgctcacacatgcttacatgcacactcacacttgccttcagacacacatgggtccaggcagggccctggcttggcctgacctg

SEQ ID NO: 24327 - DNA, 2300 bp, Homo sapien
ttgctgcttttgctctagagaaaaggatgggataccagagcctgtcctggctgactcctccctcaaaggggctcgggggagatgggagcacagggtggggccagctgggtcagtggtgcctgaagcttctgagggagaggagagtggctgggccccactgatagtgtgcaggaggctgaggaagggacacttgcctcctcctcactctgggtgacgatggccagtgtagactggagagagccggagggactggtctcccctcaaggcccgaagcaggactggcaccagcggtgagatgggcacctggggtgggggccaggggtctcagcccataaacaccccacacgccacagcagcacacaggggctcctttaaatacacagctatggggactcccaaaatgcagacgtacacttgcactcacaagggacgcacttccatagctgtaacaacccatcagggaactgaccacacacactccggcgggaggtcctcttcacttccttccctccacgaagatctctccccttcaccacggacacagtgacatgtgctatccaattgtgacaaacacatcatctctgaatttggacactggggtcccatttcagaaggtgacaaccctcacaccaacaactgcacctactttcttacagggttggatgcctataacatgcctgcatggtgggacagcaagcggctgattgcccgcacacactcagatgcacgcttgcacacatgctcacacatgcttacatgcacactcacacttgccttcagacacacatgggtccaggcagggccctggcttggcctgacctgcttcccctgtgctttctgcagctgcagggggtgctctgccctcctctgcggggtttccaccccctctgtccttgggccttggattctggggggctggtggactgatgccaacatcctcctctctctccccaggatttttgtcaaccgcagcctggcgctggggaagattcgttgctttggcttcgacatggactacactctggctggtagagagggctggaacacagcgtattgggagctggagggagcaggggtgggcagctgggcaccaaagccctgattctgtccgggcctctgcagcctacaagtccccagcttatgaggccctgaccttcgagctgctgctggagcgcctggtgtgcattgggtacccgcatgagatcctgcgctacacctacgaccccaccttccccaccaggtgtgtggctcaggacaggtgggaggccacccggccttggtacccccacccacagtgccccccgaccccccgtctgcaggcggctggtgttcgatgaactctatgggaacctgctgaaggtggacgcccacgggaatgtgctgctgggtgcctatggcttcaccttcctctcggagtaagggacaaaggtgccgggagagtggcaggccaggaggggaggactgctcaccttgggggaggacagagggagggagggaggaaggacgcaggcccacggtggaggctcagcacagaagggatgcgtggtggttggaagggatggccagagcctggacaggcctccaggaggcactggggaggggtcattggctgcacccagcctacccctcctcagggcagagatctggagcttctaccccagcaagttcattcagagggacgacctgcagtgtttctacatactcaacatgctcttcaacctgcctggtgggtggagggttgggggcacgggaggtggtcctgagttccggagctgagggtcccagctctgtcctggtggagaactgtctggctccctgggctgacaactgaccatcctgtctgcccccagaaacctacctctatgcctgcttggtggacttcttctctggctgctcccgttacactaagtgcgtcttgtgccctgcccagccctgggacgaccagtaggacactgctcagggaccaaaccccaaagaggggccccccaagggctccccaagaggctggaagggctccaggaagctcagtgggaaggcctctattgcaggctagcacacacccttagctctgggtgatgcccctcccaggatgtctgggacataagcccagtgaaggccccagtgtggctggtggggttgctctggtgtgggactcagggttggaggtcatttcaggcccccttattggcctccccgtcccctctttgcctgccccagttgtgacaccggctatcagcatgggaacctcttcatgtccttccgaagcctcttccaggatgtgactgatgccatgaataaca

SEQ ID NO: 24328 - DNA, 2300 bp, Homo sapien
cctcagcttcacaaagtgctgggattgattacagacataagccaccatgcttggtagagttgagaatttttaaacctgcctagctattttcccacattttgtgtcctacaaaatagaccgtcaaatacccaaaggatggaaaaaaacgaggcagaactggcctatgttgctccaaaggactaggaccagtaagcaaggaagctcatttgagttcattttaagtttcctaataagcaggggtctccaataacaggacaggtaaggcagctcaccaacaccagcagtatacctgcaaaggtgcagtacctacatggggtctgtggaatactccagcactgcgtgggatatcaggcaaggtgacttctacaactgacatgcattcaaccacctagattctacaaagaccaaaacaaaaccgccttcacttttctgaaactgttggtgaaggagtccctttctcagtcattaacaaaaataatgatcagttttcctattttaaacatttaatacactattgaaaatatcaaaatgcataaatccagaaaccctggctctcttccaaactccctatttacggctaaagagaagggctgctgcagtggcttcatgccctgctgagtacccaactggtaagctgaacctggccaacaggtgcccagatatgactgcccctccacacacgacttctccagcatccatggaagaggaaccttcatacacaaggagccaaaagcattttccagacctctttaagaaactggagaatagatgaaacaggacaaacttcaaaagaaaaaaaatttaggattaaaacaaggggaatgaagtgtgtctagggattcaggacaacgaggcctgcgatctcctagtaactaggagaaactaggcctgcgtttctccgttagccttatggccttatagtcagctgatcaggtgaaatcgaaaatataccttgaacaagagatcaccgtgagaggagtaaggcagtttctcaaaaaattaaaaatagaattgccgtttgatccaacaataccacttcgtggtatatacccaaaagaatgaaaaggagagtctcaaagagttatttgtgcattcatgttcatattattattcacaatagccaaaaagtggaagcaactcaagtgtccggagagggatggaccaagaagcaaaatgtggcatctccacacaacgaaatgctattcccccttaaaaggaaaggaaattctgacacatgctacacatggatgaaccttgaatactttatgctaagtgaaacaagccagtcacagaacaaatactgcatgattctacttatatggcacctacagttgtcaaatccatagagacagaaactagaatggtgattgcctggggctgggggagggaggagtgcggagttagtgacgggtacagggtttcatttgggaagatgaaaaagttctggaaaggacagtagtggtggctgtgccacaatgtgagggtacttaataccactaaactgcacatttttgaaaaatttaacactttaaaatggttaaaatggtatatgtgatgttatgcatattttaccacaattaaacgagccaccctgcagtactaagaactaggagcctttagatgcataagacccatatgtcctctttataatattattttttcacagctcctgtgagtctgagactttgaaaggacagaatcaggtagcggccccagcatcctgggaggaccgccctgtctctccgcccagggactcccggcgcgccaaccccagctggattcagcgtaaccgccccccaaccaccagcccggctgaggcccccacggagggtcccacgcccactcggaggcgcactcacaggcgcactcagaggcgggcggcgccgcgccccgaggaagccgccctcaatgccgaggtgcgctgcacgttcttccaatcaaagggccccaaggtcgggttctcaaggccagagccaaccgcaaagagcctattgcctgttgtcccgccctcccgtgctgacgactagcgagtttcaaacccgcaggagccaatgaggacgcgtggacgcgcggcacgccggtcctggctacaggcgcggcgtttgaagaaaaactgtcactgaagagtcatggtggggcccgggcctaccgctgctgccgctgtcggtgagtacgaccgctgttcccgttattctcaggcgttggaacacggccggggaagtaggaggccaccgagtgagttcgtcccgcgggaggtgcccgtccgctcgcctgcctaagtttcccctgggcgttttcca

SEQ ID NO: 24329 - DNA, 2300 bp, Homo sapien
gttatttctgtggctcctgttataactattatagcaccaggtctatgaccaggagaattagactggcattaaatcagaataagagattttgcacctgcaatagaccttatgacacctaaccaaccccattatttacaattaaacaggaacagagggaatactttatccaactcacacaagctgctttcctcccagatccatgcttttttgcgtttattattttttagagatgggggcttcactatgttgcccacactggactaaaactctgggcctcaagtgattgtcctgcctcagcctcctgaatagctgggactacaggggcatgccatcacacctagttcatttcctctatttaaaatatacatggcttaaactccaactgggaacccaaaacattcatttgctaagagtctggtgttctaccacctgaactaggctggccacaggaattataaaagctgagaaattctttaataatagtaaccaggcaacaccattgaaggctcatatgtaaaaatccatgccttcctttctcccaatctccattcccaaacttagccactggcttctggctgaggccttacgcatacctcccggggcttgcacacaccttcttctacagaagacacaccttgggcatatcctacagaagaccaggcttctctctggtccttggtagagggctactttactgtaacagggccagggtggagagttctctcctgaagctccatcccctctataggaaatgtgttgacaatattcagaagagtaagaggatcaagacttctttgtgctcaaataccactgttctcttctctaccctgccctaaccaggagcttgtcaccccaaactctgaggtgatttatgccttaatcaagcaaacttccctcttcagaaaagatggctcattttccctcaaaagttgccaggagctgccaagtattctgccaattcaccctggagcacaatcaacaaattcagccagaacacaactacagctactattagaactattattattaataaattcctctccaaatctagccccttgacttcggatttcacgatttctcccttcctcctagaaacttgataagtttcccgcgcttccctttttctaagactacatgtttgtcatcttataaagcaaaggggtgaataaatgaaccaaatcaataacttctggaatatctgcaaacaacaataatatcagctatgccatctttcactattttagccagtatcgagttgaatgaacatagaaaaatacaaaactgaattcttccctgtaaattccccgttttgacgacgcacttgtagccacgtagccacgcctacttaagacaattacaaaaggcgaagaagactgactcaggcttaagctgccagccagagagggagtcatttcattggcgtttgagtcagcaaaggtattgtcctcacatctctggctattaaagtattttctgttgttgtttttctctttggctgttttctctcacattgccttctctaaagctacagcctctcctttcttttcttgtccctccctggtttggtatgtgacctagaattacagtcagatttcagaaaatgattctctcattttgctgataaggactgattcgttatactgagggacagcagaactagtttcctatgagggcatgggtgaatacaactgaggcttctcatgggagggaatctctactatccaaaattattaggagaaaattgaaaatttccaactctgtctctctcttacctctgtgtaaggcaaataccttattcttgtggtgtttttgtaacctcttcaaactttcattgattgaatgcctgttctggcaatacattaggttgggcacataaggaataccaacataaataaaacattctaaaagaagtttacgatctaataaaggagacaggtacatagcaaactaattcaaaggagctagaagatggagaaaatgctgaatgtggactaagtcattcaacaaagttttcaggaagcacaaagaggaggggctcccctcacagatatctggattagaggctggctgagctgatggtggctggtgttctctgttgcagaagtcaagatggccaaagttccagacatgtttgaagacctgaagaactgttacaggtaaggaataagatttatctcttgtgatttaatgagggtttcaaggctcaccagaatccagctaggcataacagtggccagcatgggggcaggccggcagaggttgtagagatgtgtactagtcctgaagtcagagcaggttca

SEQ ID NO: 24330 - DNA, 2300 bp, Homo sapien
accatgactcaggttcacatccggattccaccactaaccatgtacccaattacttcagtcaccttcattcaggtcttacatatcacagaataaaatcagatttcatcagaggaggtgaagacagggagaggagatatttcaatcccttctccgcaacccccgttttttttttttttttaacaaggatcctagagttactgaatgatagcacgtttgagggggaaagaccctaaggatgatctttataagccatcacttggtgttggtggtgataagagactcgagtatctttatgcagtggaaagagaagattggactcggaatcagaagcttgagttcaagcactggtttcatcagtcttgtgatcttgggttggtcacttaacctcttcaagggtcctcagctgtgaaagaggatagtatcagctaattcttgtaggtgcagtgaggaggcagtgagatagtgcaggtaaactataaaacaattgtcacatgaaacgcatcacagtgattctttggacccacaagctccaatcttataaaacatatccagtcacccaccaacatagatcatctcaccttgcatatctgattttgtggatcatggggaaaaactgctgattcctagcaaaacccatggcataggataagtgcacaataatttttttttcctaaatgatttagatgacagtgactcattaagggtttcctgaggcctcctcagagtcgagaggtgggtgcctgaagccacccaaagtccctgtcacaggatggctcccaacgcacacaccacaggcctgcccagtatgttccactatctacccagtagagccctgcccagtacgttccactgtcccttccctagaagaggtgactgttgttcacagtcccagaaaagcgggctccccaaaacaatgcaaggacccacctctctctgaacctcacccaccctagttttcctttaaaaatcaatttacaagaagatcatgtgaaggaaaaggttgggtgatattctaacccaagttagctgtttctcaaccaagttctctttgaaaaattcaacaaccacctttggggaattatttacaacagaggagtgaggatgggaccaggataggtattgcctatgttggtggaaccagggtttttttcctggattaccaaagagatggtatgcattgctcccagaagctaaatatcttcaggctttcaatggtggccttcacctgaaaatgttatccctgttgaagctttcaagccagtattttcataagaactatattttctttggtgaactgaggcattataatgatgactatacaggttcttgagtgactgaagccatcattagcattgtcattatttttgtttagttgcatctccatagcagctcacattcacaatgtgctttgcaattgttccttagcaatagccctcacaagattctcaggaggagagggttaatcaggattaacatttctgtgttgcctaaagaggaaccaaggtaagcagaaatgtagccagttggctggcatcactgttgcttcaggattcatccttagacacccaagcttctaccctagtctggtgctacacttacattgcttacatccaagtgtggttatttctgtggctcctgttataactattatagcaccaggtctatgaccaggagaattagactggcattaaatcagaataagagattttgcacctgcaatagaccttatgacacctaaccaaccccattatttacaattaaacaggaacagagggaatactttatccaactcacacaagctgctttcctcccagatccatgcttttttgcgtttattattttttagagatgggggcttcactatgttgcccacactggactaaaactctgggcctcaagtgattgtcctgcctcagcctcctgaatagctgggactacaggggcatgccatcacacctagttcatttcctctatttaaaatatacatggcttaaactccaactgggaacccaaaacattcatttgctaagagtctggtgttctaccacctgaactaggctggccacaggaattataaaagctgagaaattctttaataatagtaaccaggcaacaccattgaaggctcatatgtaaaaatccatgccttcctttctcccaatctccattcccaaacttagccactggcttctggctgaggccttacgcatacctcccggggcttgcacacaccttcttctacagaagacacaccttgggcatatcctacagaagaccaggcttctctctggtccttggta

SEQ ID NO: 24331 - DNA, 2300 bp, Homo sapien
gagaaagaaaagagaaaagaaagaaaaagaaagaaagagagagagggagggagggagagagaaagaaagaaagaaagagaaagagagaaagagagaaagagaaagaaaggaagaaagaaagaaagaaagaaagaaagaaagaaagaaagaaagaaaagaaaagaaagaaagagagagagaaagaaaaagaaagaggaaggaaggaaggaaggaagaaagacaggctctgaggaaggtggcagttcctacaacgggagaaccagtggttaatttgcaaagtggatcctgtggaggcaaaacagaggagtcccctaggccacccagacagggcttttagctatctgcaggaccagacaccaaatttcaggagggctcagtgttaggaatggattatggcttatcaaattcacaggaaactaacatgttgaacagcttttagatttcctgtggaaaatataacttactaaagatggagttcttgtgactgactcctgatatcaagatactgggagccaaattaaaaatcagaaggctgcttggagagcaagtccatgaaatgctctttttcccacagtagaacctatttccctcgtgtctcaaatacttgcacagaggctcactcccttggataatgcagagcgagcacgatacctggcacatactaatttgaataaaaatgctgtcaaattcccattcacccattcaagcagcaaactctaccacctgaatgtacatgccaggcactgtgctagacttggctcaaaaagatttcagtttcctggaggaaccaggaggagcaaggtttcaactcagtgctataagaagtgttacaggctggacacggtggctcacgcctgtaatcccaacactttgggaggccgaggcgggcagatcacaaggtcaggagatcgagaccatcctggctaacatggtgaaaccctgtctctactaaaaatacaaaaaattagccgggcgtggcggcaggtgcctgtagtcccagctgctggggaggctgaggcaggagaatggtgtgaacccgggaggcggaacttgcagggggccgagatcgtgccactgcactccagcctgggcgacagagtgagactctgtctcaaaaaaaaaaaaaaagtgttatgatgcagacctgtcaaagaggcaaaggagggtgttcctacactccaggcactgttcataacctggactctcattcattctacaaatggagggctcccctgggcagtaccctggagcaggcactttgctggtgtctcggttaaagagaaactgataactcttggttggtattaccaagagatagagtctcagatggatattcttacagaaacaatattccacttttcagagttcaccaaaaaatcattttaggcagagctcatctggcattgatctggttcatccatgagattggctagggtaacagcacctggtcttgcagggttgtgtgagcttatctccagggttgccccaactccgtcaggagcctgaaccctgcataccgtatgttctctgccccagccaagaaaggtcaattttctcctcagaggctcctgcaattgacagagagctcctgaggcagagaacagcacccaaggtagagacccacaccctcaatacagacagggagggctattggcccttcattgtacccatttatccatctgtaagtgggaagattcctaaacttaagtacaaagaagtgaatgaagaaaagtatgtgcatgtataaatctgtgtgtcttccactttgtcccacatatactaaatttaaacattcttctaacgtgggaaaatccagtattttaatgtggacatcaactgcacaacgattgtcaggaaaacaatgcatatttgcatggtgatacatttgcaaaatgtgtcatagtttgctactccttgcccttccatgaaccagagaattatctcagtttattagtcccctcccctaagaagcttccaccaatactcttttcccctttcctttaacttgattgtgaaatcaggtattcaacagagaaatttctcagcctcctacttctgcttttgaaagccataaaaacagcgagggagaaactggcagataccaaacctcttcgaggcacaaggcacaacaggctgctctgggattctcttcagccaatcttcattgctcaagtatgactttaatcttccttacaactaggtgctaagggagtctctctgtctctctgcctctttgtgtgtatgcatattctctctctctctctctttctttctctgtctctccctctccttccctctct

SEQ ID NO: 24332 - DNA, 2300 bp, Homo sapien
ctttccttcactctcctctgttttctatacctgtattattggactggactggaagccacctgatctatcacaagtaccttgaaatgtgttgaataggtgtggcacagtccttagcagagtggcactacccccacaggaatttgtttataccgttggcatggaaaatagcaggaaatgagtgatcactgataactgaggatgctatttattattggccaaaggaatacttgtgttgtatttgcataaccactcacaaactgttgattacaaatgagtaccagacctagctccttcaagtaaaggatcctgagaactgaaggcaaacagagctccaggagtccaagacagagccacagaccacgaggatccctggcccaggtaggtggtcctcctgcactggctttcaaggccaacaggatggatggggaagtagagtagcatctggccatctagacccttgctttttatccccactggaagcacatctgaatttctaaatatgatctctgagacctgcccagaacaccttgctctcagccccagtagcagcctgctctctcccaggagggcttccactaacaagtagggcattgctggagggccaggcagacactagcttaggaaatccaccaaccctggaaatgctagtcccttctctgaaggctcagaagactgactttagagtctagaaaatattggtccttgggaacagattttgagtgcaaagagatggacttcagatggccagatgcactgcttctttagggaattctgtgaaagctccctgcatttatcttaatacaggcagcagatttcatgagtacccccgagggatggccccaggtcctccagcctgtgagcatccttctgtccttcagcagcaccacagtatctttatatgtctttggatacctacgtttctgccagacatctcttgctctgatgttctggctgccaaattctctgtcaagcgcctccaattttttgtgtcctttgatttaccccaacatgacaaaggcagttgtgcttcatgtattcagggatactgccaaaccacaaacaggttaaaatcaaatagcagatatccctgttcctaaagacccatcagctctacccacctgctcctgctcaccgtccttattgttgagtcctgaagcccttccttgtcatttttattttttgcatgaacaatttagttccctttgtctcactcctaaacctttctcaaaggattggatttgtacacaaactgcctatctctgcaatcttagaagtgatatgattctgaacaaatcacttaacttttgattttttatcggtaagatgggaataccaatttttgctccacttctgtcctatgttggcctgggctgatgttgaaagctctcggtcaactgagatagggtgtgcagaatttatatatataaatatatctcctccaacccctcccaatgaagcaagtcacgtgagtcaatcctaccctaagatattagggattgagcctcctgggacatttggtggcttaggttttcatgaaaagaggttgcagagcaactgctttttgttaggcaaagattaggctactgcagagactcagcaaacttctatagaaggtgtcagatggtaagtattttaggctttgcttgccagatgatctctcaactagttaaccatgctattgtagcctcgaagcagccagagacaatatgtaaacaagagcatggctgtgtttcaataaaactttatttaaaaaaacagtcagggaccggatttggccaaaggccatagtgtgccagccccaagactagagcaatgcacttttaacttttttattttatttttgtaaaatgccaagatccacaaaaatgctattgcaccccgtgtgttagcactgtgactcaaggtttgggaaattctgctttgaaggcgtgatagacaggagagcatggtctggccccttggtgcctttctggttgcagcgagcatttcaaactacagagcaaggccagtggtctgttcagcactagagacatgcagcaaggtgtcctggggtgagaagatgccataactggtcccctttctatctccttaggtcttggacttcattccattttctgttgagtaataaactcaacgttgaaaatgtcctttgtgggggagaactcaggagtgaaaatgggctctgaggactgggaaaaagatgaaccccagtgctgcttagaaggtaaggttcttgtagaaatctacctcagggccaaagtgtaattcctagagcagaactttgctaggtgctgtgcaca

SEQ ID NO: 24333 - DNA, 2300 bp, Homo sapien
aggtaaggttcttgtagaaatctacctcagggccaaagtgtaattcctagagcagaactttgctaggtgctgtgcacagacccagttgtttcctgctgacttgcacagtaagtgagctttcaaatttccctggacaaataactagacaagagaaattctggaagggaaaaggaagctttgcttcagtgtccaggcacatcaggtagtagataaaaggatcgtcctcacctacagatttggggctttagcatcctgtttgccaactggatggttgcatatgcttcaaaatgcacctcttccctcccaacattcccaagtggaagagaagcctccgatgagaagcagctctctaaggctgggctgaacaaatgacccaggcacagggcatctgagtattccatgaggaacacatttgggtgttgcccatgggggacaataggaggaggcttttgacccaaatgattgtctactgaggtgtgacgggagaggcctgtgacatgccagaggccaaacccgtgatccagttcatctctattctatgtttctgaagagggaagctatgatttaatgtcattactatcatgctgctctagtatttctcagcacatacacagaagagggaattaaatggtctttgatacccctaaatccttggaaaatccgaattgcatatgctaacctcactgcgtctgactgcagacccggctggaagccccctggaaccaggcccaagcctccccaccatgaattttgttcacacaagtaaggcctcggggtgaggtgatgggggtggctgaggtgcgagggtggggatgggggatggagccattgggtcctcttacagggtgggagaattgtagaatggggacacctaagggtgctggatggggctgaagtctttcctttgtggaagcaaatcccattaggagataactctgggaaagatgagcccggggaggggcaggtgatgctcacctgctaagaggcacagggcaaggaagagtttgtgcctgggaaccttccaggtgcctcttctgaccatagccaagagactggagacacagacctcctcccagcactgaggacaaacagccatggggccagtgggggtgcagggacacccacaccactaagggctcagggcggcgccttcagagcctgaaccttcctctcatgctgccatttgaacaccacaacaccctaataggaaactgttaacattgccactgttcaggtgtggaaaccgagacagacagtggagattccctgccctaggtgacacaggtaataagtgacagatgtggaaatttaaaggtactataacgtctgtctgcctgactcaggcttaaggctcccatcacctcctcttctcaggacagagtcaggaggcctcagcctgagccccagctctagtgcaggttcatgtgggaatactgagcctcactagtacaatggcagagaggaccaaatgggaccaggtgtgtaagggtgcctggcacagttgggggaggctgctgtcacttctccaccgctgctgctgcagttacctttgatgttttagttttgttgtagttacaccattgctggctttggatctgcactgtgtccactccaggtggaaccacgcacacaagcctctctgtcgggcctgtcctgacttctccttgtcagggctgggatctccttcaaatctggcggaagtggttctccaagtctggtcctcaaacgtcagcagcatcagcgcctagaagtgttaggaatacacattcccaggccccaccacagacctcctgcctcagaaactcagggcgctgaggctctaggggctgctttaacaagacttccaggttatcgtgacgcaccttgaaagtctgagagctactgccctacagaaagttactagtgccctaaagctggcgctggcactgatgttactgctgctgttggagtacaacttccctatagaaaacaactgccagcaccttaagaccactcacaccttcagagtggccttgagaaagatttggggtcaaggatcatgagcgagaacaccacttaagaggatagtgaactagtctgcatgtgagacgctgagatcctatgtcaggctgtgataggagggaaacagaaaccaaaggaaagaacagctttaagaagcgcttaagaggtacaaagtaaaatgatggtgctagaaaagtagcttcttaaaaagagcattttccagtctcaccctggactaactgaatgagaatctcaggagtgtgaggcccaggtatccatggtcttaaaatgccacccac

SEQ ID NO: 24334 - DNA, 2300 bp, Homo sapien
ttataaccagaatcaatattgatggttttctcaagtacagccagggtatcatgtaattataacatccatcccttccactttaagataaacgttcggggccatttcttcagtagatgtgatctctgctctttactgatcaaccccagtgattcagttctccccttttatcatcatcactcctactccctccaatttctctgatacttattcacactaacagttaaactagggacttcaggatggatgctgagtgctgggaattctaggaagggctggattctctgagtgcttggaatctattgaagggtcaggaccaagtggaatgagggcggaggctgaagaggacacatgtcaccctcttttatagtttttgcaaccttcatctgggcgtgggaagttctagctgtacccacaggcttttgaaccaaagaaaattcagctgttagagctgtgtcctgtgagtcctctgagcatcctcttcttgacccctcccctccaccttcatgctccaagcattgaccagactgtactctcttttcagaggtctgagcatcaatttggcagagaacgcctcacctccgactcatatctggggataagtcctacaaaagcgctcctttgagacctaggttcttttgttcccttttgtttccttcctgtagttgttactatctgagataccacagcaatcccttaatcttctttggctttccaacacacgtgtatctagttccttttattcaattccctttgtttgcaattcctagcatggattctgctttcagagggatcccagttggaaattcaggcttaagggatttggggggtcaaatgatgggaattttagatgctgttttgtggtgaacatcccaagaaaggagttatgttgactgatgtgtaatggaggggatttttaacagggcaatggagactcaagtgaggtggcactggctcaggttgactttgaacaaaagtgcacctggcattaccacactctttcctagggtcacagaaacactggaagccaaaagtgatagaattggggccatggcaggaaaggactgtgttcttccaaggccagaaaggagattagggtgaaaagtaagagacgttgagtcaggagactctttgcagggctgggaagaggggctcatggatgagcttatctggaaggttctgtctcattctttgtgcttttcttccttatagatgggtaaacctgaagctgttagtgcttcaagtctgtctcctaaaactcacttcactctagtagttaacttatacctcagtaaatttttaggcttggctacagcagataggatggggtgtataaacaagatataaaaataactattaccactgatcaggaacctagggcagagggtgggggataagctggcatctggggctcagatttgggagaaatcgctgcccacctctttacttccttaggcagttctggagtccactgcattttgagggtacctgaaactaggattgcctcagttaaaagaccagtctgcatagtccctgtggctccccatgtggatggagctgaaagagtgttaggtaggggagctctactgcctggctttccattcaggtgtggccttaggtggggtagttgagaaatgccacagggaccttgcctgagacgtgtggctaattttgctcttacaggatgcctttagcctgactgcagagggcaaggctcccagtcccaggagatggagtccctgacatgagagtgcctggcatttccagttctagctctagaatgacatgacaggagagctgaactctgggaaattcccttagtttcccctttatgagaaacctaggatctgtcatcaacctcatttccttgtggttgattttgtgcggattggctcaacacttatttctcagcgagcccggacaggtgatacttgtgctaattctgtgatttcttcctccgagcctcacaggatcttctggtaggaggagctggttttctttcatgtcatacgtttctcatgccccacccaggaagctggagcctccttctctgctcatccagataaatgatccaggctccattagaacccatcactgaccttggaagctgctggagccacgattcagtcccctggactgtagataaagaccctttcttgccaggtatagtcaatagctggaaaacctcttctccctccctctggagcctttcctctcatctgtgctttgggcttaatgaagggaagggccacatcaggctggctctgtgctttgtcctatgtgtggctgcttcttactgggga

SEQ ID NO: 24335 - DNA, 2300 bp, Homo sapien
agtcctacaaaagcgctcctttgagacctaggttcttttgttcccttttgtttccttcctgtagttgttactatctgagataccacagcaatcccttaatcttctttggctttccaacacacgtgtatctagttccttttattcaattccctttgtttgcaattcctagcatggattctgctttcagagggatcccagttggaaattcaggcttaagggatttggggggtcaaatgatgggaattttagatgctgttttgtggtgaacatcccaagaaaggagttatgttgactgatgtgtaatggaggggatttttaacagggcaatggagactcaagtgaggtggcactggctcaggttgactttgaacaaaagtgcacctggcattaccacactctttcctagggtcacagaaacactggaagccaaaagtgatagaattggggccatggcaggaaaggactgtgttcttccaaggccagaaaggagattagggtgaaaagtaagagacgttgagtcaggagactctttgcagggctgggaagaggggctcatggatgagcttatctggaaggttctgtctcattctttgtgcttttcttccttatagatgggtaaacctgaagctgttagtgcttcaagtctgtctcctaaaactcacttcactctagtagttaacttatacctcagtaaatttttaggcttggctacagcagataggatggggtgtataaacaagatataaaaataactattaccactgatcaggaacctagggcagagggtgggggataagctggcatctggggctcagatttgggagaaatcgctgcccacctctttacttccttaggcagttctggagtccactgcattttgagggtacctgaaactaggattgcctcagttaaaagaccagtctgcatagtccctgtggctccccatgtggatggagctgaaagagtgttaggtaggggagctctactgcctggctttccattcaggtgtggccttaggtggggtagttgagaaatgccacagggaccttgcctgagacgtgtggctaattttgctcttacaggatgcctttagcctgactgcagagggcaaggctcccagtcccaggagatggagtccctgacatgagagtgcctggcatttccagttctagctctagaatgacatgacaggagagctgaactctgggaaattcccttagtttcccctttatgagaaacctaggatctgtcatcaacctcatttccttgtggttgattttgtgcggattggctcaacacttatttctcagcgagcccggacaggtgatacttgtgctaattctgtgatttcttcctccgagcctcacaggatcttctggtaggaggagctggttttctttcatgtcatacgtttctcatgccccacccaggaagctggagcctccttctctgctcatccagataaatgatccaggctccattagaacccatcactgaccttggaagctgctggagccacgattcagtcccctggactgtagataaagaccctttcttgccaggtatagtcaatagctggaaaacctcttctccctccctctggagcctttcctctcatctgtgctttgggcttaatgaagggaagggccacatcaggctggctctgtgctttgtcctatgtgtggctgcttcttactggggagttgctgggatcctggcagagtggccctggcatgggaccctcccctgctcctaggcaaaaacaatgccgatgaaggggtggaggcttcagagaagaggagtcagggcatcaggtgcctgtgggttatttaaggtcaaattttatgcctggccttcgaactcctaggggagacactaccatactatctggatctccaggtggaggaaaattctacctgttctccctttgctgatgcttccttcaagtttcgtcccagatgtggctcagaacttctgcccagagcttcgtgtcaggccaggtttcccagctccctgtctagaatgagggcctgtggagctagtgtcctggaaggtcttggaaacatctcttgtggttcatctgttctatgtctgctttcacaggtgctgagacaaccacactatgagaggcactccaggagacgctgatggtggaggaagggccgtctatcaatcaagtgaatcaaatgctgttgggatggggctctggaggcttaggccctctgcactcacgctatctcctgtggaagccccagccttctctgctcctctctgtacactgcccttcccacctggtgctg

SEQ ID NO: 24336 - DNA, 2300 bp, Homo sapien
ttggccaggctggtcttgaactcctgacctcaggtgatctgcctgcctcggcctcccaaagttctgggattacagacatgagccattgtgcttcaactttaagttttttagtcataattgtgtaagctgaaccaattaagatgtctatgatattggctatcatttctgctgttaatattcagtcctcttcaactagggcacaaaaagattagttttttccttgcaaagtgatgtggatggtctgctgctgcaggtgctattttcaatattgtctcacttcttaaaatgagttatccattgtaaactgctgatttctttgggtcattgtccccacaaactttttataagccatcaatgatttcaccattcttccacccaagtttcaccataaatttgatttttgttcttgcttcaattttagaagaattcatgttgatcttataggggctcttttcaaactgatgtcttacctttcttagtgcctcaaactagatcctgttcaaacaccttataacaagttagtaggagtttattttggtgcaaaataattcaaaatccatgcatagtttttttcataatatgcattttccatgaactttttgatgacctcttgtatgaaaggggatttattaggggaatgaactcatgcaattttggaggctgagaaatcccatgacagaccacctgcaagctggagaccctgggatgcaggtaacatgctcagttcaagtcctaaagcctcagaactaggaagccactggtgtaattctcactttgggatagaaagcctgagaacccagggagatgctgatattaagtcctggagtccaaagtctggagttataatgtccaaaggcaggagagaatgccccagctccaggagagacagaaaatcaccttttctctgtcttttccatgccatccatgcccccggccagttggatggatcccacctacgttgagggtagatgttccccactagtacactgacttacacaccaatcttctttggaaacaccctcatagacttaccccaaactaatgtattaccagttctttaagtattccttaaaccagtcaaattgacacttaaaatttactatcacgctacctatactagagatagtgatctagagtccattgaggtggctagagtgctcaggagctggctttgctacagtaatactcccttcttccatggagaagcagcatgcacagtggctctgagaagctggaggagggtcactggagtgagtgggcttctggtctgaaattgaccaagaatatagttcctgtggaccaggagtgattagaagctacagaggtcttaagagacctatccctcctcagtctaccttgcacttactgagggctcccactcttaggaataattccatcgtttcattttgtggcatcagagatgagtcattgacccggaagaagtcccgtaatgtttctcaactcagtatctgtgactatatttcctgctcttaaaagtttagcatgccctcatgtttcaggttgcttggagaagtcttaaccatgctgttcacataaagagtcactaaatcctctggcatcaggaactagaaaatatcctgagtgttgggcagtgccagacttagtgaggcagaacttccttccttgcccatgtggataaaaggcctgggccctgttacagcctgtcagaaaacccaagtgcagtagaagccattgttcataatggtagggatacagggtccttcgtaacagattatcagtgtggcctatgctggaaagtctggtgacctctgattttttttgcttccaggtctttggccttggcactctttgtcatattagagttcctgggtctaggcctgggcaggattcataggtgcagctgcttctgctggaggtagactgcatccaacaaagtaagggtgctgggtgagttctgggagtatagattctgactggggtcactgctgggctggccgccagtctttcatctgacccagggttaaactgtggcttgggactgactcaggtcctctcttggggtcggtctgcacataaaaggactcctatccttggcagttctgaaacaacaccaccacaatggaaaaaggtaaagatcctcgtggaagggcgaaaaattgacaagggggtgatattctgtgctctcattcttactaatttacattttgactttctcaacagcattgaaaattgacacacctcagcaggggagcattcaggatatcaatcatcgggtgtgggttcttcaggaccagacgctcatagcagtcccgaggaag

SEQ ID NO: 24337 - DNA, 2300 bp, Homo sapien
gatccaccaacagcttatgctgtgtgcctggaaaagccacagacagtgtcagcccatgaaagcagccaggaggagggttgtaccctgcaaagtcacaggagtggagcttccaaagactatgggaacccacctcttgcataagcatgacctggatgtgagacagagactcaaaggaggtaattttgaagcgttaagatttgactgccccgctggattttgaacttgcatggggcctgtagcccctttgttttggccaatttctcccatttggaatagctgtacttaccaaatgcctgtactcctattgtatttaggaagtaactaacttgcttttgattttacagctcataggcagaagagacttgccttgtctcagatgagactttggactgtggaattttgagttaatgctgaaatgcgttaagaccctgggggactgttgggaaggcatgattggttttgaaatgtgaggacatgtgatttgcgaggagccaggggtggaatgatatagtttggctgtgtccccacccaaagctcatcttgagttgttgctcccataattcccatatgtcatggaagggacccagtgggaggtaactgaatcatcagggcaggtctttcctgtgctattctcattctagtgaataagtctcatgagacctgatggttttataaaggggcattcccctacacaagctctcttccctcctgccatgtaagatgtgactttgctcttccttcatcttccatcatgattgtgatgccacctcagccatgtggaactgtgagtcaattcaatctctttcctttacaaattactcagtctcaggtatgtctttattagcagtgtgagaacagactgatacagagaggaagtttaactgcccttctcttgagtatggactggacttagtgacttttttctaatgagtatgttacatggtgaacatggcagcatgtcacttctgagaccaggtcataaaaggcattgcagtttcctccttgctcttagaacactcacctggatgaagccagctgccatctaataaggatattcaagcacccctatatagaagcccacatggtgagaaactgtggtttcctgccaatggtctgagtgagcaatcttacaaacagatccttcagtcccagtcaagccttcagatgactgaaaccttggctgacatctttcctacaacctaatcagacaccctgagccgaaccctccagccaagccagttttcttattcccgactctgtctttgttaaataatttttttgtttgttttaggtcgctaggtttgctgttacacagcaattagtaactaatacagtttgacatcactattgggaagtttctactcctgttgttttttcattttccactgtcttcggtgggtatgctctcttctcagcaaacatctcagttcttcatgggctttatatgccctggaaagtgtcacagcctgcagagaagcaatgttccctgtggtgacttatcctcacctttgtgagaatggcaataaccctggaggtagatgtggcctctgctcttgctgtagagatgacttagggcaggtgtattcacctatatgagaatgtaagcagagtttattatggtaagatagtaaattcctgttagggagataaatttagtaataattaaagtaactgatattcacttggtgcccactatgtccctagaattctatagcacttcccacaatgtgttccatgagactccaatagagagataatgagcagcaagtattcccggcggcttagggtggtgtgaaatcacgctgagaatcctgcttctcctcaggtcctggtagtttcagggcccctccctaggccttacttaaaaggctgaggcatccttggaagagcaggcagactccacggatcccaccaggagaaaggagcattctgaggtatgctctagggcactggtgggactggagctctctcctcatttcagacccagaatctcctgctctgtggaagctgttctcatgctgggggactcagtgtggctgcttgactggatgagacagaggatgtgaagagccaggttggcatctagcacaaacccacagacacgggttcctccccactctgtctttctcacctctccttcacttttcctaggtatgtaaagaagacattaagaacacggcaaaggccaaatttacattgacttaaatctaagactggttcatgaccaaaaatgcatgtagctagcatggctttcccaacgcagagagaaaaaggcatggactcagctccaacagactggc

SEQ ID NO: 24338 - DNA, 2300 bp, Homo sapien
ctgtgtaatttataaaggaaagaggttgaattgacttagagttccacatggctggggaggcctcacaatcatggtggaagatgatgaaagaagagcaaagtcatgtcttacatagtggcaggcaggagagcttgtgtggggaaattcccctgtataaaaccatcagatcttgtgagacttattcactatcatgagaccagcacaagaaagacctgcccccatgattcaattacctcccactgggttccttccatgacacgtgggaattatagaagctacaattcaagatgaaatttgggtgggaacagagccaaaccatatcaccttcttaaagatgaagtttccaagaatttatggacatattttaaaacagccacacatggtttgcgaattggcagcattgtctttaggtagtgccaaagtttatttttcagaagttcaaaacttgactctcatacacacatatagtgagcatgtgtcaaagatttactatttttcataagtgagggaatcagcaagattataaagctgattatcaaaagataattcagggaatggaggcttataccgtcagtcaagaaataaaggctgaaataggttggctaagttacgttttaaagacagctttatgacttgtgaggcaataaaactgcaccctttggagttatcttttctatcagacaggaataatgtgtaatttatcaatgttctcttagttcatggctaatttcacagagtctgagacctaattagtaagtcaagcaaagggataggtccagagagaacttattgttggtgaggcctgtttgataatgttttcatataatattgacagtatacacagtcatagtttcattttacttattatttatttatttattgaggcagagtctagctctctctgtcatccaggctggagtacagtggctcaatcttggctcactgcaacctccacctcccaggttcaagcaattctcacacctcagcctcctgagtagcttggattacaaatgtgcaccaccaacccggctaatttttgtgttttcagtagagatggggttttgccacgttggccaggcttgtctcatttcatcttatttctactgtcattccatttggtcaatttgtaatttaataattttgtacaaggcagtttctacattaattttatttttctgaaaagtgtctatcatattagtggcattatgaaaatcgtagattattttctgtgttttgaacaacttgatattttatttattcttgaacacttgtaggacctcttggctcatatgtctgaataccatttctttaaaatgtacgctttaacatgtacacatatgtaacaaacctgcacattgtacacatgtatcctaaaacttaaagtataataataataataaaagaaaaaagaaaaataaaacttaaaaaaaaagtgtatgctttaacaataaattattaataaatagttatctgtgttattcaagatataattaaattgttttttgtgcactgacccttacctttatttcagatccatcacagagagtgcatggaggtatttaaactgcattaactgtttcacaattaagtattatcttatcaattaggtattcaagaaagatcacttacagaattatagatggcatgagctagattttactttctaaagaaataaccagatacatgagcaaagatgttaatacaaagatgtttgtcacaacatggttttcaatagcaaaaaaagagagaaaaatatataaaagacaaataacagtggataggtttcaataaataatgttacagtgatacagttaaatactatacagctattgaagcatgtcattattcatatttagtatggaaagatattttgctattttgccacatgaaaaaatgaggttggaaaaagtataggttttgtgaatctgttgtatgaaagctgtctatagttacatgtgtatgtgtgtggaggaaatagtgttgtcattggttttctgatgatgcactcagaaaagacaagtattcacattttttcttgtggctgatctggattttcaggtttttctacaatgaacatgtaggctgaacattccctaagcaggagagtcccacctctaacatctcctgtaggcctggcaatggcaggcaggaaagacagaggaaggaaggagggagaagggaaggagtgaaggaaggagtgaaaaaggtaaggaagaaagggaataggggaggaagggaggaaatgggaagggaaagaaggaaaggaaggaaagagggagggaagaaaggaagggaaaagg

SEQ ID NO: 24339 - DNA, 2300 bp, Homo sapien
agcatgtgtcaaagatttactatttttcataagtgagggaatcagcaagattataaagctgattatcaaaagataattcagggaatggaggcttataccgtcagtcaagaaataaaggctgaaataggttggctaagttacgttttaaagacagctttatgacttgtgaggcaataaaactgcaccctttggagttatcttttctatcagacaggaataatgtgtaatttatcaatgttctcttagttcatggctaatttcacagagtctgagacctaattagtaagtcaagcaaagggataggtccagagagaacttattgttggtgaggcctgtttgataatgttttcatataatattgacagtatacacagtcatagtttcattttacttattatttatttatttattgaggcagagtctagctctctctgtcatccaggctggagtacagtggctcaatcttggctcactgcaacctccacctcccaggttcaagcaattctcacacctcagcctcctgagtagcttggattacaaatgtgcaccaccaacccggctaatttttgtgttttcagtagagatggggttttgccacgttggccaggcttgtctcatttcatcttatttctactgtcattccatttggtcaatttgtaatttaataattttgtacaaggcagtttctacattaattttatttttctgaaaagtgtctatcatattagtggcattatgaaaatcgtagattattttctgtgttttgaacaacttgatattttatttattcttgaacacttgtaggacctcttggctcatatgtctgaataccatttctttaaaatgtacgctttaacatgtacacatatgtaacaaacctgcacattgtacacatgtatcctaaaacttaaagtataataataataataaaagaaaaaagaaaaataaaacttaaaaaaaaagtgtatgctttaacaataaattattaataaatagttatctgtgttattcaagatataattaaattgttttttgtgcactgacccttacctttatttcagatccatcacagagagtgcatggaggtatttaaactgcattaactgtttcacaattaagtattatcttatcaattaggtattcaagaaagatcacttacagaattatagatggcatgagctagattttactttctaaagaaataaccagatacatgagcaaagatgttaatacaaagatgtttgtcacaacatggttttcaatagcaaaaaaagagagaaaaatatataaaagacaaataacagtggataggtttcaataaataatgttacagtgatacagttaaatactatacagctattgaagcatgtcattattcatatttagtatggaaagatattttgctattttgccacatgaaaaaatgaggttggaaaaagtataggttttgtgaatctgttgtatgaaagctgtctatagttacatgtgtatgtgtgtggaggaaatagtgttgtcattggttttctgatgatgcactcagaaaagacaagtattcacattttttcttgtggctgatctggattttcaggtttttctacaatgaacatgtaggctgaacattccctaagcaggagagtcccacctctaacatctcctgtaggcctggcaatggcaggcaggaaagacagaggaaggaaggagggagaagggaaggagtgaaggaaggagtgaaaaaggtaaggaagaaagggaataggggaggaagggaggaaatgggaagggaaagaaggaaaggaaggaaagagggagggaagaaaggaagggaaaagggagggagtgagtgaatgaaagatggaaagaaggaagaaagggagggaggcagggaggaaagaaagtcgcgcttcccttgagctgccatgggcactgactcttagggtctgaaagcccctgagatgcaaaagcctagtgctcacaaagagctggaaagcctcaaggaagttcttcaatatttctggaaggaaactgtctccagaagcttccctccccacgacagataatgagcagcaagtgcttctggcgacttagggtgatgtgaaatcacgctgggaatcctgctcctcctcaggtcctggcagtttcagggcccctccctaggccttacttaaaaggctgaggcatccttggaggaacaggcagactccacagctcccgccaggagaaaggaacattctgaggtatgctctggggcgctggtggtaccggagctctctcctgaccccagacccagaatctgctccgtg

SEQ ID NO: 24340 - DNA, 2300 bp, Homo sapien
ttacagagatgcaatactcacatcatgtggggtttgtacaaattgcagacatcgaggaacagagaatgttccaagggcaggctgtagggaagaggctacgatgtgggaggtattatcctgaaaaaagcaatgcacagggagccctcttcaagcacttaaaggcttgccaagtagaagaatgtgcttgttctgtgtaattccagaacacacaagcagaaccaatgggtgcaaattatgtggaggctgtttttcctatatgacccccatattttaaccacaaggaccacaaacattgatagggtttcttcaagaggttgtgtggtccctgaccctggagatgttaaggcagagcctaattaaccaatttctcagggatgccatagcacagatttctccaattggagggaaactatgattccatgtctatgagatggagtttcactctgtcgcccaggctggagtacagtggtgccatcttggcccactgcaacctctgcctcccaggttccagtgattcccctgcctcagcctcctaagtagctgggcctacaggtgcatgccaccatgcctggctaatttttctatttttagtagacacgaggtttcaccatgttggccaggctggtttgaactcctgacctcaagggatctgcctgccttagcctcccaaagtgttgggatacaggcatgagccaccatgcctggcctaaagtcctttcaattctaagattttttttttgcccaaggagcttatctgccactattgtttccaacatgtccttggcccacagcttagagagtctggtcttcttaattatcttttcaagtgtttatgacttagttcctcagctagactgtgaaactacttaacaacaaggactgtgtattgaatgtctgtgtcacacagcagtgtaaatgctgggtaaacactcattggttgcctgacatagtaactcatgctttaagccttcccatagaagggtgagagattgggagagtggaagaagaatgatcactggccttagaaagcagaaatctggtcccatttctgcccatcttttctcatttctcatcctgcaggcatctgagtcttagacccacctatcccacttcctcaagaagcccttggtggaactttgcaaatgaccaaagagggagaattataataaggttgttagtttccagagaacattacacctaagcttctccacgcttgtaatggagggatggatggatggatggatggatggatggatgaatggatggatgaaagggtggacagaagggtggatggatgggcacatgggtggatggatggttggatggatgatggatggatggaagaatggacagatgggtagatagatggacagatgggtggccgggtggatggatggatggatggactgagtcaagtaatgtcaattagagacctgagtgttctttcctctgtgctctactcacactatcatatttcctagcagtccatggcacatgatgtctgctcagtctcagggtgaatctgaggtcaatatctttgcagttgggtttccctagatgttctgtcccatcaagctggtaccaactaattaaacccactgaaaagcagagactcccttctcgtctttccaaacagagtcacactcacagtgctatcagccccttctcttattctggctgtctggccacagcctggattccggcatcagaatttgttctgtccttgggcttgccagacatactttctcttgtattcaccacctcttcaagcctaggatggagccccacggggcaccaaagatgtctgaccccagcactgtttatctggctgcaaacccactaataacatagtcaacgacagtcagtacagagcaggggccccataccttatttctgccaaggctttatggatgactctctcccccttcaacaaatgctccttaatgttcccaccatcttattattcatgctgtaccaaagacattgtgaaatgcccaggctcttcttccttcatgtcctgcagccaattatagagattggtgcaggcctgacccacctgtaccagacggtataaacacagcgcaatgccctggagaaatcagttggagtctccagggatcagggttccaggaactcaggatctgcaggtcagtgatggacaggcaatattctctctctcttttctttcttttctactctctcctgtcaatatctctggtatgccctctatcccttcactcctcctggcaagctgtctaggtaacaaggtagtcccctcatatgacatgatgggacatcaa

SEQ ID NO: 24341 - DNA, 2300 bp, Homo sapien
cacacagcagaggttcagcaccaagacccaggctctctgatggaccagacgctagcttcctacccttactcacttcatcacaatctatcagaacccaggcggagggagccgaataggggagcctttgggaaagacactgtacattttggctgtgccagaatgggaggtttctagggcccatgggatccagctggactggaccagcattgaatttcttccagctctttgagctgacactgacccagagtgggagtcatcagcttgctatccaccttcacccagggccctccactttgttgccccacctagatctgggcacagctaccacactgcccactgtcctgctgctacaaccaaagaagccccagtggtttggccaaggggagcccatcatcaagtgggcttgcattgaggccatgatgctgttgagttatctgtactgggggattgtctagtcctttaggactcaaagtgctggccaggaggaaccagcagcattgacatcacctggttgcatatttgaaatgtacagtctcaggccccaccccaggcctgaaaaaccagaatctgttattttaacaagaactgcaggtggtttatatatttattaataagtgtgaagaatggaatgaaagtacaccagttcccaagcagcatggctgattgctggaatcactccaagtcctactgaattagaaccttcggcccaggaaatagtaattatacagagtcccccaggtgatgcagatgggcaggcacatttaggagccaatgactttaactgaacacttcatttaaaaaatgttgaaacttacttgatactacaaaggaaattcatgttcattataggaaaatgttgatatgtttaaaaaattactcataaagccataggtaagtggtgcaacaacacgagtaacatttctatgtatgtgtctctatgtgtggatttaaatagaattacagtgtacacttgatttataatctgcatttttcacctaatatattttgaaaatttttatgtcctaaaacaagcttctataatatcatctttaacaaacacatacatccttatttattgaattttgctataatttcttagccaattacctattactgaaaattcagatttttttcaacttcttgctattgtaaaaaattatgcagtgaacatttttgtaagtaaacatttgggcaatccgttatttttcctaagagtaagggaaacacatgcaatcacaaagtatacagaatgctttaagactttcattcacagcaccaacatccctccagaatttgcacttgttagtccctattatccttcactctaagtctcaaagtcataccccaaggcctggggacagaaaatgacttgtccaaagtgacagtgacagacccagtactaaaagccaccttggctacagccctgtttctggaacttgagagctgaggtggttggaagccgtatcctcagcacccacctgttccttctcacctgcctccccagggtccctcagcatctctctattcctccctgagccctattactttcttccacctgccttcttcctttctcttctctcattttctgctttcttatattttttcttctctattcccttcttatttggtgagaatcagatctactcggtaaacctcagccctagtcatacttgcgttactttcctgagctaatttccaactcctgattagctctgggtttatttccatgctaaattctggactggcctttccaatgggtgttcattttagggaagagctctaggacaggataacccatcgggaaggagcagagtcatgtgaggctgtgtggcctggcatttatacagggccactatcttcactgtgccattttccatctggaacagaatgggggagtttggatgggctgttttcggcagtcttggccaagcacttctagtcactaggaatgatgttttccaactctctggggagaccccaccagcctcactgctgctggagaccccttctagttgtgctctcttctttcactctgggctctagttatctaacccttggctagttatgggggcgggggtgtggtgccctgttggccaacagggcagtgggactgggtttgagctgggcttatcctccaactgtgagggaggctacagcacactccaccccactctcagggctgggaattgttgtggctcagctatttgggggaatctgttttccagtttctcagaaccagcgcaagcacacacatcccaggctcacacccctggtggctggacttgctcccggatagcctc

SEQ ID NO: 24342 - DNA, 2300 bp, Homo sapien
ctgttcagtataatgttggctgtgggtttgtgatagataacttttattaccttaaggtatgtcccttcgatgccaattttgctgagggttttagatcataaaaggatgctggattttgtcacatgctttttctgcatctattgagatgatcatgtgatttttgtttttaattctttttatgtaatgtgtcacatttattgagttgtgaatgttaaactatccctgcattcctggtatgaaacccatttgatcatggtggattacctttttgatatactgctggattcgattagctagtattttggtgaggatttttgtgtcatgttcatcagggatattggtctatagttttcttttttgttatgtcctttcctagtttggcattagggtgatactggcttcatagaatgatttagtgaggattccctctttctctattttttggaatagtgtcaatagtattgataccaattcttctttgaatgtctgatagaattcagctgtgaatccatctggccctggacttttcttgttgttaccatttccattacaattacttctaactaccacttcaatctcactgcttgttattggtctgttcagagtttctatttcttcctggtttaatctaggagggctgtatatttccaggaaattatccatctcctataggtattctagtttatgcacatgaaggtgttcatagtaggcttgaatgaccttttgtatttctgtagtattggaatgtttcccatttcatttctaattgagcttatttggatcttctctctttttcttggttaatctcgctaatggtctatcacttttgtttatcttttcaaagaaccagtttttgtttcatttttcttttgtattttttttggtttcaatttcatttagttctgctctgatcttgtcatattaccagaatagctttactggttccttctcatttgggtagactacgtcagagtgaatatctgggactcaagggctgctgttcagtttcttttgtgcctcggggtgctcccttgatgtgctgctctcctttcccctaaggatggggcttccttagagctgaactgcagtgattgttatttatcttctggacctggccacccagtggagctactgggctctgggctagtactggggagtatctgcagaatcccgtgatatgatccgtcttcaggtctgtcagccatggattccagcacttgctttggtggaggcagcaggggagtgaagtagactctgtgagggttcttgtatttttgttaactgcactgattttgtgttggttggcctccagctaggagttggtgctctcaagaatgcatcagtatacggaggatcaggcagtgggtgagacctactcctggccttaaagctcccaagagattatgtattttgtatttggctgtcagggcgggtagagaaagatcatcaggtaggggcaggattgggtgtgtctgagctcatactctccttgggccaggcttgctaaggcggctatggggtctgggggtgtggttcccaggccaatcgagttctgttcccaggtggattatggctgcctccgctgtgtcacacaggttgctggggtgtggttcccaggccaatcaagttctgttcccaggtggattatggctgcctccgctgtgtcacacaggttgctggggtgtggttcccaggccaatcgagttctgttcccaggtggattatggctgcctccgctgtcacacaggctgctggggtgtggttcccaggccaattgagttctgttcccaggtggattatggctgcctcctctgtgtcacacaggttgctggggtgtggttcccaggccaatcgagttctgttcccaggtggattatggctgcctccgctgtgtcacacaggttgctgggggtgtggttcccaggccaatcgagttctgttcccaggtggattatggctgcctccactgtgtcacacaggttgctggggtgtggttcccaggccaatcgagttctgttcccaggtggattatggctgcctccgctgtgtcacacaggttgctgggaagtaggagaaagctggcagccacaggcctcacccagctcccatgcagcccacagccctaaaggccggtttcactcccaccatgccccaccaacagcaatgagtttacttccaggaagctggtgagcagggctgagaacttgctccaggctacaagcctcccagctgagaaaacgagcgaactcacagttcctcgactgtcccatggagcctgcagtggcaatccgcctccttca

SEQ ID NO: 24343 - DNA, 2300 bp, Homo sapien
cactggggtgctacagatgcccgtaagttgtccctttaccctcgatgtccccagtgttgggaccacctgggaatgcccagccttgtgtgctgattgacttgtagtcccctggccctgactggaagcctagttttctctctcatgaccagctaggcccctagctccccagggaagaaatccaatctatttcctctgatagtaatggctaatacttaaataatgccaaccacatgccaagcactttacagttgttagcccagtcttcacaagcaccttgtgaggtgggcaagagtcttatcttactctcattttatagatgtggcccaggatcccacagctatagttcatggtgctgggatttgaacctctggccaccagagcccaccttaatgtgtcctcctcctgttgtcataacagaaaagtacaacaccatgatgacacatcaggctatcctggcaggttcccaggctgccccaatgcccaactttctaggtttacaaagttgacatttacgaagtttccaggtttacaaatctagtttctgattctttagtcagcaggaatttctctacaaaagctgcttcgaaaatttccagccaaaccttacacaccttggcattacatcttggtgagccaaggcggaagagaacaggaagtgaaggccccatgggaagtccctgcggtcgggagcacccaggcggggcggggggtggggggctttcctgtggccggctccctgcccctcccacccccattcaggccctgtgagttgaatgaagagaccctgggaatgagtccaggtctgcagggttagaggaaattgaaggcccttaccagatccctgttgagaagtttatgaattatgagcccttctgcaaatgagagggttcttccctgtcaggagggacagattgtaggtggcaagattggtggcagccagtaggctggtctgctccttcctctctatttcatatgtgtatgaaggcattacctgcagcaagggcctgtgtaaatgcatgtgatttacagagcattttatgtactgcgtgtcattcatgcttccggtgagccctaagtctaagatagggcagatagcatcaggtccattttgcagctgtcaaaatgaggtctgaagggcagaagtggtgtgcccacacacacacaactggttggctgcagacctggggactagacccgggacttcgtcctgcccaggggtctcttgccactgctccccatcaacttggatggctttaagcatttgtgagttgtctgctccctgatggcagaatgcagagacatgaagctacaagcaggttcgctcccaacggcaaaaaggaggaggggtgttcagaacatcaggtgcttctagagaaagcagggagagagtatctggccttgtggacaatgtcacggcagaggccaggtatagggcatgggggtaactggaagcgggatggaccctgttattccctaagacatggcttccacgtagtgctcaaacaaggcctttgcccttgctgttccctccacctggaatattcttccccttccttgacattgctcaggtctccactcttatgtcaccctctcagagagggcttccctggccactttccctaaaatagccacccactcctaggtccctcaaaagcatatcctgctttggattttccctatagcaatatgccctatgaagttattttatttgctaacttgtttcttgtctgttttcctttgttagagcgttggggaccttgtctggcttgttcccaatgcctggaagagtgcctggcacacaggattaagccaacacatatgttttgaatgaatgtgtgcacacatgcatgagctggcggcagtcggggttggggtaagcacgaaggcccagctcagttctctgcatgtgacctcccatcttacgcagataagaaccagtttggtttctgctagcctgagtcaccctcctggaaactgggcctgcttggcatcaagtcagccatcagccggcccatctcctcatgctggccaaccctctgtgagtgtgtgggaggggaggctgggctcctccttgtactctctgaggtgctctggaaggaggggcagctccaccctgggagggactgtggcccaggtactgcccgggtgctactttatgggcagcagctcagttgagttagagtctggaagacctcagaagacctcctgtcctatgaggccctccccatggctttaggtaagctccttccactctcattttttcacctgagaaatgagagaggaaaatgtctacaattggt

SEQ ID NO: 24344 - DNA, 2300 bp, Homo sapien
atacagacatgccattttgcctgaaaaaatccatcacccagggaggtgacacaattttgcagaaatgttctatttcctctgaaggatacattctttaaacctttgggaaattcattcatagtcttcctcctttgaaggattaactctctggacacaaagtgtttgattctgatttgttggttggaagatgtgttggttgagagaaagattctgatttgttggttgaaaatagactcatcaagatcaactgctgtagtagtaaatattttgacattttgtctgtattcctgtgctgccctcacaagctgcatcaccttgagtgagtcattcatacttttttgtttgtttttgttttggagatggagtcttactctgttgcctaggctggagtgcggtggcgtgatcttggctcactgcgacctccatctcctgggttcaagtgatcctcctgcctcagcctcccgagtagctgggattacaggcacatgccaccatccctgctaatttttgcattttcagtagagacggagtttcaccatgttggtcaggttggtcttgaactcctgacctcaggtgatccgcccacctcagcctccccaagtgctgggattacaggtgtgagccaccgtgcccagcccagccatcatttttgaaacacgtttgagaaatagtgtcttcctttgagggccaaggagacattttttttgtttatttgtttgtttttgtgaggactagctgaagggggtgatgtatattaacctgcctacttatttgcctcttcccagagtgtgatgaatattagggtttaaagtttctgaagcatttgttaataaagcccggggctggaggtcagaagacctggatttctctgcatacttttgccatcagcaagctgtgtgaccttggacagatcccttttttgtctaaatctttctgagtcttcttgaaaacaatgccaggttgggacaggatgattgccaagctcccgtccagctctaaaacactgcaacgtatgcttctgcaccagcactgtccatcctgtagatcatgcagaaattctcttcaactttttcctacccataaaataggagcatgcttacctttttcctaatgttccaggccccgggtctagaatattgtaagtaaggaagttaatgtgtatcagagcccattatgggccagaagttctcctcttccttcctacacctgcttcctccctccctccctccctctttcccttccttccttccatccatttgtgaagaagacatgatcaccctcattctgagagtgaagagacagaggctcaactaatgaaatgatttgttcaaggtcacacgggtggcacaaggcaagtggcagaggttgaatttagacccattcctgtccaaatgctgagtttatgtcatcgtcccgagaccataactttaaagatgtaagatagtgggaaaagagttgatttcaaagcacctctcagaaggactcactttacatcaggggtcagcagactcaggccaaatccggtccattccccgcttttgcaaagaaagttgtagtggaacacagctaggcttattgatttatggattgccaacgtccttttgtgaaacagacagctgagctgagtaatcgtggcgcacaaaacctaaaatatttactatctcgtcctttacagaatgtttgccaatctatggtccggagtccaaggctgtccatttttcaaagaacacaaagtgacatgagactgtcccatgtgcagggagccctatcattttattatgaaaaaacggcctttctgctcaaatctgttttttaaaaagtcaacaaacagactctgggtacctgtcaggaacagtagggagtttggtttccattgtgctcttcttcccaggaactcaatgaaggggaaatagaaatcttaattttggggaaattgcacaggggaaaaaggggagggaatcagttacaacactccattgcgacacttagtggggttgaaagtgacaacagcaagggtttctctttttggaaatgcgaggagggtatttccgcttctcgcagtggggcagggtggcagacgcctagcttgggtgagtgactatttctttataaaccacaactctgggcccgcaatggcagtccactgccttgctgcagtcacagaatggaaatctgcagaggcctccgcagtcacctaatcactctcctcctcttcctgttccattcagagacgatctgccgaccctctgggagaaaatccagcaagatgcaagccttcaggtaaggctaccccaaggagg

SEQ ID NO: 24345 - DNA, 2300 bp, Homo sapien
acagagcaggtgctgactttgagccttggccatgttccggagacacccctagcggctggggcccagagtggagggtttgcatttaggtcttggtgacttcaggtttctgacttacccagcttgatggagagagagagttgtaaaacctgaaatatatgaggaagaagagcttggagaagagaaggaaccaggtttgccttataaacattgagtttgaagtgctggtgagataagcatgtccccaacatttgccagccctgggaagtggagagtggaggaccccatctgatatgtccaaatacatgaaagttaagactaaagctcacaaactgtcatataaaatgtgtcctgccgggtgcggtggctcacgcctgtaatctagcactatgggaggccgaggcgggcggatcacctgaggttgggagttcgagaccagcctcgccaacatggagaaaccccgtctctactaaaaatacaaaattagtcgggcgtggtggcgcatgcctgtaatcccagctacttgggagtctgaggcaggagaatcacttgaacctgggaggtggaggttgtggtgagcctagatggcatcactgtactccagcctgggcaacaagagcgaaacttggtctcaaaaaaaaaaaaagtgtctattctcctaattctcctacctcccactttcatcatggcctggagctccaggtttgaaggaggattcttagccgcctctgaatgttgctgccacagcacagcccaccccagcctttggcccacgccacagctccacctccctttctcttccccaccctgctctgtatcacacgtgcatgtgggtgggtgacctgcccaaaggtttgagctctctctacctgctcccgtctctgctatcaggactcttgccagcgcttcacccagtctcaggctgcatagggcagcggtgctgtgtgcccacatggggaggaggccatttgggccccagaagtggagagtctcgggatctggggcacgcagagtgtggtggagaagcagggtgcacgggctccatgttggtatgttcctgtggactctgtaccctgcagggaggggtgcggctgtaggtgagctagagcccgaccctctcaactctgggtcagggtggctggtccccactgctgtgtggacatgcaagtgagggagtctctgggtcagctggaatcatgaagacgagagttcagggagggtgggagtggtggagcctcagcagagaagttgacggtcattgatgttgaggaagtagattgtgtggagggaggagaatggcatggtgtttgcgctccccaccagcctcacttacacttgtggacactgcggccggtgtcctgaggacgtgtgttgggaattcagccacggggaatggaggtcccttggttcatatagtcacaggctctgtattctaaccccagctttgtaattttccagctgtgcaaccctgggcagtggcttagcatctctgagcttgcctccagatccggatctgtatgatggggttattaatgcttcataaagtaggtgtgaggagggattgaggtactattgggagaaactttgtaactaaaaggcaattgtatcatttgcattattaccagtgacatgagacatagtcacacaaaaattgaaatgtcatttgttttaaaaccagaaattgcccaacttagggccctcctgtctctcactgggtgccctgcaggggaccaagagccagagcaagactgagaacctggggcagaagcgcagggaggaaggaggtggggcctgcttaccaaccaggcctcggccccttcccctttcaatcccaggcccctgcatggcagggagaggccagttccaccatggcaggttctttctaggctggtgtgcagggtgggggcctccaaggagcaggggcatggggaaaggggctgcaggcgctgggcctaggaagagaggctcttatcttgtgggcaggaagtgtgaggtgttgagcagctagggaaccctggggaggcggcggggagcaggaggggtgtgtgttgtggtgaggaggagcggaagtcggaagctccagccgtcacagccacattcactgggcaagccgactgtgagccaggaagtgctcttggggagcccaggccaagccatccattcttgggtcctttggaggtgagctaagtgggtctgcctaggttggggctggtggaacctgtgggagcagggaatgtggagagtcacatgtgggtccttgtggcaggggctggggcaggtgggcaggggagaggcgagggctc

SEQ ID NO: 24346 - DNA, 2300 bp, Homo sapien
cccagatgtgtgtcctagacctggaggaggagctggagaagacggaagggctcaaggctgggctgaaatgctgtctccccacgccccctgtggacctccccggggacacgggcctgcactccagcccacctgagaatgaagactcaggggaagacagcagtgagcctgagggagagggccaggcatggctgagagagggaaccccagactcttccccacagtggggagctgaggaggagagcatgttcttcagcaaccccctcttcctggcgagtccttgctcagagaacagtgcttctggagagtgcttttcctggggggcttcagactcccatgcaggtgtgaggactggacctgagagcccagcgactctggagcctcccctcccagaagacacagtgctgtgggagctggaaagtgagccagatttgggggacggcgctgctatcagtgggcattgtacccctccattccctgtgcccatctataaaccacactccatctgctgggcctcagtggctgccgctgagggggctcctgcagcacctcctggtcacggggagagtgaggtaagcccagtcttgggaaccaaccggggctgtgctgggaacacagaagggagggtcttcctcgggggtcaccaggcccagaacattcttttctgacgctaagagctttggggataacctgcatcagtatatagcagggtaatagagcagaaaatcaggaccagtgttgtcttcagaatgataggacattttatcaatgccatgatgtcagctgatgtcagctgataattaagtccataaatgtctccatctcaccagctccaaggggccatgcctagatacgtttggagaacaaacagctcctccaattgcagcatgttccaggccattctcagattcttcccctcccatctccaagacattcccaactgtaacagggcagcgctcagcctgcaagggtgacctttgcccctaacagagagatgcctatttcaaaagtccagtcctctctcttcttgacagatttcagcatgttgttacttttagctcaccatctgtcattattcccctgtccagtgtcaatagatcaggcccatatgacaatggcagagattcttaatatcaactaaggatggggacatgctctgtgagacaatagggagcacagttttcccagggaggcctctccttaagagataaggagactcaatatggtagagtgtggctgtaattttctaatatctcaattccctgagaacaatgaagagctattacccagagcagctctattaccagagcagctcttggagcccaagatcagagaagctcctgggtactgatgggagtcctctccaccatgggccagggcccccagtgtggggcagttagggctgtgcctgtggaggtccattttctcaggactttctttttttttttttttttttgagacggagtcttgctatgttgcccaggctggagtgcagtggtgccatcttggctgaccctccacctcccaggttcaagcgattcacctgcctcaggctcccaggtagctgggattacaggtgtgtgccaccccacccagctaatttttgtatttttagtagagataggtttcaccatgttggccaggctggtcttgaactcctgacctcaggtgttccaaacacctgggcgtcccagagtgctgggattaagtgagccactgcgcccgccatggactttcttgttctaagcactaacttctcagagggaagcctgggaacgctataagttgcaggttggctcctgtctgggaaggcagagcccacccagcccagtgcctggggctatcaccctccctaaaacacagcccctccttgggctggcaccacctgaggcagggccatcagggcagactgtgaagggaggaggcttcatgggatttgagaaaggccctgggagcaattttcctctagtcacctctcctctccttctctcctctgtctctctctcgacttctcagggagataggcttggtcctgctccatctgcagcaccgtgtgtggacgaagcattgacctgggaatcaggatgtgtcggatctgatcttggccctgctgcacatcctgtgcaaccttgggcaagtcacttcccctttctgggccttactttctccatctttggaggaggaatatgagcccattcatttccagggcctagcaccaacaatcctaggatgtggggcttctcacatcaggactccccttctgaactgaggctccagcctgggtgggaggaggatggaggggc

SEQ ID NO: 24347 - DNA, 2300 bp, Homo sapien
cctccatgagaactagttaaggcctcagtaagcatgggcaggacagggacttgtctgccctggtcatcatcttttttttttttttgagatggagtctcatcctgcactgtcgcgggagtgcagtggtgtgatcttggctcactgcaacctccgcctcccgggttcaagcaattctcttgcctcagcctcctgagtagctgggattacaggtgtgcaccaccacgcccagataattttttgtatttttagtagagacagggtttcatcatgttggccaggctggtctcgaactcctgacttcaagtgatccacccgcctcggcctcccaaagtgcagggattagaggtgtgagccactgtgcctggcaggtcatctttatgtctctagcacccagcatagtgcttgttgctgggaaatactccagaaatactttgttgcacggatggatggatggatggatggatggatggatggatggatggatgcttgcttactcaaggaggaagggcacctatgttgtgggtggaggaggcaggctgtacacatgcccctatcctacctctgccagacaaagagactttaggctccacagccctgaggctcccctgcccacctgtgtgcttctgttccaggccctctactggtctatccgcagcgagaagctcgagtgggccgtgtgagtgagactccctttcccctctccctctcacccctctcccctgtctttggactgtcctccctctgtcacccacccgagagttagagaaactcagatagtgctccccttggagtgaggcaaagccagaggcagggctctggggagagagcatagaggagcccaagtaataccggagggccagaggtagtggggcgtggggtatggcagaattttcaggaattgatgggttcactgtgaaggaggactccttgtggggggtcctggggtgtggcttcccaggaaaagagaggttgctaaggctctgggaggcaatggatacctcccagttctctttgcatagtcagcacttccagcccgattctctgatgttcagggatgaagaagacacagccagacctgagaaggcccagccgtccctgccagctggcaagatgagcaagcccttccttcagctggctcaggatcccacagtgcccacctacaagcagggcatcctggctcggaaaatgcatcaagatgcagacggcaagaagagtgagtgtctgctgcccacaaacagggtggcgtgctgggagcagccctgctcagggacctgtgccgatgcatgcacaggtgtgcagagagacagcccgcgttgaggacaggcagccagcccatgttccttcctcagtgcgtactgaacagtgaccatgtgctggatgctgtgtgaggcactagagggtaggtaggagaacccagacaaaacaggcctagttattcctgggccccagagtccctgtagtaaggtagagattagacaagtgtgtcaatgtctgcgaaaaaaatgtagcaagagctgagtgtctaggggctgaatcaagtgaggagaaaaaggtttttggttttgttttggaagcgggatgtggctacagggagaggtaaggcttctggtaagtgatggtatctgcgctgaactttggaggagaagagggtctggaatttggaagctgggcagagggcatcccccacagagaaaacagcaagccgagtttgctcagaacatggggtgtgtgaaagggaggtacacttgaggcaaaattgccagggcctgcatttgggccttattccacaggcagctgaaggcttttgattatggcaccaacatgtccagagtggtgatctcagcagactaatgtgcaagcacagattgaataggctggggcgaccaggatgggaactagcattggctgtgaagccgccggggccctagggctgccttttgtccaaggagcttagaatggatcttaccacacaagaccagggtggagaggtagggggaaaagagggcaggtggtgctcagagtggggtacacagggaagggcaccccaaagctgggctctgcgcccttgagcccctctagatgggtatgcaaggtcaagatcatcctgcagggactagaaagctgtctgggaggagctgtgtttgtgcctgggtgtttgccactacttggggtagtgggtgtgtgtttggagttggagagaagatgatatgtatgaatatctatatttggatgtgagtggttctatggttttgtttccagcgggcattgcctgtgtgtggagagactctatatgtttgttt

SEQ ID NO: 24348 - DNA, 2300 bp, Homo sapien
tgaccatgtgctggatgctgtgtgaggcactagagggtaggtaggagaacccagacaaaacaggcctagttattcctgggccccagagtccctgtagtaaggtagagattagacaagtgtgtcaatgtctgcgaaaaaaatgtagcaagagctgagtgtctaggggctgaatcaagtgaggagaaaaaggtttttggttttgttttggaagcgggatgtggctacagggagaggtaaggcttctggtaagtgatggtatctgcgctgaactttggaggagaagagggtctggaatttggaagctgggcagagggcatcccccacagagaaaacagcaagccgagtttgctcagaacatggggtgtgtgaaagggaggtacacttgaggcaaaattgccagggcctgcatttgggccttattccacaggcagctgaaggcttttgattatggcaccaacatgtccagagtggtgatctcagcagactaatgtgcaagcacagattgaataggctggggcgaccaggatgggaactagcattggctgtgaagccgccggggccctagggctgccttttgtccaaggagcttagaatggatcttaccacacaagaccagggtggagaggtagggggaaaagagggcaggtggtgctcagagtggggtacacagggaagggcaccccaaagctgggctctgcgcccttgagcccctctagatgggtatgcaaggtcaagatcatcctgcagggactagaaagctgtctgggaggagctgtgtttgtgcctgggtgtttgccactacttggggtagtgggtgtgtgtttggagttggagagaagatgatatgtatgaatatctatatttggatgtgagtggttctatggttttgtttccagcgggcattgcctgtgtgtggagagactctatatgtttgtttacgattgtatgtgttttcttgtgttggcatgttctgcatttgtgtgcatcctggtgagagactggaggtggtgtgagggacagggggcatatgcacacttgcgtgtgtctgagtgtgtctggatgctggtgcccccacctacaacatttgtgttctgttcctggaacagcgccatggggcaagcgtggctggaagatgttccacaccttactgcgagggatggttctctacttcctgaaggtaggaaaggagccaacacccctgtcagaatgggagactgagagaggcccagaacagtctggagggtgggcagctgatgataacctcttctctgagcccctgtgactggtagcagggagaagaccactgtctggagggggagagcttggtggggcagatggtggatgagcccgtgggggtgcaccactcgctggccacccccgccacgcattacaccaagaagccgcacgtcttccagctgcgcacggctgactggcgcctctacctcttccaggcaccgtaagtccctggggtgggagactgtggcaaggccttgccctgccctagttctctctcccctgaccctgctgacacctgaggcttgtgggccccagggggtcctggtgggaatggccgtatgatcagaaattcttagaaagcggcagcaggaagaggagctggggaccagggatgaagcccaggcatcgcctacttcctccccatccttggccaactttgccagcacagtatgccttttccttgtcagtgggataaagcctcccagttcagaacacaggattccgggaagttgctaatgattgaccatatctggcatttgttatgaaatctgtcaccttctcagattgtcctctttattttttattgtttatttttgagacagagtctcgctctgtcgtcctggctggagtgcagtgactctcacctcggctcactgcaaccgccgcctcccgggttcaagcgattctcatgcctgagcctcccgagtagctgggattaaaggcgggcgccaccgcgcctggctaatttgtgtatttttagtagagacggggtttcaccctgttgaccaggctggtctcgaactcctgacctcaggtgatccgcctgccaaggcgttgccaccgcaccgggcctccaaattttcctctttattgataagaaatgccacggtcagaggtcgggtgcccggctagtggcagggctgtaactatgggaggctgagttctgagcagctggccagctgtgcaagcagccacaggagggggcgggaggagggtgacaggacggactctgtgtccccggggaccaacgacctcctttgccccagcactgccaaggagatgag

SEQ ID NO: 24349 - DNA, 2300 bp, Homo sapien
accccagcactttgggaggccaaggtgggcggaccaaggtcaggagattgagaccattctggctaacatggtgaaaccccatctctactgaaaatacaaaaattagccgggtgtagtggcgcccatttgtagttctagctactcgggaggctgaggcaggagaatcacttgaacccaggaggtggaggttgcagtgagctgagatcgcgccactgcactccaacctgggcaacagagtgagattccatctcaaaaaacaaaaaaacaaaaaaaaaagggtccagggacttttatcacatgaccctgtggttactctgggcttgtagaggtcttaatcctctggtgcagtggtttcgaagtccaagggctttctaggggcagggaccccttctaaaagagcagttcttcaggggtctggtgagcatacatgtcttctgtaaaaggcttcatttcaagagagcattgagaggcccaaatttgaaaccactggtccagatggactgtctgactctgggctgcctctgtgacaggtctcacacaccccacccacgcactggtctctgctccagcatttcaaggtcgtcggggtaggagggtgtgggaggtgaagaggcatttacttctgtcactaaatacccacactccttggagacagtgccgctattaaagagattcctccaatgctgaactgagagctagctggcttccttccctggtcctgggcccccactgggcccacatctaaaatagtcctatccctgtggaagcccttgaggtatctgaagaccatatgggtctctgcttcccactttcactgcatctcaggccctctccaacccaagccaagcgcttgactctcagccattcctcaggccctggctggatgagcgaaggtccttctgccaggaggagccagctccccttgaggtctgactcatgcagtgcaggcccaggcctcaaccagctacagatggtgctcctgcccagagaccttggcagggaccttctcctccctgggccaggttcctcatcagcataagaggtttgatctagaggctccctcaggtgcttccagatttacttatttttatttatttgtttttttcttttttgagatggagtcttgctctgtcacccaggctggagtgccatggcgccacctcagctcactgcaacctatgcctcctgggttcaagcgattctcctgcctcggcctccccagtagctgggattacaggtgtctgccaccacaccccctaattttttgaattttagtagagatggggtttcatcatcttggccaggctggtcttgaactcttgaccttgtgatccacctgcctcggcctcccaaactgctggaattacaggggtgagccacctcgcccggtcggtgcttccagctttaaatattttgaggcagttgaggttcctgatgggaggtcccccactcctctcaagttgttgaatcactgaatttatcatgtttaacagatgtctgactgtcctcccggtgatgctgttaagctaggaatgaagatagctgcatcatggaaacacaactgggactgacccttggcctttttagaaatttgatccagaaatgggctccaaaagccaattcctttttccctccaaaatgttcatttttccttctatctatttatgcatttaccaaggccaagttgctacgttacagcacccggctcccggccttagggttcctgcttttccatggggtcttggggtggtgcatccccggcacccctacagcatccgccccttccgagcatgtcttccccgtcacagagaacttcatgttggcgcctccaaaagttgccggaggaattagggaacagggtgggggtggatgagactgaggccagagagggggctggcggtctgccctgaggacccccgtcccacccgccgccatagctgcatggccccgggacctccctgtcgtacctgagaggagggcctggcccgtgaactgcccgtacacggaggcagcatggggaaaggcattgaagggcgggaccccggagccgacttgctgcagatccaaaaaggcggagctagataaagaggaaggggtggagctagaactggacacctcgggggtttcctgctttatggcgaagggtgagtgaggatctgccggagggagggagacaacaaggagagaggggtgtgagatggcggggagggaacacgcacaagccaagccgtgggatgtggagggtgcgggcggggcgcggggcaggctcagctgccctcagagtctgggctggggagagc

SEQ ID NO: 24350 - DNA, 2300 bp, Homo sapien
ccctggtcctgggcccccactgggcccacatctaaaatagtcctatccctgtggaagcccttgaggtatctgaagaccatatgggtctctgcttcccactttcactgcatctcaggccctctccaacccaagccaagcgcttgactctcagccattcctcaggccctggctggatgagcgaaggtccttctgccaggaggagccagctccccttgaggtctgactcatgcagtgcaggcccaggcctcaaccagctacagatggtgctcctgcccagagaccttggcagggaccttctcctccctgggccaggttcctcatcagcataagaggtttgatctagaggctccctcaggtgcttccagatttacttatttttatttatttgtttttttcttttttgagatggagtcttgctctgtcacccaggctggagtgccatggcgccacctcagctcactgcaacctatgcctcctgggttcaagcgattctcctgcctcggcctccccagtagctgggattacaggtgtctgccaccacaccccctaattttttgaattttagtagagatggggtttcatcatcttggccaggctggtcttgaactcttgaccttgtgatccacctgcctcggcctcccaaactgctggaattacaggggtgagccacctcgcccggtcggtgcttccagctttaaatattttgaggcagttgaggttcctgatgggaggtcccccactcctctcaagttgttgaatcactgaatttatcatgtttaacagatgtctgactgtcctcccggtgatgctgttaagctaggaatgaagatagctgcatcatggaaacacaactgggactgacccttggcctttttagaaatttgatccagaaatgggctccaaaagccaattcctttttccctccaaaatgttcatttttccttctatctatttatgcatttaccaaggccaagttgctacgttacagcacccggctcccggccttagggttcctgcttttccatggggtcttggggtggtgcatccccggcacccctacagcatccgccccttccgagcatgtcttccccgtcacagagaacttcatgttggcgcctccaaaagttgccggaggaattagggaacagggtgggggtggatgagactgaggccagagagggggctggcggtctgccctgaggacccccgtcccacccgccgccatagctgcatggccccgggacctccctgtcgtacctgagaggagggcctggcccgtgaactgcccgtacacggaggcagcatggggaaaggcattgaagggcgggaccccggagccgacttgctgcagatccaaaaaggcggagctagataaagaggaaggggtggagctagaactggacacctcgggggtttcctgctttatggcgaagggtgagtgaggatctgccggagggagggagacaacaaggagagaggggtgtgagatggcggggagggaacacgcacaagccaagccgtgggatgtggagggtgcgggcggggcgcggggcaggctcagctgccctcagagtctgggctggggagagccggggcccacgaggcgtggcaaggcggggagagagaagctagacctccctgctgcgcttctgcagcgaaaatggagagacccggaaggcgtgtgtgcgcccgcctctcccacaggagggagcgcggagacccgggagcggcctaggaccggaggcgcgacccctcggcccaccttgaggcccggcctaggaccggaggcgcgacccctgggcccaccttgaggcccggcctaggactggaggcgcgacccctcggcccaccttgcgggagccgcctaggaccggaggcgcgacccctcggcccagcttgaggcccggcctaggaccggaggcgcgacccctcggcccaccttgcgggagccgcctaggaccggaggcgcgacccctcggcccaccttgaggcccggcctaggaccggaggcgcgacccctgggcccaccttgaggcccggcctaggactggaggcgcgacccctcggcccaccttacgggagccgcctagggccggaggcgcgacccctcggcccagcttgaggcccggcctaggaccggaggcgcgacccctcggcccaccttgaggcccggcctaggactggaggcgcgacccctcggcccaccttgaggcccggcctaggaccggaggcgcgacccctgggcccaccttgaggcccggcctaggactggaggcgcgacccctcggcccaccttgagg

SEQ ID NO: 24351 - DNA, 2300 bp, Homo sapien
ctggagggtggtgaaggcagggagaaccagccagtgcaagggcccctcatgtcctgcctggcctttgcttttcctacctctggtaactgactgtgctgccaaagtaacactccgtgctctctcacctgggcataggaatgccctctggcttggggagccaagaaagaagcacaagtattcatacctgaccttaggacaggttgtaacacagctatcttttctgcaaaatcaacaagtgggggaccaggcatggtggctcacacctgtagtcccagcactttgggaggccaaggtggatgggtcacctgaggtcaggagtttgagaccagcctggccaacaaggcaaaatcccatctctactaaaaatataaaaattagccaggcctggtggcgtgcacctgtaatcctagctactcgggaggctgagacaggagaatcgcttgaagctggggggcggaggttgcagtgacccgagattgtgccactgcactccagcctgggtgacagagcgaggctccatctgaaaaaaaaaaaaaaagggcagggggaagtgttcatcagaaacatcatgtggccttattcctggttgctatttcatgaccagacatagctagaagtcatacagctcttgtttccctattttacaaatgcatcaaaaaaaatcaacagaatatgaatatcagtttattgacagaaatcaagaatttggtggcttctgactcttcacgattctgaaataatatctgtgataactctcattgggcatctgctgtcaccaagtattcggtgctaagcacattatgtataagtatacaaaatttcatgtaatgcttacgtcagcctcataaagtagagtctatgattcccatacaggtgagaaaattaaggttcagagcagtcaagtagactaaagctacttggcaggtcattgcagaaccagggctcagagtcgctgaagttctgaagcattgtgctgctctgccccgattcaagttcaattccagctaaaaagcccaataatcactgggaagtttcagtcattgaatacaaaatcaccaaaagatttgactatataggttttctttttcctttttttctaagttacttggattttgaaatagctataggattctgagtagatattttgctgtcaaaacaacacatccataaagcattttaaacttctcttatacgctctagaaattaggtattttgttcaatttcaataagacacaccctggccaggtgcaacggctcatgcctgtaatcccaacactttgggaggtcaagccaggcagatcatgaggtcaggagtttaagactagcctggccaacatggtgaaactcctgtctctactaaagatacaaaaaattagcctggcatggtagcacgcacctgtaatccctgctactcgggaggctgaggcaggggaatcacttgaacccaggaagcagaggttgcagtaagcgaagatcgcaccattgcactccagcttgggcaacaagagcaaaactccgtctacaaaaaaaaaaaaaaaaaaaggccctaagcaactccaccctgcctctaagtgggcccccttggaaggcatggaaccagagcaccatttagtcaataattgctgctatgtgctaatggtgccctggtggcctccagaattgactgcagcttccaaaagtgcccagcatgcaaccggaaagtgctgtggatctttgcagaacccagctcgatggaaatcactgaaaacaattgcctttagtggcactgttatgtaactactgagcattccctgaattcagctttgcacatctcacgtagcaggtatgtgacgagtgtgaaggtatgtggggaatgggtgtgttcttttttctgcgctatctgcttccccagtggaaggaggccatggtgaggatgaggtacacttacctttagttaaacaagttcttttcggaaggagtacctaaggtcatagctgtgctcctgggaaggggaggccaggaggcatctaaaatgaggtcttactgatgaagacccccaggtacttgacaaagagtgtttccaacaaaaacaactctcaataccattttcaagccgaacttgcacacttctatttgtttggatgtggagagagaaaagaagaaatccacgtggtgggtaaagcacctgggtccacagccgaaaaatcccgggtttagtctgtttcactatacaaaattgggccatttacctgagttccaggctccacatataaaacacagacataatattactcacccatgtcactgggctgctgggggac

SEQ ID NO: 24352 - DNA, 2300 bp, Homo sapien
tgctctttaatgcatcccaggaggatcctaagatgtgaggccatgaggaccaacgccagctccttgtctactacactctgaggctcaggcagatataagagggtcttccaatcgaatgtgatatttggcttccttagatgcttctgccttagatcagcccagagggtggctgtggtggaaggcttagcattattatttcatccccaatagtgagagggagctggggagggacaggggagggagatagaggatggataaagaggtttcccttggattagactctgtctgggagagaatcaaactaggctcgtatttcaccaatgctggacctaaaagaagaggaagtgggggaaggagggaggaagagctatctttagtacccagcccctcttccccattagtcaatgcctaagaataataatcatagccagtattatgggaggtgcttatttttgggccaagctgagtattttaaatgcatcttttcaattaattcttataataaccctttgagaaatgaagtacattatcattttattgatgagaagatgaggaacagattcggcatgtaacaggttcaaggctccacctttacaaagtggcattactgagactcaagctgagagctctcagatgccatagtgaatgctctgcactgcttacttttgcccacccacctccggcgccacccctggcagcagcactgtattccaggaatagccagaccccgccctaagagcgaatatgtcctttcgtcacctaccaagtatgggtgctttccaaaacacacttccaagtcctctccagcttttcattttcttggggcctaatttttcctttttaaattttctccagtcagagagggcacctaattcctttatttccctttactcttgtgtactggctggttgtcctccattctctttgtttacatccatcgctgcctcctttcttcccagtctttccggctctgggtttgcatccctgccctcagtgtctcccagtttccttgctttcttttatttccctcctgattgctgcctccccagttcttaccagctctctgtcccagtcctttcctgtcaaagatggcagactcctccaatgccaccgctcccctacccatctgcccggagtcttcccttctctctccctccctgctggctcttttggccatcccccttccctgcataatctttattgcttgcatgactgctcaggttctttatcccatcttcccctcaaaggcattcgcagctccgctgttattcttgtattagcattgaacccattaaagctaatttgtttgccctaatctccatttatttttccctagttgatattagatttccctttctattgctccagcatgattttctctttgtcttcctaatggtctacccccctctctcttcctctattaatctggttggcttcactgtgtggtttcaaggcctttctccgcctcccccagcccttagattaaccctgtcacctccctcccaagaagggcttcagtgtgtggatttttagggatggagctgcttcaaatgtcaatagacctctaagctccttaagaaaagtactacttgacatgaggccctgccttttcctggagccaagctggagaccttgggagcacaggggccagagagcttgaggcaagtgagacacacatgggctgctctgagcctgaaggtcaccaagtccaagggttccctgggtagggttgcctttggtgctgtctcagagatttctggaggtctcttcacgctgtcttagatcctataaattatatcagcaatataaggtatataaagtaacagcagatgagccactttctccctctgagattgggcaccatttcccaagcaggggactcacttcctttccttcctgcaggagtgatgcttccccctctgtgaatgtggctttgggtatggctaatccacaccctgcactctggccttcagaagcccagggagagaagcctcccagaagcaaccttccagaaccttctccatcctcccaccgacctccccagcccctgtcctctctttgaatctcgttgtcaagttcttcccgcagacacctggctccttgaggggaggtgcagctttcatctgaccatgcaggcgtgctttgcagtgggtagagcagtgctttcctcctcccagctgcacactggaatcacctggagagtccagaaacttcccgcctcaggtcagttcagtcagaatcttttggcatagcatccctgaatctgtatttttaaaaatctcctctgttgatagcctaga

SEQ ID NO: 24353 - DNA, 2300 bp, Homo sapien
gcatccactaggaaggtcccttgttggttcaaactccccaggcttgccagtgttttttactcccagtgcccattgctgctcaacctggctatctggccttcaagcataggcttctgtgcctacaagatgcctctaggaccaggcaggtatcccagtggggcagctccggcctgaatggctgcatcaggttccctcaaaggctgcatttcttgctttctcagttccctcattgccaattattataaagaaaatagaaaagtaatatagcaatatcatgggaaaggatcaggtgtatttcatgttggaaaaacttcatgtacaaaactcaaatgtgcaagttgcatcaaccaaggaagcaataaaaaatgttattggagaattaggtgaaaaccagcagcccagacatttgtagagtcctcactccttatgtaggattttgtgtaaggtgctggggatagagagagatctggaagggttcttgttcttttctagctcagaggcaggttgtcactgtaagaagctaagtgacatttgttggaacaagtactgagtacccagggagtggagcaggtgcagtgggaagtcagacaggatggtcactaaaggtaaagggtgtctaaaaaggtcttgggaaggaggtggagcttgactgaggctttgtcaagggagtgggagtgggaagggtgttccaggtagctgcattgaatgggcagagacacagaggtgagaatgtacatggtgtattttggaaacaatgactagctggctggaacatgggtttgcatacggaaatagtgggaaataggccacggaggtaggagaaagtcttctcggattgtacatcagcagtttgcctgaaaatggcttgttaatgattggattaaaaggaagtgcaaggagaaatctgattattttggaaaatcaccaggttaagtttgtctgaaacagagccaagagaggagagaaaccagaacattttgaaaaagtgaataacctagctatcacagattattgccatggcttttccacttaataaaatcaccgcaaaacctgaagacaacagcgtcagtaggtatgcagctgtggcaagagagccaagaaggatatgaaaactgccaacaacagaagcgtgaggccaagccaggggaggatggaagtttcatgcacaagtgaataaaatgccctaaaacgtatacatcgagtgcactttacccagacgttctgatggcacattggaattaacaccatagcttagcttctcttgtcaacccctgcagttgggctgaaccctgaccatgttcccattgctgtctccttccctcagggctgactgctggtgcctggaacctgcacaccctcctgggactctgcatctctgctggggctggtttctcctctgagccaccttaaggaatcccaccctgacccggtcagagctcaccatgcctccctctcctacttgctcagcattttgtgtctatctagactgaagcctttgctttctctctgtgattatggtgaaagttcagtttgctttcctatctctagaatgtcagcacgaaggcagaggcatggtctcctgagttccataaccccaaagcctaactccctgcctgccacactgaggggcttagtagacattgacttactaaattgaatagttgagtaataatgctctttgaaataatttggagttagatcttgagccttgtgtggccagaggatgggtgaggacacatcataaaaactaaaggtaactgagcatgccagtggttggggtgagaaatttgcatggagcactccagacacagaggcagcaaaacccaagtgctgggaagtcagagtgagagagtgaaggggcagtgagtgcttctttaggagctggatcaaaacctaagatgatctggccacatggtgcagactgagcacacacttgggagagaaatgggccaggaggagaggagagaggttcaccacaggacagtggatgactgggaatagaagccctccccatggtggaccaagaagtctgtgaagctgagagaaagacaaaagaaatcacgacttctgtaggtagctgggatggaaacctcaggggtgacagggtctttaaaggaaatctcaaggaaggcatcatgttctgggtgtgctccagggatgctgagtaagaaaagaccagcctttctgtgtgtgtctttactctgccacaaggcacctgggctcctaaatgaccaatacacatgtgctatactggtgccaagaaagaagggtgttttgtaggaaagtcaaggtgagaggag

SEQ ID NO: 24354 - DNA, 2300 bp, Homo sapien
ggagaagaggtactgtcaaggtgtggggtgtgtttttccctgaggagtaaccttgaacagtgcacattgtttttaccttgaaatgaaattttaaagataaatttatacatgggacaggaatgttctgataacttgctggatttgtcctctaagaaattttgcccaaaaaggggataggaaagggagagggttcattgcttgggcagaaaagatgtgcacaggcaagaatgattgcatgagagtcaatggttattggtacgtatcagaaccttagattgggtagaatctctaaggttgtcagagctgtttgaaatgagggcgtattagattcaccctggagcattgcctccctggtgggagggaatcctgggtggacaaagagagtttctgctgtggctgccacactccacacctcccctgcagcaggacacaatccagggcagcaaactggcccatggggtccggaggacctatgccaagatccatttccatcccaacacccttggattgtctctctctgggagggactgccagagaagttagggatctggagctttgaaaaccacagagatatttaaaattacaattttagagaaagatttaaaatgatgaagcaccaactatttttgtttacagcccctctttgcaaatgtggaggaaacatgtagggatacacatcttcttctctcttttttcacaagatgattcatttctcctaaattgagaaatgagaaagactgggtggaaggaggttgtggattgacatgaaagagaaaacttttttaattcagaaaaatagttcatgtgttttcacacacgtgtacatatgtgcatacacacacacacacacacacacacacacacatccaatccccctgaatatcccagtttcccctgcaccttccttgcccccctcccactggcttcttagcctcctgtcccagaacaaccccaccaggcctgcagagccatcactgaaaagggcatggctgtcctctagactgtaatcctgagtccagaggtctggccaaagattggaggagcatccaggccttgacccccaggcctgccagtgttccaggacatttgctcactcatacccactcacaatcttacgtgtaccccggttccccgactgagagaactatgaggaaggagggggcagcttttgccatcactaaggtaaagaggtgccaggcagctctgctcggtcccagggctcaccaaccctgccatcattcccaccagtggaccccttcttaaccacacccaggcccccatattgctgaggctattgattcctacagaccaggccagaggtcagctcagtcctgttcctttctaaggcctttccacacagagatgaagtctaggccctcaatgcccttcccctgaactcttcttccaagttcaaaatcctcaaggagcaagaaagagggcaggtggctgcgtgtgtgttccagaggagagaggcgaggagttgctgtggaatgggttatgtgacaattttgttagcctgacaatgcaagggtgtgaacgctatctgtgtagaacagagggaatggcttcaggtgctgctcaggattcttccctggaagaggtcatagctgtggtgagaaggtaatagcatcttgcctacagccccgaaagcaggctctacctaaagaatcaggcataaaacagaagttccctccttccttttacaaaagaaaaggctgcttcctggtgagcaaaccaggggagacagggggcaaggagggcatcctacagagaccatccctctcacttctggtggtcagtgacccaggaggacccagagaacctcatcctcaggctcctaggcctctgttccccactcctccaatatttccaggcctgctgagttagggctcagctgcctccctcttccctccgctggaaacagaagctcccagcgaatgtttctaactcctgagtccactcagccatgtcccccttgcaaaatcctccccttcccgcacccccctgcacccagccagccaatccgcggcctacgagcctcgccagacccatctcccagggcctcagcgggataaaaccggtcggtgatgccgggtggatgggaacaaacttcagaaggaggagagacaccgggcccagggcaccctcgcgggcggacccaaccagtgagggcctgcagccggccggccaggtatgtcacccaggggttagctggaagctggctagcagtgaggacgggggatggaagaaaggagagggtcccaggatgcctggcagccttttccctcccaagttaaacg

SEQ ID NO: 24355 - DNA, 2300 bp, Homo sapien
aacacagaaagagggattttagtataacattcagccagtgccatattgggaacccacaagaatgtactttaaaaaatatgtcaaagaacgtggtgagggctgtaatagctgctattcaggcagtaatgcagtgctgaagggacatcaagcaaatagtgtgatgcctgtgggtgcaatgttactccttcccttaggttgccaaaaaaatcaatacttcatagcattcctgaaacgaaaaagcttatgaaccattgtgtttagggcgtaagctatctattttgggctacccatcacagcttctctcctttggtagaataaagtgaactgaaccaccatgcctaaggtatttgccttatttcttcctcagctggttcatggttacattgtcaaagctggcaaagcattcaagacctgatttctcagaccgagtgtatgtgtgaatataatatactcatttgcacaaatataaaccctctgtcttaactgtgttctgcaaaaggcgtgataaatactttcaagttatatgtccttatcagtagaactaatggaatacacacagtatattatatggggaatttcagagaaggaaggaaaagtcaaccttttatttggcatcaggatagtagtaaaacattctacttgtgcatcagatagatttttatgacctaacctggacaagtaacttaactcttggtgcctcatgtttgaaagagggataacactctacagggtcattctaagaattaaatattgccaaaacacatgaaaagattctcaaccttgttagtaatcaaggaaatgcaaatgaagatcacaatgaagtcttcttttgtactcaattgattggtgaaaaatgcatgcctgataatattgacataacagaccaatgagatctcttataatttgctgggaaaatgtatcaatttgtacaaacattttgaaaaataattgtgcattttcttgtgaagtaaaacatttgaataatctaggacccagcaattcagctcttacacagacactcaagaggaagttgcacacacatatgtcaggaaaaatgttcatagcagccctgttcataagagcaaaacctggaacaattgagaggaaatgaataaattgccgtgtagccacacaatagaatacaagacagcagtgatgctgaaaaatatagcaagcctcaggagtttatatattatatggataattttatgaagctcaaaaacacccaaaattaaacaacatattctgtaagtacatacgtgggatatgtgataaaactaaaagggaatgatcagcaatccagaaccaattcatgactgttgttactatcttatggggcaggctgtggattggaagcaggggcggtgcacataggtacgtgtaacttactggtaatgcttttaggttaggaatgaggtcaaaggagttcactataaatttatattagaaagaagggctatctatggattagtgatgagagtgtcatgcaccagcaaatacgattaatgaacttaggttacctgaggtccaaataaataatgagaaaaaagtaaataaaagtgatgcatgaatactaaaaatttggaattacatatataatatgtaataataaaaaaagaaaaaattgtcactggttatccttcaggtataaaaattacaattaaaattgtaatgttataaccttccattctttcccctatgaattaaaactttttcttttaacgagactaaaaaatcaagttgataaaatctatgccctgtgggaactggttaggtcaggctacccactccagatttccagcaggctggcctcagctctacctacagccagtagcttattaaggctctaggcgccagtgacaccttcagacaggtggttagtgcgccctaaggactctccgcagcgtcgctcaggttcacagaacacgcccaggggcgtgtccagctgtcgtcggggagagcccacctccccggggggtgtggctaagggacgaggcgcttctcgtccagagcccaggtaatccgggcgggatcagcgagcgtcgcgatgtgatgacgtcaggccccgggcaggccgggagtggcgtgctgggcgtgcgcggctgcggtacggcgtgttggtcccagcggttcagctgaggtagggacgtgctgtaggccggaatgttaccggctgttggatctgcggatgaggaggaggatcctgcggaggaggattgtcctgaattggttcccatggagacgacgcaaagcgaggaggaggaaaagtctggcctcggcgccaagatcccagtcacaat

SEQ ID NO: 24356 - DNA, 2300 bp, Homo sapien
caataaacatgcagtgattgatttttcttacttcaagtggatgagtgagcaagtgactaaaatcttccgtgaattcttcagtgtatggtgcttgccagtgcatctgagaatctagggactttctgaaatagtacttccttgctatgaggactgaagttggattagaatccttttcaatgaagatcagatgtcctgagtagaattcttactattgggtcctgaatcttacattaaatattctctcaaattccttgaggcatagcaacttgagcttaccagtttagaaactggagatttgggctgggcgcggtggctcacgcctgtaatcccagcactttgggaggccaaggtgggcggatcacgagatcaggagatggagaccatcctggctaacactgtgaaaccccgtctctactaaaaatacaaaaaattagctgagcctggtggtgggcgcctgtagtcccagctactcaggaggctgaggcaggagaatggcgtgaacccgggaggcggagcttgcagtgagctgagatcgcaccactgcactccagcctgggtgacagagcgagactctgtctcaaaaaaaaaaaaaaacaaacaaaaaaaccggagatttggttaacaaaatagtcaaagtcactcttacagaagttttgttttattttttgttttttaaaatttttttaccattttgtagctgacaagtactgacaataaactgctataagcatgtgtagaaaaaggctcaccttgagtagttaagagtaaggaaaaggaatagtgtgtagcatcgtcttagtggtaagacttaagttgatttagtagcaaatggaagtactagtgaaccacatagatttcagaagtaggagtaaaaggttagaagatgtgtcattttaatcttctctagactttttcttaatttttagaaatgtaagtggactgaacagaggaaaaccaaaacacagctggtcaataataagttaaattaatttgacaaactgcctgctatgcatttcatagcattttaaggactatataagcaatggataaggcaaaaactctgcctttaaggagatcagtcattggggggaaacagaagcaaacaaacaaaaaggcaacataatagatattaatattaatacaagaattttaaaagcacagagttctataataataggaaaatagagggaatgcttgctcaacttttcttgaaaaagagtcaggaaaatattgaccgagaaggcagtcattgacctgagtcttaaagaatgaataaggtttttacagatggagtagggtagggataactttccaggtataaggaagattttgtattccagggacctttgaatattttagaatggctagaaaacttggtattatgtagcacagaaaaagtagtatgactgaagagatagagaacttaccacaaagggtcttgaatgccatgatacatagtttggattttcttctgtagggagcaaggagttagtgaaggattttaaaagcaacatgactcttgggaggtagattcaatgtgaggctaatctccgaggtataggaaatacaggaaggaggagcaacaggtcgggtagtggtggaagcaggtttggaaaatgtgattagttttgtaaacgtttttgagtttgaagtgccactggggaaggcttttggaaatttatttccagagttcaagactgagctatcattgcagtttgctcagctatttactgagctatctactgtcaatttggatagtatctacagtttgcattgtagatactggatacttggattggctggtgcaccctgtttgtgagactcactggagtttgaagagatgaccactggaaaatatccctaagcagtagctgcaattccacccccaccttggagagccaaaaccctcttcgttttcactctcctgtccttggtcttaggctacttaaagcagcctttagacatagggaaaaattgaaagcctctcttttaagaaaagcattaggtacttctggaatagagagttcaagaaattaggagaaaaatgaacttttgaagctttttctttcccttttttgtttacttcattctcttactcagttttaaaatgctggtaatggtcttttttttcttttttttttttcttggtgattttaatgctttggaaaagatctcatggttttatctccaaaggaggaaattaatttgatgccatggaaattagttttctagtcgtatgccttgaatgagtgaagaatttctttttcatggtggtactaaatttggggaaagctatagaa

SEQ ID NO: 24357 - DNA, 2300 bp, Homo sapien
agcataaatttggtttgttcatttaaaaatggtctttttttcccatcttagttctggctttactagggagatagattggctgaggttgtcacctaattctgggaggttaagaccctttgtcttttgctacccatttctgaaataaccagaagtctagcccatcctaacttttctctcgatgatccttttcttctttttacttcaaggttccagcccttcatttgactatcagtgctgtttcactagttagccatgatccctttcatccaccgtgtctggattagaactgtatttttaatttgatgctgtgggcagttttgatagttacagatcctgtgatacatttaaatgtgtttacaaggggaacaaatgaaacaatgctgcatgaaatttgcctttctttttttttttttttccccttggagacagggtctgggtctattgcccaggctagagtgcagtggtgcgatgtcagctccctatagcctctgtgtcctgggcttaagccgtcttcccacctcagactcatgagtagctgggactataggcacacactaccatgcctggctaattttttattttggtagaagatgaggttttgccatgttgccgaagctgatcttaaactcctgggcttaagtgatctgcccacctcagcctcccaaagtaatgggattataggcgtgagccaccacacttggccttttcttttttttatatttatttaattattttattttattgagacagagtctcactctgacacctgggctggaatgcagtggctatcatggctctctgcagtcgtgaactcctggactcaagtgatcctcccatctcagcctcctgagtagctgggactacaggcttgcacccatgcctggctaatttttttattgttacttttttgtagtgacaggctctcgctacgttgctcaggctcgtcttgaactcctggcctcaagtgattctcctacttggcctctcaaagtgctgggattataagcctgagccactgaacccagcaaaatttgcctttcttaaactaatttatctctgttgggtccaagagcttacaagttggttgtcatttaatatgttaaacactagaatattttttagttgaaattttattttttccctttacatgttgtatcctttagtgctttatttcactaataagaattatagtatgcaatcatttcccacctctatattcagtatatcaatttttgtttttcctttctacttctgtcttttgctataatttgctgtaatacaggtactttcatcaaggcatccagttctttatatcattctatatttttacttgggagaaatagaaatgttgctaattccatcttactgacaatacctaaattattgtttgttatagaacataatgatttaaatatacaaaacactaaactgtttgagattttttacattttatgcgtgcagaatttacattttatgtgtgcagagacaaaaattgttataagattacaagttaatgtgcaagatgatttccgattcatgagtttcaggttttgatagcatatccttatccactagattagtcttttaaaaatgtgtatgatagggaaaaaatcgaggccatgaaattctgagacttatgggaactaaacttaaatgttcgttgttagattttttttttttttttttttgctgcgtatgaagttctaggcagtcattgtccaacaacattaaatactgaacatatgggaaaagcatatgatttttcgaaatgtttttctaaagtaatctcattctacatacacttaagagcagttataatgctttagtgacacttgaagtagctatttaatgtgatctcaccactatagggaaggccgttgcatgacttttttgtgtgtgcttaactgctaaacaggagaatcttttcctgagcaaccagctgggaaggatttaatttgacattctccctactaggaccccccaaagagactcattccctccaatagttcctacaagttctttctctttcctaaacttgctgttactaatttacccctcactcttcttcaaggcaaagcatctgcaaggttttcagtcctttccccctcccgtcctgtccccatcagtgttgaaatgtatgctacagttattatggttgtaatttgttatgccatgttgatcttcttgtgcttttcatatcagaacaatgcatttttaacattctgactttctttttctctcaattggtaactgactatatagaaaatttatatttatggatactatttcttttttaataa

SEQ ID NO: 24358 - DNA, 2300 bp, Homo sapien
ccgttatctcctgttcccgcctttgacatgcccccatcaatgtgggtttccgttatctcctgttcccgcctttgacatgcccccatcaatgtgggtttccgttatctcctgttcccgcctttgacatgccccctcaatgtgggttttgtgttttgtttttgagtgcctccttatttttctcctgcatttttaaataaccccgatccctattgaagctggcgctgggaaaactaacaatactccctttcccaggtcatccgattcctatgctgatggaggaaatgtgcctcacatgccgggggcgctggggaggaggcgtctgggattttgtggttgaataagacacctggcctggccctcctggagcttagtttagtaggtcacacaagcagtcattggtaaatttgggattcaaacaaatctgttaggctcaaacctgtctgttatttgtcctccaagcttcatataaactgaggagccttaaagggtaaaaacttcaggagcagcaaagtttcaaaaaaagatcagcaagaaagctcttttccagattttatcctgaaggcactagctactttaagctattttttattatattttgcccttgcagttggcgtttgatttctcactgaacattcgttgtcataattatagacactatgtgactatcaagggcataatattctttcatgctgcatttttattagatggcacctcaaagttttcccaagtaggtgggttttaaattatgaatatataccgtggcatagtatcttacttagtattttaataagatccttatttatataacaaatattttttttattcctctgtagtgctactttagtctctgagctaattttcatgaagccaatctaaaaatcgtgttacttctaaggatgtggagcgagtgagatgaacagttgtgctgtcatattgcccctccccagtgcagacagtgaatgaggacccactgatttaaaggcaacactgcagccccttcttgcctcattgaagtcccaagttttattacagtaaaagcacttaatgttgacatttctgaaagaatgaagaggccgggcgcggtggctcacgcctgtaatcccagcactttgggaggctgaggcaagcggatcatgaggtcaggacatcgagaccatcctggctaacacggtgaaaccccgtctctactaaaaatacaaaaaaattagccgggcgtagtggcgggcgcctgtggtcccagctactcgggaggctgaggcgggagaatggcgtgaacccgggaggcggagcttgcagtggtccgagattgtgtcactgcactccagcctgggcgacagagcgacaacgtctcaaaaaaaaaaaaaaaaaaaaaaaggaaaaaaagaatgaagagccagagccaggcatagtggcacgcctgtagtcccacctactcaggaggctgaggcgggaggatcacttgagcccaggaattcaaagccagcctgtgcaacatagaccctgtctctaaaaatgaattggttataaaggatgaagaaaggaaggaggaaagggagagagagaagcccttatagagtgggtgcatttcttgtatgtggggccactttgtaagaacaggatttttcaaactgggcccatactggtatgtgtgaaatcaatttagttggttatggccatttttttttaaaaggaaatatcagtgatcactatagtgtaagtatattgtttcgtgaaagccatcttagttatgtattatgtctgtatgtgtaagattgtgatataaaatgtatttctgtggttaaatattcaaagaaattggagaaccattgctacaaggggacagaggactccgtgtgagctctcctgccttccctgaataaacttacacaatttagtgctgggacatttgaaccttttctgaaaatttgagtcaggggagagcatcttggggaggtgggaaggaaggtagaaggagcaaagcaacacccccctgaagcctgggaatattgtcagaaccttaaatataattcagctcaccattctgggtaaggacagactctaccaatgaaaatgggtgattaccagctgtgaaacacaaaaacatacttttacggttacacattcctttacaaacaaccgtgtacatttcagcctcctgccccaccatttcttttctccaggagggaaggctgcatgtcgagatggtcgtagaatgttgagtatcctactttcctacctcgcttttatttgcgcgggtttaaatgcgccttaacagaacccgtgcaaaggcttgcctactt

SEQ ID NO: 24359 - DNA, 2300 bp, Homo sapien
acatgactcccaacatagcaatgaatgtacagccacccggtgatattgctcctaatattcacggaagaagcgtaggatattacttccaaaatcgcagggagtgtacacctcttctgtgatattgttcctggtatcccgagggggagaggatgataataattccagtatcgcaggctgtgatcacccaccctgtgatattgttattaacatcctgaaagggagaggatgatattactccccgtaatagatagatattactccccataacagcgcaggaggtgtacacccaccctgtgatattgttcctaatattcagaggccgagaggtcgatattactctcaatatggcaggaagtgtacacccccgtgtgagatggtccttaataatattccaaggcggagggggagatattactcccaatatcgcagaaagtgtacccccccagggatattgttctcatgatcctggagggaagaggatgatattagtttaaatatgacagaaggtgtacacgcccccactgatactgtttctaatttcagtgtgggagaggaggatatgacacccaatatcgcagggagtagaaacacacctgtgatacggttcttaatattcagggtggaagaggatgatattactcccaatacagacgggtgtacaacctctgcacaccgagggtgtacacccatctgtcaaacagcacataatttccagagggggagatattacccccaatatagtaaacaggctgtgagtccaccgtggatcgtaatcactcgcgggggagaggaggtggctcttactccccatatcgcggggggtgcctccaccccttccgatgggggtcccaagacccagggaggggagaggggctggctctcagtctccgcctcgcgaggtacctccccaccttgcgatcggggtcccaagagccaggggggaagaggggctggctctctttgtggatgattctttttccattctcaggcagttttcttttttctttctttttttttttttggaggctgagtcttgctctgttgcccatgctttgctggatctcgggtgactgcaaccactgcctcccaggttcaagagattctcctgcctcagcctcctgagtagctgggactagaggcgtgtgtcaccacacccagctaagttttgtatttttagtagagatggggtttcaccatgtttgccaggatggtctctatctcctgaccttgtgatccacccacctcagcctcccaaagtgctgggattgcaggtgggagccaccgggtccagcctctccggcgattttcatacctgcatactctgatcactactctgttaaacagtcaaggagggtaagtattatcttcagatttccagagctctgtctctgtacagccctctcctcctcaatattctgccctatgaattctagccacattggccttcccagactcacagttctgtcttctcaactcaggaagatctctgagctccatctgcattctttcttcctgtgctgtggcctggaaagttttctaaggtgtttgggaggtcaattgtggggctagcctcatttgtttctcatctcttgaggatcactgccctttgatgcttgattccagtgattgattccctttgttgcttgagggccatagtttcatatattttgtccagtatttttgttgttttaggtcagaaagtaattttggtctctgttactccatcttggccagaagtgtaagacctaagcatttacacatcaaaatactgcacacataattttagtttaagctacctttaaaaaaatctgcttcattttccattaagcattctatttagggtattacattggtttttttgaaattctgttattggcagtttctattgcctatcaatcccatttaaagatagtgcatagggtattctaaaatagctgttaagcaaagagaaaattgggcctgatagggtgagaatcacagctctaatacctagagtgaccttataatgtattgtccaaaggagatatttttgacagtgaaagagggtgttgttagtaattatatcaggaccatggcctaaaccaggactatcccaggcagcctgggacatatttgtaccccatctctatttaatgcctttatacaattctttacttaattctaccagcctttattgagcctgctttctttgtctagctgagtgccacgtgctgacgtcactaagatcaatacagcaaactctgaaagatggacagagagacaggagatggtcctttataatgcagtgtgatctgtgctgc

SEQ ID NO: 24360 - DNA, 2300 bp, Homo sapien
caggaggctgaggtgggaagatcacctgaatctggggaggtcaaggctacagtgagccaagactgtgccattgcactccagcctgggcacaaagtgagaccctgtctcaaaaaaaaaaatgaaatttaatttaaaaaaagaaaattgctttgtaaaattaactttttcaatcaaaaccaagatttttcagatatagagaatgcagcccactggtcagatttgtcagttcaaagagaataaattctagtttcctatttttctagcctgcttatgattatccaataggatatcaaaaaagaccaaagcctttgggatccaagttcagtattcctgagtctaactcaggatgccaaatcaggagacaagcacattctcatcaattttcaatcattcgagaccaattttgcttataattatccagttcttttcgaccacctttctcctgaagccttatggctattcacttcactttagcataagcccccaagaaggtgaacaaaatgaggaaaagattggttaaagttggctgtttgaaattctgaaacatgtccaccattcccttcacccatgcccacccctcttagaagtagtactttcagattatttaagagtcgatgcttctatgtggattttaatttgtcatctgtcctttataacagctagtaggtttaatttgactctattttaagcatatattgacctatgctaattatctgttaaaataaattccactcttagagttaataaagtgtgtttgtcatggaagacccattgaagtaagaagctgaggagcccttatggtaaagtgggacaagaaataataagacataataattttcccatgcaaatcaacaaccgtagcttcaaaaatatcctgacccacaacaagtattggacaggccctgtttctctcactccctaaaaaattggctcgggaaggagtatgagagctcccatagctttcccaaggctcattattctccatcactccacaggaacagcctgtcagagaagagtgaaagaccatttgtcaacctctcttcaactccctgattctagccaaacttcatcaatcccaactgaggagccagagagaaatcaaaccccatatatgcagcatcattgtctactggagtcaaaaatcacaattccactacccaccccaacaccactggccctgtttctcccaattgctttttattgtgtttttaaaaaatcctctttccccatccctgcaacaccgagaaggaggaattatagtagataaatatgaagcatggagatcctttaaaagtgtttttaataataaatgagaaaatgaaaaggagagggttgggaaggaaggagggaattcaaatgccagagaattgttcagtttcgcttttaaagatgttaacactcatttatacatctgcaagacactccccttaaagaaaagttctatgagtgtgggtctggttgcatgaataaggataaaattacttttttagacgatgtttcccacatataattcagagacccctgaaattaggtatccctcttgtagatgtccttgagatgctgctggacctgggaaagaggaaactgggatatgggtctatgccaaaaggtgcttctagttacaggacagagaggaaaggggcagagggagaaaaacctgaagtctgagaatctggattgcagaagactaccgaggtcgtgggagaagggagagaaaacaaggatgaaaaccgaaaggggaagaggcatgaaatgttgccagatgtcaaaaggcatttggagagaagttgggaattgcattaagaaaaccactgcaaatctcatttcagaccatttagagatatgccccctgggaactgcgagctcaggctgtttagcatcaaacaaatggatccactccatccccaccctaattaaataaatcattcagtaattccactgggttaaagaaccaaaatattaaaaaccttcagggcctactcttgccaaatatgtcagggatcgtgtgtgtgtgtgtgtgtgtgtgtgttctgagacaccactactgttaaataggcagagctaagacttaggggactggcagactattgcaaaaagggcacggggcagagggactatgttgtgagcctgcgaaagaagtttgtgtggggactgtgggcagtgaacgcgttgggaacaatatggaaaactgggagccgccttggaatctacagggccgggtaagagaatgtccgaaagaaaaatgagcaggtgcgggatgtgcgcagagtcggagaagagtccagggcgcccggagtggc

SEQ ID NO: 24361 - DNA, 2300 bp, Homo sapien
acatgatctgacatggttaaggatgcctctggcttccctgttgagaatagactgaaggggcaaaaatggaagcagaagagcagttaggaggctcctgtcaaacccacgtggaaggcaggctctgggctgtgtcactggactaacactaacaccgtccccttgcacttctgagggtccctggaacttccctaggggatgagactcctggctagcaggactcagcccctccccttcaactttactcaggacctggtctcccctccttaaggtctctggagcccaacgcacacttcagcccactctcacaggcattctctctgtccacaaaatatcaccgaagagtcttctgtgagtgcagcatggtgtgaacactgggagtacaaggagaaataagacacagttgctgtgctggagaagcttgtgcccagtggtggtgatactgccggaggtgagaccactatgccagcacaggaacaaagacggcaggggcacagggcaattcaggggtgcagatctgggggcatccaagaggctcctaagcctcagtatataaactgacaggtcacagcctgctctaggaaacaccttcttaagggttggagttatctttgtgcatcccatccccaccccaccaagccgcccttggccctgccctcaggagcttctgcttggccttgctaattcctctcttctccctgaagctagagtgaggtccctcttggcagcctttgtatctagagagagccgtccaatagaaacataaggtgagcaacatgcttaattttaaaatttctagtagctacattaaacatttttaagtgaaattaactttaataatacatttacttaacccaatatatccaaaagattatcatttcaacatgcaatcctattttaaaaataactagtgaggtacctgacaaaaaaaaatcccttttcatactaagtccagaagatctttgtgtattttatactcataggacatctgagtttggatgttacctttttattggaaatatgggatctgtacttagatttcactgaatttacattgaaaaggtaggttcacatacccaagttgtctcacacgtacctaaatgttttctggtaactggatggagtatcagtttttatatttatctttgcattagctaaaaaacaaattaatagttcaggtcctcagccgcacacaggcagttttctccacggtccaaattgttgcccgaattcacccagaccccgctgtcctccgctttttcatgcagacattcaaacaactgcctcccttcctcctggcacccctcctggcacccccatcccatcgccagcagcctccaaaccagtttccctcctgtcctcatctcagccacccatgactcacacacacatctgtctcccctggcccacttttcacctggtcctcataatctatgcataaacattaacgtaccacaggtcaatctgcatactgattacttctgctctggtcaaattcttgctttcaggatcaggaggctttctccccacaccaaactgggcctgaggaaatagtgtcttgtcttcctgtcacccctcccgtagttgcatgtctaatgagacaaggggtgtctcaggtgaagcaggacagggaggatgccagcacttgggtggtagaggtttgaggagtgcctgttgggggatgtgttggggaaggaggacttttcacatatggctcattgtgtcgggatgatttcgttgttaaataagcacctacaggatgatttcacattccatacttctaagtttttataatttaaattctttccgccaggctgggttttttttttttttccaaactttaaatctgtggctagaattggtttgatttacctaatcctgcccctgagatttagccccatccctgagagccccctcagagccacccacagccaggacacctctgctggcctccccttccccagccttccaacttgtggcaggcccccggctctggcctccccctatatgggaatgagccagctgcaccgctgctgacagtggctgggataatcctccctgagctgttccaaggattagtcctgctgccctgtgcccagctcccacacaacggggtttcggggctgtggaccctgtgccaggaaaggaagggcgcagctcctgcaatgcggagcagccagggcagtgggcaccaggctttagcctccctttctcaccctacagagggcaggcccttcagctccattctcctccaaggctgcagagggggcaggaattgggggtgacaggagagctgtaaggtc

SEQ ID NO: 24362 - DNA, 2300 bp, Homo sapien
gtccaggctgaggtccaggattcccattgcagctcctaggaaatctttaaaattaggtcggggatgaggctgtcagtagattaggtagggaacttttatgaagttgagggtgaaccatctggagggtgaactggctggtgtgatttagaactgggggtggtgcctagcagtgcatttgtgagaagacacagccaggcttggtatatgatgtggtgtgtgtgtatattcacaggcatcgtggagcatatacactttttttgtgtgtgttgaaataaaccttacagattacaaagtacttttttttttccctgagacagggtctctctctgtcgcccagcctggagtgcagtggtacaatcatagctcactgcagcctcaatctcccaagctcaagtgatcctcccgcctcagcctcccatgtagctgggactacaggtgtgtgacaccatgactggctattttattttatttttgtagagatggaatctcacaatattgcccaggctgatctcaaactcttgggctcaagcagtcctctcgcgtcagcctaccaaagtgctgggattacaggcatgagccaccacgcccagccagattacaaaatactttgacatcttttctctacagccctcaaaaggaggcagggcaagcacaattaaatcccattacaaatggggtgactgaagctccattcatggcttgcccagggtcacacaaagaatgaatagcagagccctgagcctgtgtgcttccctctgtgccaggctgctttacccaggcatgggtgcaccttgtgcatgggacatttctcctttgttgtgtcctgagtaccttaagccactcagatattgctcaggtggagtgaggggaaaatgttttcaggttgtattagtcaaaacaaaataccacacactgggcgactttaaaatcatacatttatccctcacagttctggaggcttggaagtccaagttcaaggtggcagctggacgggttcctggtgagggctctcttcctggtttgcagacagccaccttctcttcgcatcctcacttggtgggaaaagacagaggagagaaagagagagagagaaatgagatagagagagagagagaaatgagatagagatagagagagagagagagagagagagagagagagggagacagagagacaatgctctcttttcttaccagatctataatgagggccccaccccatgacctcatctaaccgtaattacctaccaaaggcccatctccacataccatcacattaggggttagggtttcaacataagaatttggagaggacataaacattctgtctacaacatgagtggagatccatctcttccttacctctggtaaggggaccacacgctgcagccagtgagacagtggcatgttcttgttacaactcaatctaactcccccagaagaggaggcagggaaggcggacaaaactgggagagggagagagtgttaggaagagagtagggtggccagaggcagcaaataaaatataaaatgcttaattttgaatctcagataaacaaccaataatgttttttagcataagtatgtcccaaactaagcttgggaaatatttatgctacgaaattattcgttgtttatctaaaattcaaactagctgggcatcctgtcttttaatctggcaaccctaaaaggcaagagccaaaaatgccggagggaagccaacggattccaggagggacaactgctggactttggactgatgatgctctttttatatatttaactttttaaaaaagcctcttttctttctttttaccagcttttcactagctttttaaaaattggggtaaaacatacataacctaaaattcaccgtctaaaccatttttcagcatacagttcagtgggattaagtagattcacaccgttgtgccgccatcactaccactcatttccagcacctttccatcaccccagcctgaaactctacccattgaacacgagctgcccaactccgccttgcttccccattcctggcgaccactgcttctgtctctgtgaattctgactactctaggcacttcacaaaagtggactcatacgatatctgtagttttgcgtctggcttctctatttaattcttaaaggggggtgggaactaaacagatcacaagggagctgcccacagaggtaaagacaaggtcagataggctgagagacgcaggaaagcgggtcaatgtgtagggctggagggcaggggcgggccctgggcctgggctgggggtcctgccccggggcgca

SEQ ID NO: 24363 - DNA, 2300 bp, Homo sapien
tacaggcatgagccaccacgcccagccagattacaaaatactttgacatcttttctctacagccctcaaaaggaggcagggcaagcacaattaaatcccattacaaatggggtgactgaagctccattcatggcttgcccagggtcacacaaagaatgaatagcagagccctgagcctgtgtgcttccctctgtgccaggctgctttacccaggcatgggtgcaccttgtgcatgggacatttctcctttgttgtgtcctgagtaccttaagccactcagatattgctcaggtggagtgaggggaaaatgttttcaggttgtattagtcaaaacaaaataccacacactgggcgactttaaaatcatacatttatccctcacagttctggaggcttggaagtccaagttcaaggtggcagctggacgggttcctggtgagggctctcttcctggtttgcagacagccaccttctcttcgcatcctcacttggtgggaaaagacagaggagagaaagagagagagagaaatgagatagagagagagagagaaatgagatagagatagagagagagagagagagagagagagagagagggagacagagagacaatgctctcttttcttaccagatctataatgagggccccaccccatgacctcatctaaccgtaattacctaccaaaggcccatctccacataccatcacattaggggttagggtttcaacataagaatttggagaggacataaacattctgtctacaacatgagtggagatccatctcttccttacctctggtaaggggaccacacgctgcagccagtgagacagtggcatgttcttgttacaactcaatctaactcccccagaagaggaggcagggaaggcggacaaaactgggagagggagagagtgttaggaagagagtagggtggccagaggcagcaaataaaatataaaatgcttaattttgaatctcagataaacaaccaataatgttttttagcataagtatgtcccaaactaagcttgggaaatatttatgctacgaaattattcgttgtttatctaaaattcaaactagctgggcatcctgtcttttaatctggcaaccctaaaaggcaagagccaaaaatgccggagggaagccaacggattccaggagggacaactgctggactttggactgatgatgctctttttatatatttaactttttaaaaaagcctcttttctttctttttaccagcttttcactagctttttaaaaattggggtaaaacatacataacctaaaattcaccgtctaaaccatttttcagcatacagttcagtgggattaagtagattcacaccgttgtgccgccatcactaccactcatttccagcacctttccatcaccccagcctgaaactctacccattgaacacgagctgcccaactccgccttgcttccccattcctggcgaccactgcttctgtctctgtgaattctgactactctaggcacttcacaaaagtggactcatacgatatctgtagttttgcgtctggcttctctatttaattcttaaaggggggtgggaactaaacagatcacaagggagctgcccacagaggtaaagacaaggtcagataggctgagagacgcaggaaagcgggtcaatgtgtagggctggagggcaggggcgggccctgggcctgggctgggggtcctgccccggggcgcacccagggcgagggctgcccggaggagccgaggctggcggacagcttggccctgagcttgaggggaaggcagcgatgggacaaaggacggaggtctaggaagagggtctgcagagcagaaagcacgggtaggggcggcctgacgctcggaagacaacggatgggagccgtgtgcacgtcgggagctcggagtgagcgtgagttccgtgcccaggcccgcgactcggtccaccaggacagcgctccgggtcgacggggtcctggagccgcgctcggggagggcgcagcggagggtgagcggcggcgttaggacccggaggcgcgggcggaggtggcggggctaggacccagcggctccggcagagcggaagcggcggcgggagcttccgggagggcggctcgcgggtgaggaggcgtccggggccgcgggaagtagggtcgtgggggcctggcggggcgaagtaggggacccggaggggctggagggaggcgggcgggaggcccgggaccgttcctgaccgagaagcctgcgccaagctggtgttccgcggccgctgcccggtgccc

SEQ ID NO: 24364 - DNA, 2300 bp, Homo sapien
ttcaagtgattctccttcctcagcctcccgagtagccgggattacaggcatgcaccaccacgcctggctaattttgtatttttagtagagatggagtttcaccatgttggtcagactggtctcgaactcccgacctcaggtgatctgcctgccttcgcctcccaaagtgctgggattacaggcgtgagccgctgcgcccggccgagaggcacacattctgctaagagctttttcctgactcccctaactccaagagggatttgtcactccttagctttgtactcatgactggagtagaatgaatttaatttgagtttagttgtttttgagactctccctggctagtgtagtgtcttattcgtctttgttgtgatcatggcctgcacctaacagatgatcagtagatgtttgcagacagaaagtaaaccactcatcaggtgtattcagtcccgttcttgaacgggcttgctgcctcctttttgaggagatctgtgtatgtactcttctttcacgcatatgtgtgagcaaacacacacacactaacaagaaattcatctgaagatgtgcacaggaaatatcttgcatctttaccccctttgtgatcttacatatgggagaactgaggcacagaaataagttaggacagccagcaaacttgcatcagtataaatacaaagaagggaagggaggaacatgcttgaaaggggtgtgctggtctcagagggttaggtttctcagttggctgggcatcagctggccatgctttagttatttgatgggaggaaaaataagtgggaggtgaggagtaactcctgggctctgatgagtattataggcaagtacagatctggaaagcctgtatgcaaaggaggaactcactgaaaagtgctggcctgaggagggcagaagggagggctggggaagccagcagggggagcaaaggagtaggctccagctgggtgaagatgttggtgtggtatgttatgtaaaatatacaaattattattgggaataaccacgtctcagcagtgcgagttctcagtttgaagaatgggaaatggaaaggatcagattcagagacggcaacttactcaaggtcacagcattttaaacccaaatgaaatctcctaggcccttcatgccacactcatccatccctacctacttgtgttgcaaccaagggccccactgtagtgcctaggggagcaggtctagggcatagtgccaggcctgattaatgtcttccttaccattttccagcgaggggctgtgattaggcctatttataggggcctggtcccttaatattctgcctggtgcatctcttgccaatcaaatcagtgctgtctgcagtgtgattgctgctttagtggcaccagggagaggagttaattaaacccaatataaatagactctgccctcactgtgcaattccaggagtgtttttccttcctgtcctctacccccacaggcacctctttcctcttggccccctaagctctagcctgggtgagcagggctggatactcctatacctagagtcactagccactgcccagtctgtttcaggagcaggcctcaaattcctcaggggttaaagtgggaagaacccgtgtgtgcgcattttttgtgcttttccagaactgggtaccatttggcagttgatcacgcaatctcccccgctaccccatttctacccctttgtttccagcctcttctttcctctgcaaccaaggtttcttgtttatccaaggtggggagctgaactgagacaatgtatggaaagggtgcctggcaggtagcaagcaccttgtagggggtcagaaatgttgcaccttctctgaactcctccattgaccctacagattccccagtccctggccctgccctttccctcattcactcagcaggcatcagcagagtcccatctatgcgctcctggcctctcagcaaatgctctgtcccctactcccctatctgtgcaggctgaagctatgtgcatagttgggatgagggctgtgttgtctcaacaccacgctgccctgtggtgggggcgtgccggtggtcgtgggtggctctgatgctccggctccgacccacaggcaccatgactcctgtgaggatgcagcactccctggcaggtcagacctatgccgtgcccctcatccagccagacctgcggtgagaggaggccgtccagcagatggcagatgccctgcagtacctgcagaaggtctctggagacatcttcagcaggtgggtgctgccactcacccccacctgatgagagggccatccct

SEQ ID NO: 24365 - DNA, 2300 bp, Homo sapien
ctggtggggtctggaaatgggggccgcaggcttggagggaggcctcagtgtggcttggaacgtggtgtatggtggtctgccgcgaaggccggcctgcacaggggtgggaggggggtgcttctgcatgggaagcacagacagcgctgcctctcccttgcactcagctctcggggcatgagaggctgactttccgtgagcctgtgggccaggcctctttgaatggggctgagggagctttgccctggttcctttgtgtccccacggtgccacgggaggctccctggcagggtgtggggcaaggcagtgagtgaagagttgggatgagtgagttagggcccacggattactcaagacaggacttcacgttgattcaggagtgttagggagctgtgattggattttgagcagggcagggatgggacagaagagtttggggaaggttcctcaggcatccgtcacggaagggataagaagggagagagagtggatgccggggacacccagaagctgttattgtagtcaggatgtgacaggggtgaggctacagacaggggacttgcaagcagggagggcagggtgagacattcagaggaaacgacgacaggaaatggtgacagatagggaatgaggatgaagggaagggagagccagtgacgactggcagtggagtggggagcaccgccacctctcctcctccacttgcccctcctgtggcactggacaagttagtgggcttttcgttgtccatgggcttttttggtggggatgtgaccagctttgaacccttccccttaaacatgctcctcctgcacggaagagacaggggcaggggagagactctctccccaccacccagctcaggccccagcacagcccggcttctggcctcactggcgtctgtgcccagtgacgcaggcaggtgagctcctggcaaattagcattgcaggctgtgctctctcctcctgctctgctgcagctgggagtgtgcagagactggaggggatgacagtcacccctctgttttctgtggtggctctgttttctgtggtgctggatgcacctctgttttctgtgttggctcccagagagtgcacggtccctgctgattgaaagaaggatgaagggcagaagaggggcggggagctgtgtgccctaagatctcattgcctttttatgccgattaacatgcttttagcccctactgagcttatagttaacagaagtttccaggtctttcttcacctgaactgtgtctaaagcaagttccctccaccttctgtatttatacgcttgatttttaaaacctaaatgggcttcacatttattccttgtaaatttcatcttggtgattgcagtctaccctctggcctttaaaaattgtctgagccttgattcgatcatgaaaccagcttacccttcccctgtgtgctggccccagttttctaaccaggtgttgaatgaactgccagatccctccgtgcaaggctggaatcagtccattgttcaactgtgccctttggggctgtggttcatttggctctgatttttcctatatgttctctcctccaacccccatagctccatcttgtctacaagattttgttagaagccgtcaaaatcctgctgactcgagatgcactgtgctgcatgttttccccgggcacagcaggctaataatcctgttacaaagagaaatgctgtacatttcgagcagtgctggcccctgggactcaccgtggccttttctaagtgcttacagactctgtttaataatccattccagaaattttccagggctcattgttgagcttggtgttcgcaactttgagtgatcagcccttctcctttgtgggagcaccaggacagagcagcctttgtccctccccagtctcagttccctcccattgcccctgtggacctcgaatgcagagcttatgcacctactgaaggtcgtgtcagcacccaaggcagaatgaggctgtcctgggaactagggtaaattaaaacagcttgtgctggaggaccctttacagcagatgaaggcctctccccagccagaaaagatggagcacacgctgggtggtggccccgcttcctcactgaaaggagatggtgctcttcttttttctttctgaattgtggccaccttcataccagtctgtcatggaacacttaagccgcttgagtgcctgctggtactcccagccctgccatgcctgagccccctgcacacaaggagccaggagtaatcagggcagacccattagggcacggggacttctggattgtgaaattggct

SEQ ID NO: 24366 - DNA, 2300 bp, Homo sapien
attgtagtcaggatgtgacaggggtgaggctacagacaggggacttgcaagcagggagggcagggtgagacattcagaggaaacgacgacaggaaatggtgacagatagggaatgaggatgaagggaagggagagccagtgacgactggcagtggagtggggagcaccgccacctctcctcctccacttgcccctcctgtggcactggacaagttagtgggcttttcgttgtccatgggcttttttggtggggatgtgaccagctttgaacccttccccttaaacatgctcctcctgcacggaagagacaggggcaggggagagactctctccccaccacccagctcaggccccagcacagcccggcttctggcctcactggcgtctgtgcccagtgacgcaggcaggtgagctcctggcaaattagcattgcaggctgtgctctctcctcctgctctgctgcagctgggagtgtgcagagactggaggggatgacagtcacccctctgttttctgtggtggctctgttttctgtggtgctggatgcacctctgttttctgtgttggctcccagagagtgcacggtccctgctgattgaaagaaggatgaagggcagaagaggggcggggagctgtgtgccctaagatctcattgcctttttatgccgattaacatgcttttagcccctactgagcttatagttaacagaagtttccaggtctttcttcacctgaactgtgtctaaagcaagttccctccaccttctgtatttatacgcttgatttttaaaacctaaatgggcttcacatttattccttgtaaatttcatcttggtgattgcagtctaccctctggcctttaaaaattgtctgagccttgattcgatcatgaaaccagcttacccttcccctgtgtgctggccccagttttctaaccaggtgttgaatgaactgccagatccctccgtgcaaggctggaatcagtccattgttcaactgtgccctttggggctgtggttcatttggctctgatttttcctatatgttctctcctccaacccccatagctccatcttgtctacaagattttgttagaagccgtcaaaatcctgctgactcgagatgcactgtgctgcatgttttccccgggcacagcaggctaataatcctgttacaaagagaaatgctgtacatttcgagcagtgctggcccctgggactcaccgtggccttttctaagtgcttacagactctgtttaataatccattccagaaattttccagggctcattgttgagcttggtgttcgcaactttgagtgatcagcccttctcctttgtgggagcaccaggacagagcagcctttgtccctccccagtctcagttccctcccattgcccctgtggacctcgaatgcagagcttatgcacctactgaaggtcgtgtcagcacccaaggcagaatgaggctgtcctgggaactagggtaaattaaaacagcttgtgctggaggaccctttacagcagatgaaggcctctccccagccagaaaagatggagcacacgctgggtggtggccccgcttcctcactgaaaggagatggtgctcttcttttttctttctgaattgtggccaccttcataccagtctgtcatggaacacttaagccgcttgagtgcctgctggtactcccagccctgccatgcctgagccccctgcacacaaggagccaggagtaatcagggcagacccattagggcacggggacttctggattgtgaaattggctctctgggggccaaggccttctaacgttggtggaagtggctttggcttattgggtcggattctaggccattcattccaacctttagagacatcccagctttccctagcccagagtctgcagcccctccaccatcccacatcctccccctccctttcctcatgaaccccagtcgcgcctctgccttctcaaacccctccaccatcccacaccctcctcctgcccttcctcatgaaccccagtcgcgcctctgccttctcatccctgcgcaccacacaggctcgctcgtgcccggtgagtgctgaggctgctctgcacatggagtgtggccctgtgggcaagggctgggctcttggaggtaggggagctacaggggcgactgggaggaggatgtcgtgttacacacgcatcagagttaactttgcagtgagagcggccttgctgcggccaaagaacatggaaaagcatgagtggggtgatgtgtgccttaaagcatcagacacttgggcctcggg

SEQ ID NO: 24367 - DNA, 2300 bp, Homo sapien
ctgaattgtggccaccttcataccagtctgtcatggaacacttaagccgcttgagtgcctgctggtactcccagccctgccatgcctgagccccctgcacacaaggagccaggagtaatcagggcagacccattagggcacggggacttctggattgtgaaattggctctctgggggccaaggccttctaacgttggtggaagtggctttggcttattgggtcggattctaggccattcattccaacctttagagacatcccagctttccctagcccagagtctgcagcccctccaccatcccacatcctccccctccctttcctcatgaaccccagtcgcgcctctgccttctcaaacccctccaccatcccacaccctcctcctgcccttcctcatgaaccccagtcgcgcctctgccttctcatccctgcgcaccacacaggctcgctcgtgcccggtgagtgctgaggctgctctgcacatggagtgtggccctgtgggcaagggctgggctcttggaggtaggggagctacaggggcgactgggaggaggatgtcgtgttacacacgcatcagagttaactttgcagtgagagcggccttgctgcggccaaagaacatggaaaagcatgagtggggtgatgtgtgccttaaagcatcagacacttgggcctcgggcatcaggagccagccacagggatgtctggggaaatggcgttccatgagatgcaagcacacaagaatgcacttggcacatctggggaacagcaggcagctgatatcactgggcccaccctgcaccagggaggatggaagcaggtgaggagctagaccacactgaggcggtggtcgggactcagggtttgctcagtgagccgttcactatgtgcaggggcagttccccgtctgaatttaggtgacgacactcaggtccagccttgccagtctcagcctccggtctccgttccccctctgcagaggccactttgtctgctgcacgtgatcatgaggggctgtgaagtgcttgccccatcagtagccatgtgtgcatgtgtaaataccatcctctgtgtgccctggaggctgtccttcagatagcatgtacaggtggcagcatagggcctgtccctactgagagtgcagggaactcagcaccgtcaactcctcgaccctgcaggtcagattatccttgtagaggccccctggatggcaccaagatcggccctggcaagcaggtgaccctgacttcagagcccttgcctgagggcctggcctggcagctctgctgttagaagcaggaggtgtgcagggggtggggagcagcccagcctctgtgatcttctccatggcaggatctcccagcaggtagagcagagccggagccaggtgcaggccattggagagaaggtctccttggcccaggccaagattgagaagatcaagggcagcaagaaggccatcaaggtagtccccatgcccctgtgtcctgaggctactgggcagtccctccatttccccgtgcctctgaggctgcccagtctctgccctgctgcccacctgtaccttgggctttcttctcgcccaggctcccaactccaccctcttcctgccaagcaatcctagccctctgagcctcttggggccccctcagacttgtccctgtgtccacaggtgttctccagtgccaagtaccctgctccagagcgcctgcaggaatatggctccatcttcacgggcgcccaggaccctggcctgcagagacgcccccgccacaggatccagagcaagcaccgccccctggacgagcgggccctgcaggtctgctggctgcgcacataacttagcctgtcacacaccaggaggactggatgctggggaggagccggggccaccatagggttctgtcccccagaggaggctgactgggatggggtggcagctgattaggcccagcaccaaatattcaccatcccttggccatcctggccctcccaggagaagctgaaggactttcctgtgtgcgtgagcaccaagccggagcccgaggacgatgcagaagagggacttgggggtcttcccagcaacatcagctctgtcagctccttgctgctcttcaacaccacctagaacctgtatggccagaaggcagggccgaggggtgtgggcgggaggcccggcctggcttagtggggacccagggcatcagacacaggtacagcacatgggccaggagccagggggtgactggggtggctcggctcgggaggcttgggaccccaagtgcacgctgtgcccctg

SEQ ID NO: 24368 - DNA, 2300 bp, Homo sapien
tgcccctgtgtcctgaggctactgggcagtccctccatttccccgtgcctctgaggctgcccagtctctgccctgctgcccacctgtaccttgggctttcttctcgcccaggctcccaactccaccctcttcctgccaagcaatcctagccctctgagcctcttggggccccctcagacttgtccctgtgtccacaggtgttctccagtgccaagtaccctgctccagagcgcctgcaggaatatggctccatcttcacgggcgcccaggaccctggcctgcagagacgcccccgccacaggatccagagcaagcaccgccccctggacgagcgggccctgcaggtctgctggctgcgcacataacttagcctgtcacacaccaggaggactggatgctggggaggagccggggccaccatagggttctgtcccccagaggaggctgactgggatggggtggcagctgattaggcccagcaccaaatattcaccatcccttggccatcctggccctcccaggagaagctgaaggactttcctgtgtgcgtgagcaccaagccggagcccgaggacgatgcagaagagggacttgggggtcttcccagcaacatcagctctgtcagctccttgctgctcttcaacaccacctagaacctgtatggccagaaggcagggccgaggggtgtgggcgggaggcccggcctggcttagtggggacccagggcatcagacacaggtacagcacatgggccaggagccagggggtgactggggtggctcggctcgggaggcttgggaccccaagtgcacgctgtgcccctgatgatgtgggagaggaacatgggctcaggacagcgggtgtcagcttgcctgacccccatgtcacctctgtaggtacaagaagtatgtcttcctggaccccctggctggtgctgtaacaaagacccatgtgatgctgggggcagagacagaggagaagctgtttgatgcccccttgtccatcagcaagagagagcagctggaacagcaggtgggaggggtgggacagaggtggagacaggtgcagtggcccagggccttgccagagctcctctccagtcaaggctgttgggccccttattccacccatgggaggtgcacacaaggtcttgttggctgcccctgcaggtccctgtcacctctcacatgtccctgcctaatcttgcaggtccctgagaactacttctatgtgccagacctgggccaggtgcctgagattgatgttccatcctacctgcctgacctgcccggcattgccaacgacctcatgtacattgccgacctgggccccggcattgccccctctgcccctggcaccattccagaactgcccaccttccacactgaggtagccgagcctctcaaggtaggtgagctgggttctgggatgggagctgggccggggacctccctgctcacacaccttcttccctagacaccccacactttgtgtttcagacctacaagatggggtactaacaccacccccaccgcccccaccaccacccccagctcctgaggtgctggccagtgcacccccactcccaccctcaaccgcggcccctgtaggccaaggcgccaggcaggacgacagcagcagcagcgcgtctccttcaggtgggagcagctctttgaggccacctgatttctggcgtgctcagtgcactcgggtggattttctgtgggtttgttaagtggtcagaaattctcaattttttgaatagtttccatttcaaatatcttgttctacttggttcataaaatagtggctttcaaactgtagagctctggacttctcacttctagggcagagggagcctgaacaagtgaggctctgggttcctcattcctaattaaaccaatggaaagaaggggtctaataacaaactacagcaacacatttttcatttcagcttcactgctgtatctcccagtgtaaccctagcatccagaagtggcacaaaacccctctgctggctcatgtgtgcaactgagactgtcagagcatggctagctcaggggtccagctctgcagggtgggggctagagaggaagcagggagtatctgcacacaggatgcccgcgctcaggtggttgcggaagtcagtgcccaggccccacacagtcttcaaaggtctggcctccccagcgtggggctcctcgtttgaggggaggtgacttccctcccagcaggctcttggacacagtaagcttccccagccctgcctgagcagcctttcctccttgccctgttcccca

SEQ ID NO: 24369 - DNA, 2300 bp, Homo sapien
gagagcatcgcgagggcggagctgcgttctcctctgcacagacttcggggctattgcgaaggcggagcagagttcttctcaggtcagacccgggcgggcgggctgagggcactgcgacggcggagctgcgttctgttcagcacagacctggggggcaccttaaaggcggagcagcattcttctcagcacagacgttgggttagggtgagggtgagggttagggtgagggttagggcgagggttagggttagggctagggctagggctaggggttagggtaggggttagggttaggggttagggttgggttagggttgggtttggggttggggtagggttagggttaggggttagggttaggggttagggttaagggttagggtagggttagggtaagggttggggctggggttggggttaggggtagggttagggttaggggttaggggttggggttagggtagggtagtgttagggttagggtttagggttagggtttagggttagggtttagggttatggttagggttaagggttaagggtcagggtcaaggtcagggtcacggttttagggtgttagggttagggtagggttagggttagggttgggttagggttagggtagggttagggtttgggttagggttagggtaagggttaagggttaagggtgggggttggggttaggggtaggggtaggggtagggttggggttggggttggggttaggggttagggttaggtttagctaaccctaaccccaaccccaaccccaaccccaaccccaaccccaaccctaacccctaaccctaaccccaaccccaacccttaacccttaccctaaccctaaaatcctaaccctaaaaccctaaccctgaccctgaccctgaccctacccctacccctacccctacccctaaccccaaccccaaccccaaccccacccctaccccaaccccaaccccaaacccaacccaaaccctaaccctcaccctcaccctgcaatgcagcccctcgccttgctttgggagaatctcgctgcccaggattcagaggggctttttctttcccgttttccgcactgaaccgctctaactggtctctaaccttgattattcacggctgcaaccgggaaagattttattcaccgttgatgcgccccgagttgtcacaaagccaggcagtggccccaacctctgtgcttaggggaatgctgctccacctttacggtgacccccaggtctgtgctgagcagaacgcagctccgccctcgcggtatcctcagcccgcccgcccgcccgggtctgacctgaggagaactctgctccgccttcgcagtaccactgaaatctgtgcagaggacaacgcaggtccgccctcgcggtgctctccgggtctgtgctgaggagaacgcaactccgccgtcgcaaaggcaccccgcgccgcgccggcgcagagaggcgcgccgcgccggcgccggcgcagagaggcgcagggctctcttgcttacagtggtcgccagcgccccctgctggcgccggggcactgcagggccctcttgcttactgtatagtggtggcacgccgcctgctggcagctagggacattgcagggtcctcttgctcaaggtgtagtggcagcacgcccgcctgctggcagctggggacactgccgggccctcttgctccaacagtagtggcggattatagggaaacacccggagcatatgctgtttggtctcagtagactcctaaatatgggattcctgggtttaaaagtataaaataaatatgtttaatttgttaactgattaccatcagaattgtactgttctgtatcccaccggcaatgtctaggaatgcctgtttctccacaaagtgtttacttttggatttttgccagtctaacaggtgaagccctggagattcttattagtgatttgggctggggcctggccatgtgtatttttttaaatttccactgatgattttgctgcatggccggtgttgagaatgactgcgcaaattgccggatttcctttgctgttcctgcatgtagtttaaacgagattgccagcaccgggtatcattcaccatttttctttttgttaacttgccgtcagccttttctttgacctcttctttctgttcatgtgtatttgctgtctcttagcccagacttcccgtgtcctttccaccggtcctttgagaggtcacagggtcttgatgctgtggtcttgatctgcaggtgtctgacttccagcaactgctggcctgtgccagggtgcaagctgagcactg

SEQ ID NO: 24370 - DNA, 2300 bp, Homo sapien
tacactgtatttcttttcaatgaagttatcttccatctttgtactgcctcttggtgaaaagctgtcttccaagttaataactgggacatcagctctccgcagtaatagctccttttcagttttaatttacagaactgatggggattaataactggcgctctgactttaagtggtgcaggaggtggccaatatgggacgccagccgtcacaccgggagcaagagggccctgcgtagtccccatgtgcctgcatgtggcgtgcagccacgacaatgcgagcaagagggcccggcagtgtgcccagctgccagcaggcgggtgtgctgccactacaatgtgaggaagagggccctgcaatgttcctagctgccagcaggcggcatgccaccactatactgcgagcaagagagccctgccgtgccccggcgccagcagggggcgctggacagcactgtaagcaagagggccctgtagttgtcctagtcgccagtagggggcgcaatggcagagcaccgtgggcaagctggtcctgtagtgcccggctgcaagcagcgggcgcccgaaacgggcttttcagattactcaggttccactcgtctctgcgccgccgggtacgtgtgtctctgcgcctgcaccgcgccacccccgcgctccccgcccggcggcgcgcgaatgtacgactgcaacactccccgccaccctcagcccagcgacgtgcgtctctgcgccggcgccgcgcctcactcccgcccgcccagcgacccctcccctccggggaggcgccggcgtacgtctatgccctgcgccgcgtctccccaagagcgccgcgcctctccgcgcctgcgcctcggcgcgcctgcgcctctccgcgcctgcgcctcggcgcgcctgcgcctctccgcgcctccgccggcgcgccgcctttgcgagggcggagttgcgttctctttagcacacagccggagagcatcgcgagggcggagctgcgttctcctctgcacagacttcggggctattgcgaaggcggagcagagttcttctcaggtcagacccgggcgggcgggctgagggcactgcgacggcggagctgcgttctgttcagcacagacctggggggcaccttaaaggcggagcagcattcttctcagcacagacgttgggttagggtgagggtgagggttagggtgagggttagggcgagggttagggttagggctagggctagggctaggggttagggtaggggttagggttaggggttagggttgggttagggttgggtttggggttggggtagggttagggttaggggttagggttaggggttagggttaagggttagggtagggttagggtaagggttggggctggggttggggttaggggtagggttagggttaggggttaggggttggggttagggtagggtagtgttagggttagggtttagggttagggtttagggttagggtttagggttatggttagggttaagggttaagggtcagggtcaaggtcagggtcacggttttagggtgttagggttagggtagggttagggttagggttgggttagggttagggtagggttagggtttgggttagggttagggtaagggttaagggttaagggtgggggttggggttaggggtaggggtaggggtagggttggggttggggttggggttaggggttagggttaggtttagctaaccctaaccccaaccccaaccccaaccccaaccccaaccccaaccctaacccctaaccctaaccccaaccccaacccttaacccttaccctaaccctaaaatcctaaccctaaaaccctaaccctgaccctgaccctgaccctacccctacccctacccctacccctaaccccaaccccaaccccaaccccacccctaccccaaccccaaccccaaacccaacccaaaccctaaccctcaccctcaccctgcaatgcagcccctcgccttgctttgggagaatctcgctgcccaggattcagaggggctttttctttcccgttttccgcactgaaccgctctaactggtctctaaccttgattattcacggctgcaaccgggaaagattttattcaccgttgatgcgccccgagttgtcacaaagccaggcagtggccccaacctctgtgcttaggggaatgctgctccacctttacggtgacccccaggtctgtgctgagcagaacgcagctccgccctcgcggtatcctcagcccgcccgcccgcccgggtctgacctgaggagaactctgctccgccttcgcagt

SEQ ID NO: 24371 - DNA, 2300 bp, Homo sapien
gttaaaattcattacgaaacgcaaaggcacatagcttttcctctatagtttcttctagaaattgtatagttttgcatttttagtgtaaggatgattttgagtgattatttgtgtaagttgtaaagttttcatctacatgcatatcatttcttatggtttccaattaatcattccctcactatttttgggaaagacacaggatagtgggctctgttagagtagatagctagctagacatgaacaggagggggagctcctggaaaagggaaagtctgtgaaggctcacctggagggaccaccaaaaatgcacatattagtagcatctctagtgctggagtggatgggcacttgtcaattgtggttaggagggagaagaggtacctacgcagaaacaccctagaacttctcttaagatgccccaatcggatgggcgcggtggctcacgcctgtaatcccagcactgtgggaggccgaggcgggtggatcatgaggtcaggagatcgagaccatcctggctaacaaggtgaaaccccgtctctactaaaaatacaaaaaattagctggcgcggtggcgggcgcctgtagtcccagctactcgggaggctgaggcaggagaatggcgtgaacccgggaagcggagcttgcagtgagccgagattgcgccactgcagtccgcagtctggcctgggtgacagagtgagactccgtctcaaaaaaaaaaaaaaaaaagaagccccaatcatcattcattctgcaataaaaatgtcagaatattgctagctacatgctgataagaaggacaaaggggacattcttaagagaaacctggcaccataagtacagattaaggcagagaaagacattcaaaagaggcagctgcagtagatacaaacgtgaccgctgtcagcctgcctggtatggtgggaaggaggctggtgccagagtggattcggattgatcaccacacatgtacctcaatcaagtgaggaggtcccacaaggctaagtggggcaagtcggggacctaaggcagtagcaggaaaaccaaagaaaacaggcggagacttgagacagaggtaggaatgtgaagaagtccaaaataaaaatccctgcacaggactcttaggctgttttcatgcagtatcagcctactcctccctatttttgtacaataagctctttacactgtatttcttttcaatgaagttatcttccatctttgtactgcctcttggtgaaaagctgtcttccaagttaataactgggacatcagctctccgcagtaatagctccttttcagttttaatttacagaactgatggggattaataactggcgctctgactttaagtggtgcaggaggtggccaatatgggacgccagccgtcacaccgggagcaagagggccctgcgtagtccccatgtgcctgcatgtggcgtgcagccacgacaatgcgagcaagagggcccggcagtgtgcccagctgccagcaggcgggtgtgctgccactacaatgtgaggaagagggccctgcaatgttcctagctgccagcaggcggcatgccaccactatactgcgagcaagagagccctgccgtgccccggcgccagcagggggcgctggacagcactgtaagcaagagggccctgtagttgtcctagtcgccagtagggggcgcaatggcagagcaccgtgggcaagctggtcctgtagtgcccggctgcaagcagcgggcgcccgaaacgggcttttcagattactcaggttccactcgtctctgcgccgccgggtacgtgtgtctctgcgcctgcaccgcgccacccccgcgctccccgcccggcggcgcgcgaatgtacgactgcaacactccccgccaccctcagcccagcgacgtgcgtctctgcgccggcgccgcgcctcactcccgcccgcccagcgacccctcccctccggggaggcgccggcgtacgtctatgccctgcgccgcgtctccccaagagcgccgcgcctctccgcgcctgcgcctcggcgcgcctgcgcctctccgcgcctgcgcctcggcgcgcctgcgcctctccgcgcctccgccggcgcgccgcctttgcgagggcggagttgcgttctctttagcacacagccggagagcatcgcgagggcggagctgcgttctcctctgcacagacttcggggctattgcgaaggcggagcagagttcttctcaggtcagacccgggcgggcgggctgagggcactgcgacggcggagctgcgttctgttcagcacagacctggggggcacc

SEQ ID NO: 24372 - DNA, 2300 bp, Homo sapien
taaatacacctctgtatatattcttcatctttgattgtggaaatgatataatcaacataaaaatgttttatagattggactaaagacctttgaggtctcttcacaggatcctatctggcggacccccaaatctgccaacacagaggtcatccgtaaacatgtgcaggacagaggccagacaaaaccatctctctcagcctcaaagtggcctggcagtcacatgtggggtctggcctgtgtgaggaagtcaggctttcggctccaggcaccctactgcaccgcaaaaccaagttctgcctaacaaacaaaaaacagcctgctcactctccctaatatcccaggtggtaacctaagagcattatgctagacacccctcctcctccaccctccatgtccaagctatcaccaaggtcctagcaatcttacctcctaaatgtctcccaaatccacttctctcccttcaatgtccaggccaccagcatgacttctgcatgtgtgtagcagcctccgcgcaggacgtaaagatgcaaatctagtcgtaggctctctgaaaggaaaattttggggacccaaaattactaagctaaaggaaaagtcaagctgggaactgctcagggcaaacctgcctccctttctattccaagtcacctatctcctcactaagataggtgcatatctgattccctgctttggagaggctaatcagaaactcaaaacaatgcaacctttgtctctcacctacctgtgaccttggaagccccctccctgcttccagttgtccccacctttctggatggaagcaacgtacttcttacatatattgattgatgtctcatgtctccctaaaaccaagctgtgccctgaccaccttgggcacatgtcgtcaagacctcctgaggctgtgtcacgggtgcacgtctttctaaattacctgaaaccatctcagatagggttcacacatccctttcccgaaccctcccaggagcccctcgtgggcgcccaggtcctgcctgctgttgtggcccaggctcacctggagcaactcgactcttcgttacagcctcgtgaacctttcagttcctaaagctgtctagcctgtgaaaggaaaatgaatctgggggccccaaaatcactaagctaaagggaaaaaagctgggaactgcttagggcaaacctgcctccccatctattcaaagtcacccctctgctcactgagataggttaatatgtgatagcctcctttgcggaggctattcagaaacccgaaagaatacaacagtttgtctctcacctacctgtgacctggaagccccctccctgcttcgagttgtcccgcctttcccgagggaaccaacgttcatcttacatatattgatgtctcctgtctccctaaaatgtataaaagcaagctgtgtcccgaccacctttggcacatgtcaagacctcctgaggctgtgtcacgggcgtgcgtcctcaaccttggcaaaataaactttctaaattgactgagaccgtctcacatattcgaggttcacaagcccatgcatggggacgtcccctggggtagcgcccctcctccactgagctcactcgcttcctccttgtgtgttttcttcagaagaaatttcacagctacttggtccacacctgtctgccccacaggaacctctcttctccacaggcacatgggcggcgtacctgctgggctgtgtggagaggaccgggttcctctcctgattcctgctcagttaataacgaatgtcgacaagtcgagaaaattgctcaaatttaccccatcaaagaattaaaaactggtgaaagcttgacctgcgccccccacccctgacgtgctcaccgctccactccctctaggcgggcggcacccgctgaagcctcagtaccacacccacagccaggagccccagtcccgcactcggccgcatgcgcactccctgcggccctcccgccaggcgccgcgctgggcagccagcgccccggcggggtccttcaggccttcggccgggcagcctccctcggggtccttgcgcggttgcgtagcagctgcgaggacgcggggcgagccggaagtggagtgcgctgcggtgcgagctgggccggcggggtggttcgagagcgcgcagagtccagactggcggcagggcccgaggggccgacccgcagcgtccctggtctctccagccctcactcggaaccgcacgtgagggcaaatccgccccggtggctggcttagcacgcggggacagcccctccgaggcctccctagcggtgtgggcgagagg

SEQ ID NO: 24373 - DNA, 2300 bp, Homo sapien
tggaagccccctccctgcttcgagttgtcccgcctttcccgagggaaccaacgttcatcttacatatattgatgtctcctgtctccctaaaatgtataaaagcaagctgtgtcccgaccacctttggcacatgtcaagacctcctgaggctgtgtcacgggcgtgcgtcctcaaccttggcaaaataaactttctaaattgactgagaccgtctcacatattcgaggttcacaagcccatgcatggggacgtcccctggggtagcgcccctcctccactgagctcactcgcttcctccttgtgtgttttcttcagaagaaatttcacagctacttggtccacacctgtctgccccacaggaacctctcttctccacaggcacatgggcggcgtacctgctgggctgtgtggagaggaccgggttcctctcctgattcctgctcagttaataacgaatgtcgacaagtcgagaaaattgctcaaatttaccccatcaaagaattaaaaactggtgaaagcttgacctgcgccccccacccctgacgtgctcaccgctccactccctctaggcgggcggcacccgctgaagcctcagtaccacacccacagccaggagccccagtcccgcactcggccgcatgcgcactccctgcggccctcccgccaggcgccgcgctgggcagccagcgccccggcggggtccttcaggccttcggccgggcagcctccctcggggtccttgcgcggttgcgtagcagctgcgaggacgcggggcgagccggaagtggagtgcgctgcggtgcgagctgggccggcggggtggttcgagagcgcgcagagtccagactggcggcagggcccgaggggccgacccgcagcgtccctggtctctccagccctcactcggaaccgcacgtgagggcaaatccgccccggtggctggcttagcacgcggggacagcccctccgaggcctccctagcggtgtgggcgagagggcgtccgggtcgggggaagcacggaaaggtggcttcgcgaggctgttgtggggggcgggacgggcagcctggcgatgcctggacatggttggtggccaaaaacatttatcgaaagatagcatacccacttagatggcgaggacatcgacaagcaagtcttcgcccgtaagcggtggctcacgcctatagtccagggatgccgaggagggaggatcgcttgagtccaggagttggaggctgcagtgagccgtgatcgcgccactgcactccagcctgggcgacagagtgagaccctatctctaaacaaaagaaagaacgtcttcaagcatggagccatgaagctggatttggctttctgtcgctctctctacagggtacaggtgaaagggggcagacccctcatcatgctttccaggcatctgccacttcccaggaattgtctccctggataaacaaggcgaagtccctggctgtgcagaagcagtagctgtgtggtggcacagtcaggaaaactcgggggccctgttggtattttctacccctgacccgtgtgcatacttctgtcgtagctctcaccacagtagactctgctatcattgtgtcttccatcctctgaaccctgtgcaaggtctgctcatggtgaatgcccagtaaggctcacctattgctgctatctcatcatcatatcatttctatgtgcccccctagctaagagtctggactgtggttacattctcaggaatgtctgcaaagtcatatttaggtgtgaggagagtaaaacagagctagacataatgttgcacacagcctttggcactggatgcctggtgaatgtcttgtgcaaatgggtaacgtgaggagcagcatttggggtgcgcaggacttaactatttgtgtataacatattactgatgcctgtgtgtcatcctctgctactccaagtctagtagccaattgcataccatatctcagtctggcactgagggaagcagtctggatggaggtacagctggagatttggttgaggggacttatctctgacaacagcctcttgttgatcttcccagacagtgacaataccctcccctcccttgggctggacccctctctacagctaggagccaatggcagaagacaaaaccaaaccgagtgagttggaccaagggaagtatgatgctgatgacaacgtgaagatcatctgcctgggagacagcgcagtgggcaaatccaagtatgttgggagattagggaataaataccagccccagagagggtccaggtcatttaaaaagtcctccagagg

SEQ ID NO: 24374 - DNA, 2300 bp, Homo sapien
gcatgtaggcaccgaaattcattacaagaagaagccagtcttcacaatgattatagtcaatcgtcagttctacccagttttctctatttcagagagtccctccaagaaagcatctttaccacctttacccaatctgtcacggtggcatagtcacttttgtctttccattcccactccccgcccttgccatccctcagcccacaaaccacatacaatgtcctcagttgctccacacgttctctcagggctcagaggaaacattcaaattcctcagtccttatgacctgccccctccacccgacacacacaacgggtcatgtgattcccctcgttcccccatgaacatctgggctccagccaagactgctccttcaccagccccaagaagccatgctcctctgcctctggaggactttttaaatgacctggaccctctctggggctggtatttattccctaatctcccaacatacttggatttgcccactgcgctgtctcccaggcagatgatcttcacgttgtcatcagcatcatacttcccttggtccaactcactcggtttggttttgtcttctgccattggctcctagctgtagagaggggtccagcccaagggaggggagggtattgtcactgtctgggaagatcaacaagaggctgttgtcagagataagtcccctcaaccaaatctccagctgtacctccatccagactgcttccctcagtgccagactgagatatggtatgcaattggctactagacttggagtagcagaggatgacacacaggcatcagtaatatgttatacacaaatagttaagtcctgcgcaccccaaatgctgctcctcacgttacccatttgcacaagacattcaccaggcatccagtgccaaaggctgtgtgcaacattatgtctagctctgttttactctcctcacacctaaatatgactttgcagacattcctgagaatgtaaccacagtccagactcttagctaggggggcacatagaaatgatatgatgatgagatagcagcaataggtgagccttactgggcattcaccatgagcagaccttgcacagggttcagaggatggaagacacaatgatagcagagtctactgtggtgagagctacgacagaagtatgcacacgggtcaggggtagaaaataccaacagggcccccgagttttcctgactgtgccaccacacagctactgcttctgcacagccagggacttcgccttgtttatccagggagacaattcctgggaagtggcagatgcctggaaagcatgatgaggggtctgccccctttcacctgtaccctgtagagagagcgacagaaagccaaatccagcttcatggctccatgcttgaagacgttctttcttttgtttagagatagggtctcactctgtcgcccaggctggagtgcagtggcgcgatcacggctcactgcagcctccaactcctggactcaagcgatcctccctcctcggcatccctggactataggcgtgagccaccgcttacgggcgaagacttgcttgtcgatgtcctcgccatctaagtgggtatgctatctttcgataaatgtttttggccaccaaccatgtccaggcatcgccaggctgcccgtcccgccccccacaacagcctcgcgaagccacctttccgtgcttcccccgacccggacgccctctcgcccacaccgctagggaggcctcggaggggctgtccccgcgtgctaagccagccaccggggcggatttgccctcacgtgcggttccgagtgagggctggagagaccagggacgctgcgggtcggcccctcgggccctgccgccagtctggactctgcgcgctctcgaaccaccccgccggcccagctcgcaccgcagcgcactccacttccggctcgccccgcgtcctcgcagctgctacgcaaccgcgcaaggaccccgagggaggctgcccggccgaaggcctgaaggaccccgccggggcgctggctgcccagcgcggcgcctggcgggagggccgcagggagtgcgcatgcggccgagtgcgggactggggctcctggctgtgggtgtggtactgaggcttcagcgggtgccgcccgcctagagggagtggagcggtgagcacgtcaggggtggggggcgcaggtcaagctttcaccagtttttaattctttgatggggtaaatttgagcaattttctcgacttgtcgacattcgttattaactgagcaggaatcaggagaggaacccggtcctctccacacagcc

SEQ ID NO: 24375 - DNA, 2300 bp, Homo sapien
aaaccacacctgctccccagagcttcttagtgagaaggtgccaggtgagctctctgtaggcggggatgggtggagaaaaggtggaacagcaagctcagggcttcaacatcaggtgtagcatccaagaggcaaacatgcctgaaacagggccacagtccctctgatggacctaacctgtcagacaagctcccaaggcctccctccactgttgcctgctgcctttccctagggggcacatgctgggactgagtagatgctgcgggtcccagagaaccttctctctcaggccagcccctcgcctccccccgagcctcccattgtgttgcccgggacgcagtcctcacggctccaccctggtgacccgggtgtggtgaagcagtcgctccaacagaaaaatgcagccgaggaaacggctgagaaaggagaaaggagctctgtaaacctgtgtcctatagaagttcctacccgtgaattccctggctgcgttctcaggccaccacttttaaatgctgaaaaggagcatgtttttcttttgggtcacttaaaaaacattttcatggctgggcacggtggctcatgcctgtaatcccagcactttgggaggccaagatgggtggatcacctgaggtcagcagtttgagaccagcgtggccaacatggtgaaatcccgtctctactaaaaatacaaaaaattagccgggcatggtggcgggtgcctgtaatcccagctacttgggaggctgaggcaggagaatcatttgaacccaggaggcagaggttgcagtgagccgagatcacaccattgcactccagcctgggcaacaagagcaaaactccatctaaaaaaaacccacattttcatgaatatcagccatcaacaatgcagaaagtaatagactagtcttctgaattattaaccctagcaattgtcaccaagtgaaaacctcggtcactaaaacttcttggaatagcattcaaggtcttgctttaacacaaaaccccaaaacttggcggtacaaaacaaccattttctgatggatcgggaatccatgtctgaagtctcagctaagaagactccaaggctgggttccaggctggaactgcctggggcatctccccacacacacactggtacttggctggaccaccagcaggttctactccccgtgtttcttcacagtttgtcagttgggctgatttgggtttgctcacagagtatcagccaagatcccaagatcaagtatccaaagagaacccggtgggacttatatttccttttatggcctagccctggaatatgtggcatctctctgtccatagtcacagagggaagaaacagatggcatctctcagtggggaaccagaatcatatggttaaaagaacacatgggatggacaggttgccaccattgttggcatacattaataaagtctgccatgggccgggtgcggtggctcacgcctgtaatcccagcactttgggtggccgaggcgggcggatcacgaggtcaggagatcgagaccatcctggctaacacagtgaaaccccgtctctactaaaaatacaaaaaaattagccgggcgtggtagcgggcgcctgtagtcccagctactcgggaggctgaggcaggagaatggcgtgaacccaggaggcggagcttgcagtgagccgagatcgcgccactgcactccagcctgggcaacagagcgagactctgtctcaaaaaaaataaaaaaataaaaaaataaagtctgccatggcaccccatagcatttagacacccacctttctagccctacctcccacttagtgattgtctgtaaatacgcacggccttaccttggcactgagagagatgcatggctgagtaggtgtcatctcatctgtaagaagcaatagcagaggggatgcagaaggagctgctctgttctgctcattgtcacctgctcctctgcacaccttccttcatgctcttccctcagcctctccccagctcacacccctttatttgaaactctgctcatttttcaggccctgcttcaatgccaccacctccgtgcagcctcctctgatgtttgtcattagcttagctcttccgtgtgtgctcctgcaccactgatcccttccacaacatggactgtctgtgatgcacgtgtgcaggatgctgggaatgcccaggtggaaagacacacgtgctgcccccaggaactgactgactggtaggcacagtacagataccagtggtgaggacagtgaggattcttcccttctgaccctttgcagatggtaaaggaaggaa

SEQ ID NO: 24376 - DNA, 2300 bp, Homo sapien
ccagtctgctgcacgggccctggcaagtagaaagcacttgccttctgaccacacggggagctgagggtcagagacggaaccagggctcgaccctccaccttgaaaccttgagatggggatgctcctcattctagccagttcctcctcagctctcaaaacaaggaacagatgctcaggaaaccagatctggacaaaagtcatctgagcctggtgtgaggcagattccagaagtttagttacagacatcctttataaggagacttcatcgggaattcaagacaacctggtgattcattgaaatttgcctgtgaaagagaatctacatagacttcctgccacctcttgagatgtgacagttgctgaccctcccgccaccacacagggcgagcccctagccctgagcttgaaccatgttgcttgcacaaatagctgggtgatttagaagtgaggtcagctgtgccagcagttacagggtggtggttgtctgtaactttaatccactgactgttgtactagggcagtttgggctagacactttggaggagctcctgtgaagggcatgaaggctcactgtagcagcagctcagttgtctttcagagttctgcccttagagctggtttgcagtgctcatccttcttgctgatattttaaaataggtagaaacaggctgggcgcggtgactcatgcctttaatcccagtactttgggaggcctaggtgggcagatcacctgaggtcaggagttcgagaccagcctgaccaacatgttgaaaccccgtctctactagaaatacaaaaattagccaggcgtggtggcgcgcacctgtaatccagctactcaggaggctgagacaggagaatcgtttgaagacaggagaatcgtttgaacccaggaggtggaggttgcagtggcagtgagccaagataccgccactgcactctagcctgggcaacagagcaagactccatctcaaaataaataaataaataaaaataaaataggtaaaaacaaattataaagtaatacaattatgaactgcaaataataaaacataaaaattactttaaaaaaatttaaagaggccgggcacagtggcttatgcctgtaatcccagaaatttgggaggccgaggcaggaggatcacttgagcccgggagtccaagaccagcctcgttaatataatgagagcttatcatctctacaaaaaataaacaaaattagccaggcatggtggcatgtgcctgtagttccagctactcaggaggctgaggtaggaggatcactggagcccagggggtggaggagcagtaagccaagattctgccactgcactccagcctggctgacagagtaagaccctatctcaaaaaacaaaaagcagaaagaacaaagaagtaaacaaaagcttaaaagtaaatcagccaggtgcagtagctcatgcctgtaatcccagtactttgggaggcctaggcaggcagattactgcaggtcaagagtttgagaccagcctggccaacatgatgaaaccctgtctctactaaaactacaaaaattagccaggcatggtggtgcgcacctgtaatcccagctactccggaggctgagacaagagaatcgcttgaacctaggaagtggaggttgcagtggcagtgagccaagatagcgccactgcactccagcctgggcaacagagcaagactccatatatggagatcccttgagatcaagagttcgagaccagcctggccaacacggcaaaaccctgtctctactaaaaataaaaaaattagccaggcatggtggcgcacacctgtagtcccagctactgaggaggctgagacaagagaatcacttgaacacagaaggcaaaggttgcagtgagctgagattatgccaccacactccagcctgggtaacagagtgagactccgtctaaaaaaaaaaaaaaatcgggcagttgtgatggctaacacctgtaaccccagcacctttagaggcccaggtgggaggatcccttcaggccaagagtttgagatgagcctgggtaacatagggagagcctgcctctacaaaaaaaaaaataataaaaaaataaaaattaatgcgtgcgtgctacttgggaggctgaggtaggaggattccttgagcccaggagttttgaggttacagtgagctgtgattgagccactgcattctagcctgggtgacagtgaaaccctgtctctaaaaagtaaataaataaaagtaaatagtaactaaagtaaaactctagaaacatttacagttactacagaggaac

SEQ ID NO: 24377 - DNA, 2300 bp, Homo sapien
ctcaaaaaaaaaaaaagtgaatacttttgaaatgaatgctttttgaagcttagaagaaccattaggtttatgtaatgcacccatacttattcctttaaataaattttaatttaaaaacattgagatattggcttctgtcaacctgatttaattaattctttacattaagctgattttccccctggcagctgacaaataagttcattgttcttgtagaagtgagctcacaaggttaaatgtgaatgttctcaaaggtacacagccttgtttcagaagaattttaatgcccgctgtaaaatcaatcatgcagagccaatttgaggtatgactccagggtatgcaaggtatgacttctctggaagccaagtcttttcacagggcactgtggtaatacccatagcactaatcctcagtgtgctggttgaagaaataaaatgtttttaaagaaggataaaggaggaattaattagaaaatttttttccacatattagcaaataaatgaaatgtcattttcatattaagtaagtatagttatgatcttcgtttctacctactctccttttgaaatattctttattactaaataatattttaggaggagttaacagaaataattacctgtaacatctgcagataaacttacatagctaacattgtgtgctgacttttttaaatggtgaagtggcattaatgagatgttcagtttacagaatttgaagtttgagttctattttaatagtctgccgtgtcccccaaatcccatttagataaattgaggttgatttttcacatagacttgcaatttttagacaccacattttttttatagtaacagcctcatttgcctgtacaataactaataatacagtatttcataggtacattgtatgtgcacaggaaatttttctttaaatcttaagagcctttaataaacgggatattttaatattttaatgttactacatttaaaaaatagtgttttcctacaaaattttctgtattcagtatacgttaactatgaaaatgtcaaacaatgaaatcattgaaatatatttaaggaaaaattaccaaccaaaagtaatgagtaccctctatgtgcatatttactggaatgttcatgtgaaatggtaacatttccaataacagcattttgaatctggggtgacacaaacatgatttttatttttgagctagggattttgatggagaagcacctagatgaagacaccatttcattcatgatattttaaaattagaaaagtaaagcttctaaattgaaactcttaacaggtcacttcatgaaatttttagttttaaatttaattttacatgagatgtctttctgaagagctacttttattaactttcacttagatcgttgtatgctaggcattcagtatttctctacttgattttcctatgcctagttgtgattacagcaagtatttaataataaagtcagtcatgtgagagtatccattaatttcagtgggtccttggaaggcaggcagaagatttctgtccaagagtcttatttttgacatgagatgaaattctttttttttttttgagatggggtctcactctgtcacccaggctggagtgcagtggcaggatcttggctcactgcaacctcccaagctcaagccatcctcccacctcagtctcctgagtagttgggactactggcatgtgcccccattcctgattagtttttttgtatttttggtagagatggggtcttgctatattgcctaatttttgtgtttttagtagagatggggtttcaccatgttggccaggctgctcttgaactcctgagctcaagtaatctgcccgccctggcctcccaaagtgctgggattacaggcatgagccaccatgcctggctaaaaccaattctttagattgtttttgccaccatttgcttacttggaatagctttcacatttatttttcttatgaagaaatccagtgtcagtcagaccatgtaacatcaaagcaaaatttcattgaagcctatccttgtcttaattattctaaaataaagtacaataaagtgaattattttgccctttgtagtagcatagtgttaagttatatatatattttaatatgcatactcctaagtaaagtttcagagaccacatgctggagagcagtggctttcagacagcatcagcatcacctgaaggccttgttgaatacacattattggaagagaggggagaacacaggctcatgcctgtaattccagtgctttgggagactgaggcaggaggatcacgtgagcccagga

SEQ ID NO: 24378 - DNA, 2300 bp, Homo sapien
gccaggagtttgagaccagcctggctaacatggtgaaactctgtctcaactaaaaatacaaaaaattagccagtcgtggtggtgcactcctgtaatcccggttagtcgggaggctgaggcatgagaattgcttgaagtcgggaggtgaaggttacagtgagcagagactgaaccactacactccagtctgggtgacagagtgagactgtctcaaaaaaataaaataaaaatgaaaatggaattcttttcaaggttaatccatattgtagtgtttctgtacttcattcattttttgttgctgttgttgagacagagtctcactctcttgtccaggctagagtgcagtggcgcgatctcagctcactgaaacctccacctcctgggttcaagtgattctcctgcctcagcctcctaagtagctgggattacaggtgcccgccaccatgcccggctaatttttgtatttgtagtagagacggggtttcaccatgttggtcaggctggtcttgaactcctgaccccaagcgatccacccctctcggcctcccagagtgctgggattacaggcgtgagccactgcgcccggccaaataatgtcatttttaaagcttgtaattcttattgctaaattactgtctgtaatggttgcattaattcttatctctgttagcagtatataattaaacccttgttaaacactcattaaatctcatgattgaacccttaccaacatcccatcatttgccaactggacaggtgaacaatgatgatagcttgtttaatgtgcatgtttttggttactttttcatatattttttgggaagtagaactcttgtgtgtgttgtctgtgtcttatttttctacattgactccctttttattactgatttgttagggttcttttacagcatgggctctagtgtttgaatcttgttctatcactctccagtttttgatcttgggcaagttttttaacctcttcagactttcagcagagataatgatagactagctgtggatatgaaatgaaatcatatttacatagcattagcgcagtgattcttaaagtgtgatccagaccttgaaattcattcagggtttttttttttttgagacggaatcttgctctgtggcccaggttggagtgcagtggcgtgatctcggctcactgcaacctccacgtcctggttcaagcgattcccctgcctcagcctcctgagtagctggaattacaggcatgcgccactgtgcctagctaatttttgcattttttagtagagatggggtttcaccacgttggccaggctggtctcaaactcctgacctcaagtgatcaacccacctcagcctcccaaactgccgggattacaggtgtgagccaccgtgcttggtctcattcagaggtttttgaggtcaaaattaatttcataataataccaagatgtttcttacctttttttttttttttctttttttgagacgtaatcttgctgcccaggctggagtgcaatggcacaatcttggctcactgcaacctccaccttcagagttaaagtgattctcctgtctcagcctcccgagtagctaagatgacaggcacctgccaacactgctagctaatttttttgtatttttagtagagacagggttttaccatgttggtcaggctagtcttgaactcctgacctcaaatgatccaccagccttggcctgttacttgcctttttaactaacccatccctcttttccctacttatctgaaatgttatagtagtgttccgaaaagggcataagctttggttttagactaacttgggttttaatcctgactgtcaggattaaaaatctctcagcctcaaatttttcatcaataaaatgaagataatacctacctcacaatggtgaatatgtggcattagctgctattattattagtaacagttttagtcttacaggttgattctggatttttgcttctatttatctgagttacgtctgactagtcctacagtataatgtaagtttcattgaattttgtatcttgttatctgtatttagtttgcagatgctgaaggttactttgctgcttgcacaacagatacaactatgaatagttctttggtaagtgcttcttttcttgtcaggaatagagaggtggggttgagccatggtaggaaaaactgaaacaggtttgatggcagcaaagctgtattacaacatagatatggctcaatattgggtgcccatcattaggattgtaatttggtactttttttctccttagggttacctggggccta

SEQ ID NO: 24379 - DNA, 2300 bp, Homo sapien
aacttatctttgaaattatacagctgaagatttagccttgggtaacacagagaaataaggatgaaaaaaggaatgcctgagatgctcaggatggtgccaaagcacagaaacacactagggcctatgttacagcagtccagtggaatttcccttaaagaacccagggaaaagacattaatggaagttgaactatgttttgagactcgctgaagacagtctgccagaattactttatccgttacaagaatatccacagcttgtcctttaacagatggtctggaaacaggtggtaataatggtaacttaacaaagtactatcatttacaatattttaattcagaaacccatatttatagaagaaactaaggcacagtagagagtggaatgatcctcaggattacataacaagttgtagtcagataaagcattggtatccagctttcctgactcttagattctgagagagatttataatgctcttattttttaagactatacatcaaatatgtagcataaagaattcttaggcgtattatgggctgataccctaaagaatgctaatgaaataaaaaacaaactggtgccagactaatgtgattaatgtctgcaaccaaatttcccctaagtagtaataccaagtagttggttaaggatttatttatttatttatttattttgagacggagtctcgctctgttgcccaggctggagtgcagtggcgcgatctcggctcactgcaagctccgcctcccgggttcacgccattctcctgcctcagcctcccgagtagctgggactacaggcgcccgccaccacccccgcctaattttttgcatttttttaatagagacggggtttcaccgtgttagccaggatggtctccatctcctgacctcgtgatccacctgcctcggcctcccaaagtgctgggattacaggcatgagccaccgcgaccggcctggttggtttttttttttactctgcacaataggtttctgaatgacttattagaggtgtttgatgctgatagtttgaaactgattcgatcaattaaaaaatgttcattggtattgttttattagttgctagaatatgcattcaacttcactgaaacgagacttaaaaggtaagaggtacactacatcgcgactataggagtaagaaaatttaatttcttcacgccatctgaccaagatgttaaattactgaaccctttagtcttgtttttgttttgtagatagaaatcaagatgctggacaaacctttctcatggaatagtcaaaatatttaaggaacaaatctatacagtttaataactgccaacatttggcagggctcatgcctgtaattccagcacttcgggaggtcgaggcgggcggatcacttaagactaggagtacgagaccagcctggccaacatggcgaaaccctgtctctactaaaaaatataaaaattagccgggcattggtggcttgcgcctgtagtcccggctacactggaagctgaggctggagaatcgcttgagcccgggaagcagaggttgcagtgagctgtgattgtgccactgcactgcagcctgggtggcagagaaagaccctgtctcaaaacaaacgaacgaacaaaaaattgctgacgtctgtgaggttcttattatgtgccatgaattgatctacgtccttcacatatgtaaactcatgcaatcctagcatacacacaaaaaaccaatgtggcaggtactatcattatcgtagacaaggaaaccgaggaccagagaagttgaagtagcttggcctaggatgtaggttgtaactcctagagctgagatcttgtttatatacaaaaggtttcaagaatcaaaagtactctaagccactttgcgtttcggctgtcatcgagaaagggatatccgaagtttcaggttcgcagtttgtgaaacggaacggccagctttcgttctaaggcgggcggaggtttagccactccctcgtcctttgctctgccccagacacccacgctcgctttcctcttcttcctccacctcgccctacttcccttcttcctatcttctctcttctttcgcctcgccgccgcgagccctcgctcggcgaccagagcctcgcattacttcccctagctccgccaagcctcgctgcatacgcgaccgcgcgcagtccgccgtcgcgcccctatgacgtcacccgcgcgccaccgcttccgggctggggactgggggcggggccgcgcggagggcaagccgggggcggggccggggccagagcagatctccgggcctccgcg

SEQ ID NO: 24380 - DNA, 2300 bp, Homo sapien
ggtagtagaagcggcagcaaagagtccccatctagcatcttctaaaatgtagtggagaaaccaacgacaacgaatctgagacaaccagttgtttgacttctctgaaaacaacctctaaaaaaagccttctctcgtgaatagctgcagacatgctgggcactaattgatgatgatgccctttagtgagtctcctctgcacatacctgattccatttggatgctggccctcacatacttctatctgcgaactccggaacacagaatatcatacaatgtatgattcaatctggactctgctggagccattctctacaaagcagacacaactttttcttgcctaaatcctttcaagttgctttatttttatttttaaactaattaccataaatctaatttatcaagctgcttttaagataaactttaaaatgcttagagcagtctacaaattcttgcactgtttcactcttccttatctctcagtcttcatctcccattgcatcttctctgactctttcatatggatcttctttcaatttgtggaagaagccaagcttgttcctgcctcaggtccttgacacttgctgttcactctcctgggagactcttccccccatcttagcttttaaataccagctggtcagactccttacctgccttccaccttcctctcattctcccactcctcgccttcatttctcagagtcctccgctctcttctttctattgctcttaacacaatttgtctgttttccgctaatctgtaaactctacaagagcacttaactattttgcatcccaccgaatattcggagtcagcacagaccccgtcataatagagtaggtaagcaatgcttacctgtcaaatgaatgaatgaaacacccgattcatcccccaagccagcttaatacattagatgatcttatggactgaataagacatccctccttttaaagaatatttttgttttagcttcacatcagcaaaccccgaacggttcatcctaagataagcctggtagagaggaaagatactaaccttctagggtcctaaagtggaactaggaacttattagatatgcacattctcaggcattatttccgatagcccagtcagagaattctgggggtatggcccagcaatctgttttaacaaacctttcaggtaattctgatacacactaaagtttgaaaggtttctttaaggctttccagttttcttttcttttttggagggatgggggggggtctccccatgttgcccaggctggtctcgaactcctagcctcaagctatcctatcctcccacctcggccttccaaagcattgaaattacaggcatgacccactgcggctcgcctccgtttctaacttaaaaaaattttctttggaggggagccttaatcctttctattatcctgctagtagaatcttactactcctgagggtaatctttgtcataatccaaaagccttgaataaaggcctatttgtatagttatgcagaatatattcctgggaggtttgccttcctaggagcacaggtcggccctgggaggtgggggttggggggcagggctgcattctaaagtcctgtaacaacgcacaagtacaactgaatagaactcggaacaaaggcatcagggccacggtgcaagtctttgttcatccgttccccgactgctcaccctgtctgataccgctcttttccacccagaaaagcagccactcaagttttaagaatggatgtatgccgcggacgttttcgattaggccgttttctctcaggcactggaggatattcgtggctgcaggaggcgcttccaccctttcctcaacctagcaaagaagtaactgaaactaacccaagggttacaaccgaaaagccccttccagcttcagaagcagaactggaagctcggatagacttctccgcctctacactcctggaaaacccgcagtggatttcaccaacttcaggatcggagcccaggcaggcgaacgtaccttattgcgcatgctcgctagcccctcccgctcggagcggaagggggagcgctgggggcctgggcctggcctggccggggcgtcggcaccggcggccatcttggcttcccggggaaaggcggcgtgaggggaagaagttgtagggtgggggcaggagtgaggaggagggaagagagagggggaggaggccgcggcggggcagggcggggactgcctgcctgcctgggttgcggaagtgatagccgccgaccgagcctgctgctttcttgctactgcttcggcttcccggctaccccc

SEQ ID NO: 24381 - DNA, 2300 bp, Homo sapien
aggggctgtggtgaacaaaggggacaaccctccacaaagggcccatgacactgtgcgaacatgcccacagaggggtgggtgcaccaattagaaaatgttcgcatgagatatgactagatttcccaagagacaactctcatagatcaatgtgcctgtcacggaggagcaaggagtacgcttggagaggaagaggcaatgggtagctatttaaattcattgtaaactgagaaaactgtaaacagggatgacgctgcttatgacatagtcacatacacagtgtcacatagttaaggggatcagccacattgagtgtggatctctcctcctctcggagcaacgttcctattgacattcggagaggcacgctgcccccagatgctcattttcaaacacaggacgtgagcagtttcacaaatatccaccagatggtaccttcctaccagaaattaggtttcaggttgtgaaaatccaaattgtttttccattccacggacaagctatagaattagatgcctatcctggctacggtcagaggaaagaaaatgggtgagaaccaattccagggaacgacccacggagtttttattctcaagaataccaaacagaacttgcagggtcctttgtgtggtggagggaggcagctgctgtggatgagtcatggaaaggccatgtgcaagggaaagaccttgaggttatctccggagaggggttggttgtaaacatcctcaatggcacctttgttttatcccactagttgccaaatacctgtgattctgcacagcgctcctggaatgctcagaaattatgactggttactctgtcaaagaaagtctttgttgtagaaacttcctcatttgttcaggcctttgggttctaagccctgagccatagtctcccccggttgtttgcctgtgtgggctagggagggtgactgatgttcaccgtggggtgaccaccttgtcctggtttggcagctgccttcctgcctttagcagtgacagtaaagcaaacccaggcggttggtcatctcggtgcactgagctgtacacaccagggacagtgctggatcctcacgcaggttcaatgagctgggcgatttgaggtggtagatgccgtcttcacatgattaatcattttgttcttggcattttcctagtaggtctccctgcttccttttgccagaaaaggtaaagttctggagaaagaggttttttcttggcttttgagttcaggccttacagaggtaaaaccgagtagatgtgggagaacatgtggtaaacagatacaactttcccgggatggggagagaaaaatagtgaaactccatctccactaaaaatacaaaaactagcccggcgtggtggcacgcgcctgtaatcccaactacttgggaggctgcggcaggtgaatcacttgaagccgggaggtgaaggccgcagtaacgctgttccctgcattggatgaagtgctccccaccaaactctctcaccggagagggtgggatctgcgggctccctgggtggcttgatttcgacaccctgtgggctgccttccactctggtactttcctctgcctgctgatgcttgaaattccttgaaccggccacacacacctgctttctggaatcagaacactggaaaggcttcctgggacgggagaagagtgatttacattcctgccgaggtgtaaagctgcggatggcaggttctctcctgagaaccggcttcaactaggaggaggaggttggaagcaggaccccgagctgacctgttgaccaggagaggagtaagcagaagggaggcaggagcgggcggaggagagaaggccggggagccgggatgggggtcaccgcccccggggagccgggatgggggtcaccgcccccggggagcccggatgggggtcaccgcccccgcccccgtgatgccgagctgaaaaagacagtctccaggtaggataatccgtcacactagatgcatatagcttcatgcaagaagagcgactgttgcgctgtcttctaccccctttggccgcgatcccgtgacaatgccggcatccgggcaccaactggcttttgcgaaccgctctccgctccccgcccggattccgaagcccggagccgtttacagtttgaggcgccgtgtgccgccccctggtggccggaggccgttactgtcgcggctgagggggcgtcccggtgtatccgcagcgcgccctggccgccctctggtggccggaggccgttactgtcgcggctgagggggcgtcccggtgtatccgcagcgcgccctggccgccc

SEQ ID NO: 24382 - DNA, 2300 bp, Homo sapien
atggtgtatacgaggcactcttttctcttactgtgatttttctctattttcaaaatgcaactttgggaaaagattttaggtggattctggccacctacctataaatggtagtgtcaatatctttcttggatcctgctgccatccaggtgggggtagaacctttttgaaaaattgtagaaaaggggtgaagtctcatgtgattatagttgtagaaatccagcaactcataccctctttgtggtaggcatataaatgctgtctctatcaatgtgcctggagagggttccttgaagtactagtggctccttccatcctgtacagttctttgatggggatgggatactctgaactcttggactgctctccctccctgggctccccagataatttagtttggaagtttcttagatacctagtacaaagtgctatctaagaaaggaattaagccaattctactggtatagaacattcatttattcagagattatcaaactgtaaaccacctgatgaaatgttcataggttttttcattgagtattttgtatgttttttacttcattactttcttctcttctctttattgtttcccccctataatttatttgagtttattttgccattctttttccaactctttgatatgaataattagcttattaattattaattttatgcttttctgcatttctggtataggtacttaattatatacattttcctttaaatattgatttagctgcatactgcaaattttctgtgttgttttcattattgttgaatacaaaatgtttaaacatttttaatatactctttttgtgatttatgaattattcaaagcaatgctattcaagcaaaatacaagataagccacaaattccagtcacatttgtgatttagaattgtaaacttcaaatcatgagatttgttggccctatggctgcctctggttgtgctcaatatgatgcctggatattgctacaccagattcttgcacacagccttttgcctggttcttattggctccatctcttttcccatgattctcctgatttctccaatactcttgccattaacttttgtggctgcaaacagtctgatcttacttctgtcacatccttacctccactttgctactcagaactataaccttctgaaacttagccatcctcaaacatgtgcagactactttgtcagaatgtttagatcccttttctgttttacaagagaaaatatgtgtttataattatgtataaattaatttcaccaaacattaatttatttcatttcacattaaagtttatctgtaatattttaggctgttcataaaagcctcctgaatgtagttcgttagttcaatcttataaacctagcatttcattagtaggatacatttctgatgaataaatactgttggttttcaacatcaaacactttgcaacaaaagttggaaaagagtgtcctgcatttactcaagactactggatcttatttccaaccaggatatatttattctagttagtgttgatgtgacaatggggactggtgactcggaaaacttaatttacaaatatttataatttattttgcctaaaatgacattagggacagagaggtgaccatttggggagttagactggcatgagctaactaccagtttgtcccaggcattcaaaaaatacggcttcaaggaaagcaatggtcaaaaataaaggttgaaaataaaaacattgtctagctttggtgcgatatccaaaaactacaataactattgtatttgaaaactttttaaatataccttaagctttctgccaccttacagaaaggacagtctcttggctggctgttatggctaaattttaaaaatatccatagggaatatcagtccttcaacctatagatataaaacccccaaattctgaaactgccaacagtctttttttttttttttccacagcatttacttgtgttttgattgcaagaagtacccaggaaggaataaaatttagtaacagaatgaggatgttatgatttttttttaaactgggttaggggtggggagagggagagagagagagagaaatattttgcactggaaaaactataatctggagagacagaggagttgagagtgcccctttaaactgcaggactgcaattgatctctgtatgttttctggttttcgtccctttgaaaggggaatgagagccaggatcattggctgtactgtggagctgtcacatctccatactgaaaaggtacactgcaagtgaatttaaaccgtttttggctttctattgca

SEQ ID NO: 24383 - DNA, 2300 bp, Homo sapien
ttttatgagacttgggaaaatcatatatattttttcctttcctcttccctgggttttccttattccttaatacatgcaaagctgatggggtcagtttgggatctcgaagggaattatcccctctgtattacaagaggcctcatggtgagctatgctttgttcaaaaaggatgaaagcaatttaaattaaataacaatggataatcatctagtttattgtaaggtattgccacttgaatactacagttttactatggaatctttgtttcaatagttgttttttattttatatgtgacttactacaagaacttactctgttattttaatgtagctatgtttttaatatttcttgagtagtagtaaagagggttatgtcctgttatcatggtgacttacccctgccatccattcctggggaacttgcttggctgctatggtccgtgtggtgacaggttattccttggtagacatgaagtgcagagggtacagtgacattaaagaccttttcattacctgaaatcttcttacaaaccatctaccaaggtatgttagaccaagaaaaatgtcttctattttcttctacagattataaccagcaatacgctgagatgataatggggctggatatgaaaataaatagagtactttactttctgaaaatcattccatagcaaccgaatgcatttgggatgatatctatctatctatctatctatctatctatctatctatctatctatctatctattctaagagcatatgtttgtgttcaaatgtctgcttttctaaaaaagtatttttggaaactgacatataaaatgatcagtactagtaatgctcaatcctttcttgtgttttggtatagtactgactttttataatctatagacattttgcatataatttcagattagctgatatagctagggtttaattacaattacttcctagagaaaaagctcctttgtctgaacggtgataattctgagtatatgatttagatgtgcctattataactgggtgattgaaaaaaactactgagtaaattcacaatttaaacaggatgacacaaggtgtacatttaacttatttatgacacaaattttttcaagcctccattttatggaaaatatagaatactgtgtgttacttttatttattcattataggactattttcttttgggtccttctttacctactgtaagctttgtagcttagtttgcgttactttctgtatataaactaataaagaggcatatttttcaatagacatgagcctttcactaattcagaatgcctatttctttcattaggacaaattagagattatgtttttctctgaacaaaatgcatttttatgtcaattaaatgagagtttttgatgaaatgtttcctaacagagagtaagtaattgtgatataattgtttgtagatgaaaaataactgccacattcatggcaaatgtgagtttaatgcagatgattttcatgactatgatgtgttttatgcggctttttatacccactgttttggaagcattcatagtaccagttaaggcaaaaccagcttaatgtttgttttagtgcttggcaacaaatacagtctataaaatatgtagtagttaatattaaaagcacatgccagattgtaacataaagagtttattcaatctctttaaagtcatcaatttgaagcttcatctgaatgagttagcatttgagttccatatgattttcagcaggtgagatcttgtgaagttaggaattggctacccctgcgagcccccattggcacagcccccagtttcttaatgagcttgcctcattgctgagtgagcaaaacactcttaacaatgttccttttgagccatctttgttgcagggggaaataaagagaggcgccaagcctgcaaattctttcctgatcccattggttcaccaggagagaacaattttgttttccatggttgcggtctttcaaggttgcctttacttaggatttgattacctgtctccctcaaccaattagcctctcccacacactctcttgcctccaataatgatcaacctccttttctaagaccagcctcctctttatcatattgcattaaacacttgatgaaagaagacctagaaggctttaagaaagacagggtaatattttgctggtgtagagggcctgctcttcggagacaaatacttgcttttcattttgatcagccgtctgcacttaaaagcctcctagccagggacatgttaattaaacagtctggggctcagtgctgccatccgtaaattg

SEQ ID NO: 24384 - DNA, 2300 bp, Homo sapien
tgagaacatgtctcaatcctgccaagactgattggattaaatggatttatggaaaaagtgatcagccttccactagaaaagccagctagtactggcaggaactaagcaaaggaataataaaacaaacacgtatttatttttgactaatattatttgattaaaaacgaacgtgatagaaaatcgctgtgggtatatgtcttatatatacataggtgtgtagatatgtcttatatatacataggtgtgtaaatatggcttatatataaataggtgtgtagatatgtcttatatatacataggtgtgtagatatggcttatatatacataggtgtgtagatatgtcttatatatacataggtgtgtagatatggcctatatatatacataggtgtgtagatatgtcctatatacacataggtgtgtagatatgtcctatatatacataggtatgtagatatgtcctatatatacataggtgtgtagatatggcttatatatacataggtgtgtagatatgtcttatatatacataggtgtgtagatatggcttatatatacataggtgtgtagatatggcttatatatacataggtgtgtagatatggctgatatgtacataggtgtgtagatatgtcttttatatacataggtgtgtagatatgtcttttatatacataggtgtgtagatatggcttatatatacataggtgtgtagatatggcttatatatacataggtgtgtagatatggcttatatatacatagttgtgtagatatgtcttttatatacataggtgtgtagacatggcttatatatacataggtgtgtagacatggcttatatatacataggtgtgtagacatggcttatatatacataggtgcgtagacatggcttatatatacataggtgcgtagacatggcttatatatacataggtgtgtagatatgtcttatatatacataggtgtgtagatatggcctatatatatacataggtgtgtagatatggcttatatatacataggtgcttagatatggcttatatatacataggtgcgtagatatggcttatatatacataggtgcgtagatatggcttatatatacataggtgcgtagatatgtcttatatatacataggtgcgtagatatggcttatatatacataggtgtgtagatatggctgatatgtacataggtgtgtagatatggcttatatatacataggtgtgtagatatggcttatatatacataggtgtgtagatatgtcttttatatacataggtgtgtagacatgtcttttatatacataggtgtgtagacatggcttatatatacataggtgtgtagacatggcttatatatacataggtgtgtagatatgtcttatatatacataggtgtgtagatatggcctatatatatacataggtgtgtagatatggcttatatatacataggtgtgtagatatggcttatatatacataggtgcgtagatatggcttatatatacataggtgcgtagatatggcttatatatacataggtgcgtagatatggcttatatatacataggtgtgtagatatggcttatatatacataggtgtgtgtatatgtttatatacgtatacatgtacatatacacctatatatctcttagcaacagttctgcaaaactcaatcattatactttggcagattggttttaggtcactagtaagggcagaagcaccaccatgtgtcatccaaattcttgcctgtgccttccgtaggacaaaaagagggtttatgattttgaccatatcaattcttgtctttctgttgccctgactataggtatagtttattgtattcttatcacgtgccaggctttgggctaaacgtgttctatgcagcatctttatgtcatcctgacagtagcacaatgacgtatgtaatagtggtcacattggctgatgtgaaaactgaggcttagaggcatcagctggcagtattaagaggcagacttggaggtgcctgactctgaagaacacactgcaatcaaaattcagtgcccaaaattatgatgtcacagaatattccctgttagcactatacgttccacctgtatgtttggaagagaaagaactatgctcactccttctgagctgtccctatttatttatttatttttggtctgatggctaaataaagattttttgtattcaagagaaataatttaatgagataaaatattatttcctaagaaaaatatatcagctgaaacctgggaaacatctagataatttaattg

SEQ ID NO: 24385 - DNA, 2300 bp, Homo sapien
attgtcataattactggataagctgcccaatagctattacactaatgtttcattaaaaatatatatttgctttatgcttttgcaacttgcaaagttattcctagcaaaaagttatttctcctgaaacagaataaataggtctttcacaatatgcactggaatacatatttttgaaaaacaagatctccactcacctctaattctatctttctgctggtgattactgatatatttattttaaaatacatactttataggaagtatcgttacaattaatatttaggacaacattataattcgtgttttagaaactactaaggcaagaggacagctcctaccattctacaaaagtctttcagttaagaagtgactaattaatggactgagtggctcagagcagggagccagtccttagccaataaagcccaactcactgccaccccactgccccatattctctgtcctctctgctggaactgtcttgtgctgaatacatgaacacctaaatattcaactcactcctgccatttctccggtaagcaatcttccacaacctgtgcctgagacttggaggctgtttgtggtccacaggctttaggcgccctagggaaagccacgtgcactagtgcatctggatgaactgtggactttgtctatccgcggtaattcaacttcctaagagctacattgactcattgatttgtatccaggctccgggctcccaattcccacacaacgtaagctccctgcagccaggggatttggtaggtttgccgtgttgtttagtttctctcccctgcgaccctctctctgagcctcacagtgtgtttggcacgtggtaggtgctcggtaaacctactttgaatgggagagggttgtgttgaagaaaggaaaggctgggaggacttaagatttgaaggttttcctacacgtgtccaggaagaaagaaaaagaaaaaagaaatgagtatcagagtcttatcatcattacagttcttatggtttttaaccgacctttaggagttccaccgacgtgacccaagcagctggtaggagaatctgggctggattcggaaggcgcagctacaggacgcccgctgccccggatcggaaggcgcagcacctcaggccacaatctcagacacgccctcgggtcccgacaggtgttgcccgcctcccacggggctccgggaccccggtccccgggctgccccctgccttctggggcgctggagcgcgcgcagtggcggagctggagccacccagtgcttcgcacgggcgcgctccgcttctccgggttttagcggaagcctgcggggggcggggtaaccgcggaagccggcggccgtgggcgcgcgggttgggggctctcgcgccgctccgggctctccccccccccggctgcggttgccgaagagaggccggagcgcggcgcccggctgctccacctggcgcgctgagcaccgcgcggggagcccccgggggcgggcggtggggggcgcggactgcgggaagaaggcacgaggcgtcgccgcagctcggtcaggggccggggccccgccgctcgccgctgcactaacttgccgcttggtctcgcctcgccgccgcggctcgctgcgctttgggtggcggggggcggggagagcggggagtcagagggtctgcggtggccgagggagggaccctacgacggggagcccgcccggtgccgctcttcttcccctccccgcccctccgctccccccaccccgtcccttccgccgattccgggagcgacgggcgcccgtgacctgcgaacgctgccaagtgacggtccccgagtctgaagcgcccgcgaggaagcgagcgccagcgcgggccgccggcgatgacggccgcgaagcaggagccgcagcccaccccgggggccagggcgagccaggcgcagccggcggaccaggtgagagtcggcagccgcggccaggccctcccgggaggggtggctccagtgcgcgctccgcccgcctcccgcttcccaggctgggctcccgcgcctccctcttctcaccctcccccgccccgccccagttccaggctctcctgcttctccacggactctgcgggaagttagagcctctgcgtgcgctccggggcccggcgagaggatgcgcaaggtggagagccgcggggaagggggcagagaggtaaaggctgaaggtgccccggggaaccccggcgggcggcccaccgagggagggagaggcggccgggaccaaggaatggggcctcttggttccccattaacgcacgctgaagaaatct

SEQ ID NO: 24386 - DNA, 2300 bp, Homo sapien
gccaacattcaaccccctcccactaataaacgagaagggagctgtaagtcattgagtaatccccaccacctgtgtgaaacacatgtgagagaaaagagaaggggagggaagaggagaaaagaaaccgcaagccaggagagatgaccaagtctgcaatattaataacagcatcgctggcatggcctcctgtgtctcgccaccactcctgggcgatttggacagctccccttaagaggctcttcagtgcttagaatacgcgaaaagccgagtcgctgctggagcctagccgcgtgcgctccctctatcccacgctagcaataagctgggagggtgtccgcctccagcagccttcgcagcgcactccgaacaaagatccccagtcctcctaccccagcgcttgggtcccgcgggtccacagttaatccctgacctaagtgcagctctctctgcccggagttcctaattgatgcaaacgtgagcgcacctgcacccggctcagcgcagcctccctcctcctcctcctcctcctcgccagggtgtctcggcgctcccgaccctccaactttggaaaaagagcgacaccgaagtcccaatcaccccagatcagggacagagacgagatggggatccacgacggtacggttatgctacagatttctaaagaccaaaacaaaaaggggttggcgggtgtagacggacgggaaagagacaggaataaccctcagcccacgcagggcacctcatctgtgcagacgcgacacatccaaacccaacacatcaccaaagccagcgccttcccggctccacttaatcgttaatgcctcgccgctccccaagctccgttccgctcagcagactacggatgtctgggacactcttcccccatccccacctcacaaacacacacccgtctcctcaaaagaaacaagaaagcagagggaaaaccccgtccgcctaaaggtcattcgcctgctcgggtcgctttggccagcgagcgccccggctataggaggacggggctcgaacccggtgagcggccgtcaggagcgcagcagatttcttcagcgtgcgttaatggggaaccaagaggccccattccttggtcccggccgcctctccctccctcggtgggccgcccgccggggttccccggggcaccttcagcctttacctctctgcccccttccccgcggctctccaccttgcgcatcctctcgccgggccccggagcgcacgcagaggctctaacttcccgcagagtccgtggagaagcaggagagcctggaactggggcggggcgggggagggtgagaagagggaggcgcgggagcccagcctgggaagcgggaggcgggcggagcgcgcactggagccacccctcccgggagggcctggccgcggctgccgactctcacctggtccgccggctgcgcctggctcgccctggcccccggggtgggctgcggctcctgcttcgcggccgtcatcgccggcggcccgcgctggcgctcgcttcctcgcgggcgcttcagactcggggaccgtcacttggcagcgttcgcaggtcacgggcgcccgtcgctcccggaatcggcggaagggacggggtggggggagcggaggggcggggaggggaagaagagcggcaccgggcgggctccccgtcgtagggtccctccctcggccaccgcagaccctctgactccccgctctccccgccccccgccacccaaagcgcagcgagccgcggcggcgaggcgagaccaagcggcaagttagtgcagcggcgagcggcggggccccggcccctgaccgagctgcggcgacgcctcgtgccttcttcccgcagtccgcgccccccaccgcccgcccccgggggctccccgcgcggtgctcagcgcgccaggtggagcagccgggcgccgcgctccggcctctcttcggcaaccgcagccggggggggggagagcccggagcggcgcgagagcccccaacccgcgcgcccacggccgccggcttccgcggttaccccgccccccgcaggcttccgctaaaacccggagaagcggagcgcgcccgtgcgaagcactgggtggctccagctccgccactgcgcgcgctccagcgccccagaaggcagggggcagcccggggaccggggtcccggagccccgtgggaggcgggcaacacctgtcgggacccgagggcgtgtctgagattgtggcctgaggtgctgcgccttccgatccggggcagcgggcgtcctgtagctgcgccttccgaatccagcccagattct

SEQ ID NO: 24387 - DNA, 2300 bp, Homo sapien
cccaaggctttgggagccctccttttgcgtcagtgtgacctggattgagacatggaatcaaagaagattattttggagctttaagatttaatgactgcttttctgggtttcagacttgcacagagcctatagcctctttcttttgaccaatttttccattttggaaagggaatatttacccaatgcctataccaacattgtatcttggaagtaactaacttgtttttgattttacaagctcatatgcaaaaggaacttgctttgtctcagataagactttgagttaatactggagtgagttaagactcggggggactcttgagaagatatgattgtattttgaaatgtaagagagccatgagatttggaaggtgccaggggttgaataatatggcttggatttgtgtccatacccaaatctcatgtggaattgtaatctccaatgctggacctaaagcctgatttgaggtgattggatcaacagggcagattttcctttcgatgttgttttgtgataatgagtgagttctcatgagatctgatgttttaaaagcgtgtggtacctctccactttccctcattctgcagccgtgtaagacatgcctgctccccctttgccttccaccataattgtaagcttcctgaggcctctccaaaagtagaagccactatacttcctgtacagcctatagaactatgagacaattaaacctcttttctttacaaatcatccagtctcaggtatttatttgtagcagtacaagaacaagcaaatacagagagccaatgcatcacatggccagagtagaagcaaaaaagttaggggtaagatgccacacatatttaaatagccagatattgtaagatctcactatcatgaggacagcaccaaggatatggcactaagcaattaatgagaaacctgccaccataatccaatcatctcctaccaggctccacttccaacattggggaatgacattcagtatgaaatttagagagtacaacatccaaactgtgttaatactgttacagaaatactcaacaaaatactaacaaactgaatttagcaacatgtttaagagattatacaccatgacccactgggattattcctgtgctaggatggttcaacatataaaaatcaatcatgtaatacactacattaacagaatgaaagataaaaattacatgatcatcacaattgatacagaaaaaatcatttaataaaaaattaataccctttcgtgatgaaaactctcaacaaactaggaataaaagaaaactatttcaatatattctaatccacacatgagaaacccatagcacacattactcgcaatggtgaaattgctgaaaaattgtccttgaagatcagaaaaatgataggatgctcacttttgccacttctattcaacatagtactggaatttctgatcaaggaaattagccaagaaaaagaaataaaagccttggaaactggaaacaaagaggtaaaattacttctgtttacacatgatgtggtcttagaaaattttaaagatttccaaaaagtttgttagaactaattaaaaacaataagcaaagtgacagggtacaaagtcaatacacaaaaatcagttgcattttgatacactaacaaacaacccaaaagaggaaattaagaaaacagttctatttgtagtagcaccaaaaggattaaaatatttaagaatttagttatctaaagagataaaagtcttgcatacaaaaagctacaaagcattcctggaaaaaaaagatatatattaatgaaaagctattccacatacatggattgagagacagtattgttaagatgccaataatgtccaaaacaatatacacagattaatgtagtccttataaaaatcccaatgattttttgcataaatagacaaacccttcctaaaacttatatggaatcttaaggtatccaactaatcagtacaatcctcaatatagaataacaaagcattgagctcatacttcatgatttcaaaatttactgcaaagccacagtaatcaaaacagtgtggtaatggtgtgttagccctttttttgtgtgttgctattatacatataaagacatacctgaggctgggtaatttataaggaaaatgggatgtataggaagcatggtgctggcatctacttggcttctggtgaggcctcaggaagctgtcgatcatggcagaaggaaaaagggtagctggcatctcacattgtgagcaggagcacaagagtaggggcaggtgccacactcttttaaacaaccagat

SEQ ID NO: 24388 - DNA, 2300 bp, Homo sapien
atggatacaatgaacaaaaatactcattatatatatgtgtgtgtgtgtgtgtgtgtgtgtatatatatatatatgtatatatatatgtatatatatatatatatcactctatccaccagatttacccccaccattaaaagtaatggaaaaaacctcaattaattttgcaccaatctcatacatacatttatatacagtatgtacatatgtacatacattcatatacatattttgccattaagagtaatggtaaaaaccacaattacttttgcaccagtctcatacatacatacattcatatacaaacaaacgcatacatacacaaattatacgttgaatggtgttagttgctgtattagtccattcttgtactgctataagagaccaggtaatgtatgaagaaaagaagtctaattggctcacagtactgcaggctgtacagaagcatagtagttattgcttctagggaggcctcagaaagcttccagtcatggcggaaggcaaatggggagcaacacttcacgtggcctgagaagaagcaagaaagggatgggggaggtgttatacacttttaaacaaccaggtcttgtaataactcattcactcactgtcatgagacagcacccagcggttactgctaaaccattcgtgaaggactcacccccgtgatccagtcacctcccaccaggccccagctccaacactggggatttcaatacgacatgagatttgggtggtacacagatccaaactatatcaggtgctatggaaaactagaaagaaaataaaaggagatgaaggatgtcagatagagttggatggtctgactttcctgatctcgctttatatagggtaataaggaaacaccttattgataaggagatttcggattagagacctgaaagagataagaggaagatccagaccaagggaatacaaagtacaagagccctggagcaggatcatgcaggaacccagtgaagaaagcaagagaatgacaaagatgagatcagaaagacagtagagggccaagtcatctaaaagggcttgaaggccattgtgcagagctactcaggacccatatcaaagcctttctttataccatatataaccacctctcgttagtccagcaggaaaaactcaatgtttcatcagataaatgtgttttcttaatgtttttcctgaagaaagagcagtatctctctctctctacatacatatatgtgtgtgtgtgtgtgtatatatatatacacatagtgtgtgtgtatatatatacataaatatatatagtgtgtgtatatatacacacacataaatatatagtgtgtgtgtgtatatatatatgtggctttcatcatttaattttcaaaaataattctattgatttaatgtgccaccagagtgtaattaaaaattatcaaatggggtcacagttgtaggtgggcatttgtgtttgtgtgtttgtggagagatgagcaataaggatggtaaatttgaattaaataactttctatagaatcctttcaatttcgtggcctgtcgtcttttgtattttcagttaatttatgaatacattatcagaaaagaatcttcaagtaagtacagttgctgaagaaaggatttcaaaaaatatgttacagaattttgtaattaaaagatttattttgataaactgatgcagatgtttgcatgttctttatctttgaaggatatttcactaaacacaatcttatgtgaagatatgacagttcttgtttgaaccaatttaaaaagtgtctttagtctgataataaatcattcatatccaccatgcacaaatttctcctatccttcccacaactcaaccacatacatatgtaatgtatcagatttactttaaaaaagtttaaaaaatagcatacattcatttttttaaaataatgtgcccattttcctaactaattataaatcaatatttggtataacccatgcaggaattaacagtagtaggcagcacagattgcatgtgcctttctgagattgttctgtgctcttctgtattttagaatgaggagcccgtgttttctagagacggcagcaaattctttatgacagtgcctgttaagcaagggggacgtggagaatttcaccacgtagctatgttcctcatccaggtaagtgctggcttttttccatgttttgatttcattgtcctcatgtccccgaaggcccagttcttgtggcattctaaacctctagttcatggtggtgaaacccagccatatatacaactcacagacatcttaggaagaggacctcca

SEQ ID NO: 24389 - DNA, 2300 bp, Homo sapien
tcaaaattacaaattttgactctctgtaaaaagtctaaggagaatgaaaagacaagtcacagagtggggaaaatgtttgcaaaagacataaccttaaaggactgttattccaaatatgccagaactcctaaaactcaacaataagaaaacttaatttaaaaattgctaacaaccttgacagacatctcaccaaagaagatacacaaatggcaaataagcacataaggagatgttccacaacatatttcatgagggaaatgcaagttaaaccatatgataccagtttacatctggattagcttagcaaaatccagaacaccaacactagatgttggttaagatgtagagcaaccctaactctcattcattactggtgagaatgcacaatggtacagccactttggatgatatgttggcaatttcttacaaaactaaacatattcttatcatacaatctagcaatcttactccttagtatatatccaaagtaacggaaaatttatgaccacacaaaaacctgtgcttgaatgtttacagcacctttactcataattgcaaaaacatggaagcaaccaagatgtccttaagtagatgaataactatgatacatccagatgacaaaatattatttagtgctaaaaacaaattaagtattgagaaataaaaatatggaagaaacccaaaggcatattagtaaaagaaaccaatccgaaaaggctatgtactgtgtgattccaactatatgacattctagaaggcaaaactatgtagatagctaaaagatcagtagttgcagggatgagggaacaggaaggaataaatagatggttcacagaggatttttagggcagtaaaactattctgtatagtactacaatggtagatacatgtcattatatatttgtccaaatccataccatatataacaccaagattgaaccttaatgtaaattgtggactttgggtgataatactgagttaatgtagattcaaagattgcaacaaatgtactactctggtgggtaatgttggtaatgggtgaagctatgcatgtttgggagtaggagatatgtattagccatgggtctccagagaaacagaagcagtgggatatatacagataaataagaggagatttattatgagaattggctcaattatgagtgccaagatttcccatgacatgttctctgcaaggtggaaaaccaggaaatctagtggtataattcagtccaattctgaaggcctgagaaccagataggagccgatgatataactcccagtccaaggcataaggtctgagaaccaggaggtataagacccggaatctaaagatctgggaatcaggagttttgatgtccaaagtcaataaacaatgcatgcttagcttaagaagagagagagaatttgctcttcttctgcctttacgttcaattcagattctcaatggatgggatgatgccttcccatactgatgaaagcagaccttctttaaacagtctattgatatcatttttttttttttttttgagatggagtttcactcttgttgcccgggctggagtgcaacagcatgatcttggctcactgcaacctctgcctcctgggttcaagtgattctcctgcctcagcctcacgagtagctgagattacaggcatgtgccaccacgctcagctaattttgtatttttagtagaggcaggctttctccatgttggtcaggctggtctcaaactcccaacctcaggtgacctggctgcctcggcctcccaaagtgctggaattacaggtgtgaaccaccgcacccaggcttaaatgtcaacctctgctagaaacaacctcacaggtaaatctagaaatgttttactttctatctagacgtcctttagctcactcaagttggcaaaaaaaattaacaataacaggctatgttggaaatctcagtaccttctactcaatttttctgtgaacctaaaattgttctaagcaatgaaatctgtaatataaaattataatatataattataattgatgcaaaagtaaatacttttgcattattgaaatttgccatttgatactgaaatacattcctggccgggtgcggtggctcacgcctgtaatcccagcactttgggaggccgaggcgggcagatcacaaggtcaggagatcgagaccatcctggcaaacacggtgaaaacccgtctctactaaaaatacaaaaaaattagctgggcgtggtggcgggcacctgtagttccagctactcaggaggctgaggcaagagaatggcatgaacctg

SEQ ID NO: 24390 - DNA, 2300 bp, Homo sapien
gaagttttaaagactgaaacgcattctgaatagatactgggataggctccagctgtgaagaacaacaggcttttcagaagcacgtgattgttacctcatcctcacaggtaatttttgagtagctaacccaatgacattgttttctttgctagagtaactgatgatgtggccttggaaattcactctgttaaaaataactctcaaccctaattttgagagttgatttgaagttataatttctcattcttcttctaaaaatccagaagaattggcatcagtagctttatctatgtttcttaaaaggttatcaatccctaacgttaagcatttccatgcacctgaaaggatcggcttctctgatctaaatgtcttaaacacctcgtaaatgtgggtttttttggttttgaggaaatgactgccaatcttcactactagctagaaaaagtcacactctagaaaaaagggagtacctttccattactactaccaaaacatagccccacaaatttaagttacaacataaaagaaataacaaattttgagcactttctatatatacttcagttgtatctatttcaaagtcacagacccaaaactcacacatgtaatcaggtaaatatatatgtatgtacatagagctatagaaatagatacatatgtgtatatgcatatatatactgatatatgcataaatttaaactggcatatatatttacactgagataaatgtttgcgtgtgtgtgtgcgctcttacatttctgaatcattcttcagcctgcctgatcattaacaaattaatctaagcacattattatttgtttgtcttagttttccagtccaatccaatgtgatttcgaagtcaattccttcacattctgtttaaactccctcccaagttttctccctctctgttcctcactatgatcaggtctaatctccagggtctcatgttctgcccctccaagtaaacaaattaatccaggtttcatggactcttccagttgttcagctcaaattgattactgttaaggggaatttgagggcattgggccaatttttaaagacaaatatgaatttttatggaaatctccaagtattttaatgttgataacaatttttttaaaaattaaatactatatgcatacccctgtcttcctccccatcccaaaaaagagatgactattagctagccacattgcaatttctgtcctggactgctgaagggtccttgggtatacttaaggaatatataaacctctttttcaaactgcagtcaacctattattaatgtagtaaagttaatttaaattcataggaatcagtatttttagtaagctaaaaagaataatttaggatggaatgaatggaattgaaggaaaaagagtgaaaagcaagaatattattttgagaaatgttatatttatgtgtgtatgtgtaccaagtgacacagaaattgtatttctgaggagagtggccaaacaagtttggaaatgcatatatataatttagttctattcagtttcccaaatacagttgtccctcagtatccacaagggattgagtccaggaccctctatgggtaccaatatcttaggatactcaaaacccttatatacaatagtgtaatatttgcatttattttacacacaacatcctgtatactttaaatcatttctaaatgacttataataccttatacaacctaaatgctatgaaagtagttatcacactgtattatttttaattgttttttttttaatgttttcaatgggggagttggttgaatccacagacagggaattcaggtacagggagggccaactctagttctgcacccacagaggataggaacataaaaatgcggactccctaaggcctccttcccctccacgttctttcttcagtcttcctctagggggagctcaagttagctttagcacagtgtgaagccagtgcagcgtctcgcttccacttctccagggggcgctgcaaagattttggtcgccaaagatatcacggtgcgcgcgtctggaagcatttccgctctggagcattttcgttccgccgggtgccagcgttcctgtgacgcgtttcctgttggccgagctgcgcacgtgcggccggaagggaagtaacgtcagcctgagaactgagtagctgtactgtgtggcgccttattctaggcacttgttgggcagaatgtcacacctgccgatgaaactcctgcgtaagaagatcgagaagcggaacctcaaattgcggcagcggaacctaaagtttcagggtgagatgcgttgact

SEQ ID NO: 24391 - DNA, 2300 bp, Homo sapien
ctccccagaaatccactgtattaaccaatggagaagcagcaatgcagtcttccaattcagaatcaaaaaagaaaaagaagaaaaagagaaaaatggtgaatgatgctgagcctggtaggtatttattatctttgaacttcagccatttagtttttcacagacggttattgttcctctttctattactattgtgtgcacatgacatgagaattccctgtactcaccagtatgttagagattagcctggtagctaatggaaacattttattggcagaagcggggagtccatttcaacttttctcaaaatattgaggaatatatttttaatttcactaaccttgaagaaaacctctctcagaaaagactctccttagaattctagaaattttctcttctttttaagttaccttttttcctgcttgattcttcccattttccttccataaattcctccctttgaaaggaatattagttacaaagtatataaagtaggaaacttctgaataaatggaacattaatttccaagtgctaagaatggcaggaggaaaaggaaggaatgttttttgaagatgatggaatttcagtaagctcggatgaaagaatggacattataattgagatttgtataagcagagatatcaaggtaggataagataggggtcagcaaactatccctccttctacctgtttttgtaaataaagttttactgggtcatagcaatgcctatttggttgtgtttatggcaacagagatcatatgacctgcaaagcctaaactatttactatctggccctttgcggaaagtttgccagcccctgagttggaacatcctattcatgtattttacctgaaataagggttttatttagaaagggactttgaacttttccaaacatgcattactgtcttcatgatgcctacacacagaagtcattgtaatcctgttctaaaattattgccttcacaattcttgttttgagtatgccccaggaagtggtattatttctgctcccaagcattgaatcacaatgctgggcgttttaaccttatgggttttttgtttgtttgtttgtttgtttgttttattatgagatggggtctcactgtgttgtccaagctggtcttgaactcctgggctcaagtgatcctcccacctcggcttcccaaagtgctgggattacaggcagaagccaccacacccaaccaccttatgggtacattttaggaactattccagggaaaacaaaataagccatggagaccagctgaagatatctgtggcttttgaacatgtaggtcctacaaagttgactctttcctggaagggtggccgtcaggtacagggaggagaccagtactgagctacagagagtcctgggttgtggtctaagttcttttcaaacatcactaattgccatatagttttatataaacacagcatgtggttaatccatttgacccagagtcgaacattgaaaagagaagtgagaggtaggactgaaaaggtagttggggccacatgaaagttgtgaatgtagaaatgagggtgggaagaagccctgcctttcctcccaccctcatccctgatagccaaggcacagtccagtgtatgtcagccaggcaagtgggttgttgcccttcctttacagtctatctctagtaacatgaagagcctttgatagtgattggcgtgggaagaaaaatgactacttataatgagtttttaaggattatgttaatcaggtatgcttcctttcccctcagtggagtatgtgaaacttataattggtatgtttatactgtttagttgaacaaaagcctaaaaggttttgtcaccaagtctgtctgtaccctgggtttttaaatacaaccactcatttttcaccaaacagaattcttaacaaattaatacagcatatacttagcttttgaaaatatacgtctttatatcagagatcttctgtttgttgatctcatttggaattctattttaaggaaaaattttttcggattttgtcttttaaaaccaaagatacgaaaaaagcaaaaactgaaaacaaagggaaatctgaagaagaaagtgccgagactactaaagaaacagaaaataatgtggagaagccagataatgatgaagatgagagtgaggtgcccagtctgcccctgggactgacaggtaacgtccaggaagttttctagaggtaacttctttaaaatgtgcctctcttagaggattataggtttgaaggttcagttgtgactttcagtttacctgaaaaaagtaactatcaacaagaa

SEQ ID NO: 24392 - DNA, 2300 bp, Homo sapien
gaagcttcaccatcctggcggcagcatgccaagagactgggttggccaggagatgtctcccatagggatatgggaagggctttgagaccatcttggcctcacatgggtgctaatgtagtcaccactctctctatactctctgctttccctccaggagggccgcaagaacgagatgctgctgtccaaggtgaaagcgaaggcctcctgaacatccccagccgtggctgtatgtcattgattttacttttaagcaccgtatatcacctacaagatcatgaaatggttctgaaagcgacagtagagagatgcagttgtgatgatttcaacaacctggatgttttctttctcctctttgcttccattcatctctgttggctgctgttgatggagtcagacagtaaacacgtggcttggataacacccatcatcctatgaagaatatagggagtacttgttctctgttgattcaacttttatgtctccagtaacattgcgcttatgaaggtacctgtatttgtatggactctgaataaagaagaattcatttgtttagcaagtattagttcagcaaccactgagaaataagcactgaggaagattcagagacgtgtaaaacacagttcctactgcacaagtacccagcaggtggcccagggaggcagatacagcacacttgaccgcagaactgggctatccaagatgtttttcagtaaacagaaggcatttagctgaaatgatcagcccatgtagtgttggtcacttgggcctttcacctgccatggtaccttttgttcccagctcctccaggtgccagccagcaggcttggtggtgacagcaactggaacgaaagttcagtgttgttttaatttttatacgttactcaagttgatttctcagaaaattgaaaacagaccttgtgctgaggacacgtcaataaaaattataccttcccctgccccaatgttcatgtgagtcacagcatgcagaggggctgtgcatccccctcattgaaggcacatttgatgaggctacgctgcagatgggtcatggtctgagccaggagagagatagacactgttccctgcactcaaggcaagtagggtgtcaggaggaagagcagtagggtttgcagagatccagggaaacttcctggaggaggcagcatttgagccctatctaaagggagaatcggatgttgataggaagactgttttaaatgaaaatacactatgattaaaaacccaagagagtgcagaggagtacaaggcatgcatgttgggaaaggagggaataagctagtctctgcaggaggcttcagagacccgtctgggaagtagggctgagactaggctttggagggccttgaagggcagctgagggttgattttaatccttggaaatgaccagtgcagatcaaacatggagctcctgctgccctggtcctcaggagtctggtaactcagtcatgttctgtaggtttgtgctccattttgcataaatcttgcaaacataccaggtggcaggtttgcacagtaacacaaaagcttaaacatgtcaagcaagtggggcattcagcagccacagaaatgtgttcatttttagtccctaatggatgtgattaagcagggctgatgtgtacagatttaaaaacacacacacgtgctggattaaaaacagccactggtttcagtgccagggccagcaaggcctacctgagccaggcggaagcagcagcttgcaaatagaaactgccacctgcgagcgcttcttgggtcatgtgcagctccacctcagctggtccctgagccgtggtcatgtgggggttttgaagggctaagttgaagcaagtaattgcaaaagaacaggtggcactctgagggcaggggaaggagacagaagtttgactgcgtttgaaattatttcagtcagggaaacatctgcgttgtcttgttaagcagcttgtaggcccacccctggctaactgaactttgtgagcagttggggcagttatttgaatatttgtccaaaggtggtagggaggcagatgacattctggggttactggagtccacctctgtgctgatggggaaagtatggcatgatgaatccaaagcaaccagtaattctttttgaaagtgcaggcatttattttgagctgtatttcataggagtttcatttggtttggttttggtatagagaggtgtccatagatctctattccctttttttttttatcgacaaggcctactacggataaatcagtttttgttgcctgaatacactttgaattagactaca

SEQ ID NO: 24393 - DNA, 2300 bp, Homo sapien
taagctaagctactgggacacttcctatttaagaaaagatgatcagatgaagaatttaattgttagttaaattaattaaagaaaagaaaagagatgagccttttcttcttagaaagctcttacttccctgccaagatccatctggggtaagtctttgttggtgaaggtttcctgaaccccctggtgagggagctaactctctttccttgggcctggctctgccccatctcttctcatattttaatcccacagttacaatgtcatgttcttttctttctcccatacacctcatttgagcagagcattgggtaaatgtcagatgagtaggtgggtgcaggggtgagaggctacacaagaaggtgggtgaagcaggtgggaagatcccggggacctttcctagagccttgtcttagtccatttaggctgctctatcaaaataccttagacgtggtaatttgttgcttacagttctgaaggttgggaagtccaagatcgaggcaccaacagatctggtgtctgatgtccatagatgatgcctagttgctgcttcctcacatggtggaaggaggcaagggagcccactcaagcctcttttattttcatttttttgagacagggtctcactccatcatctacgctagagtccagtggcatgatcataactcactgcagcctcagcctcctgggatgaagcaatccttccacctcagccttccacatagtcgggaccacaggaacaccaccatgccgggctaattttttttttttttttttggagacagcagagtctcactttgttgcccagactgagcctcttttataagggcactcatctcattcacaaggctggagccctcatgacttaatcacttcccaaagaccccacctcttgaaactgtcatattgggtattaggttctaagatacaaatttggggcagacactaacattcagaccatagcaaacatcaacagttaaaacactgggatttaaagagaaaactaaactttttcccagagtacccttatctcccagttacacaaacagactaataaaagttgtcattgcacagatggctctctttgaaaaggggggcaccagaacccacctgcttctctctcctttatcacattgctctcagcttgagttggcttcttgataggccttgttggaattataactatttatcagtcatgaagactagtagctagattggagtaatgatttctgaaggtgacataactcttaataagctgcttacaggcccaaggatggggcatgttactttgaaataaccattgagatataggttaaaatttctcattgttaacttgaacccagttaataacaagtttgaaggtggttttctgccttgtatccttcttaaaagtgaaaatacacaatccttttgagcatttaaaggaatgttttcaaatttctaaaagttgatagacacaaggatatactgttttagcaagagaaagggaattgactttttcaagatgtgagtttacagttatgtaagttggaacagtaaaagtaatttattttcattctcttggtgttgaagtcctgaatcctatcttctatgtgtcatcatttgccaaccagtcttatgctgggatctcaagtgctgaaatgctgtttgtattctgcaaacaggcaagtgggttaactgcattgattgtagccccactgaaaagtcagagggacttgaatttggatctgggcctcatcagttatcagctatgggactttagtcaaataaacttgactgctctgagtctttatttcctcatctgtaaaataagaaaagtgtcttttttcactgaatataaagattcagtgatataatttatgcaaaattcctagtacatcagctgacatgtacttggtgctaattaaatatgaggtttttttcttcatttgttgttggcaacccttttaaaattttcacatttgctcagtttaaatctttctgagctttcattttctcatctgtgaaattcacatctgtgttgtcataaggatcaaatgagagcatatgtcttttatctttcatttacagctgcgagcaagtcacaccagcctacaagccagatataatgaagccaagaaaacgctgacagaggtgagcagatagattctccttcttctgtgggcccttgtcaagaattgtttttgacctgaaccactaatggaatgatgtgtttcatcggtctgtgtgtgggagacacgatcctgttctcagaggctgcagtcattttgaggacataggacagttacatggtagtgcgtgac

SEQ ID NO: 24394 - DNA, 2300 bp, Homo sapien
tgaatgtgaaaccagacatctggagtttatcttacaggcagtgtgtgtggtgcattgttgataagggctgggagggtgagctaaagagggataacatgaaagctgtgatttaggaagggatgagcaaaacaaattaaaggaagaaagatgaagaagcatttgcaagagttctggaatgaagtatgaatgaaagggaagggaagataaatgtgagatgcatagtaaaggaagacttaacaggcattgttgggtaagggaggactcagagatgattatgagcatgtgaaccaggatatcttattggtgttttatatagagagatggttttttatttttggtagcaaaggaagagaggaaaggtagttcatgatagtaaatagatgaaagagtattagaatatttagatggatttaagtattagataaagattggggtaaaaggaggatataaattaaaaattttaaatcaaaatgctgagatacggccaggcgcgatggctcatgcctgtaatcccagcactttgggaggctgaggcgggtggatcatgaggtcaggagatcgaaactatcctggctaacacggtgaaaccccatctctactaaaaatacaaaaacaaacaaacaaacaaaaaaacgggcgtggtggcatgtgcctgtagtcccagcaactcgggaagctgaggcaggagaatcgcttgaacctaggaggtggaggttctctctgggatccgagtacagtgagccgagattgcgccaccgtgctccagccagggtgacagagcgagactctgtctcaaaaacaaaaacaaaagcaacaaaaaaacaaaaaaaaagcaaaatactgatatacatatattagatgaatttattatttttaaggcaatcctattatgtggcaataatcaccctttaatgtatctgggttggaagcctttcatatatttgttttcgagatcgaaaagggaagtacagtgagggatgcacttttgaattcccttcttcatttctatgcctgttgtcagtaacttctggatgagtataactttttttgtttgtttgttttttagagatagagtcttgctctgttaccaaggctggagtgcaatggcacagtctcacctcactgcaacccccgcctcctgggttcaagtgattctcgtgcctcagcctcccaagtagctggagttacaggtgtgcaccaccatgctcagctaattttttgtatttttagtagaggtggggttttgccatgttggccaggctggtctcaaactcctgacctcaagtgatcggcacccccacttggcctcctaaatcggtgggattagaagcctgagccactgtgcctggccaagtataaagtttttgagacagagtcttgctctgtcgtccaggctggagtacggtggtacgatcttggctcactgcaacttctgtctcctgggttcaagcgattcttgtgcctcagtctcctgagtatctgggattgcaagcatgggccaccaaacctggctaagttttgtatttttagttgagatagcgtttcaccatgttggccaggctggtcttgaactcctgacctcaagtgatccgcccgcctcagcctcccaaagtgctgggattacaggtgtgagcccccacgccggccctaagtcctaagtgtaaagttttttttagaaaacaccataaaaccttgttcctgtttgtaaggagtcataatccatttgagaagactgtcaaagtaaaccatgggttagagaaaaaggaagtattgtgctctaaccttccttttccctggattccttcagcatgtgatgagtagtatatactacttgggcatgtgtctccctcagctatgaagattaacagcccgttgaggaccgcggacccatttgtgactccaacaacactgtccacatacttctgtgtgacacttgctgaattttcagagaatctattgtggtgatgtagccaatgtcatctactccttggcaatgagcttgtggcatcaggggatatacctggtgttcctttattcagcatatcttttaccagccaaagttttaccttttattttaggtggaaacaagagaagatgaagaacaaaatgtcaagttgactgaaattctggagctcttggttgcagctgggtatttcagggcaagaattaaaggcttatcaccctttgacaaggtaaggggaaatctttctaaccattacactatcttttgtcagaatgacatggttaatcatggcaaagaaaggaggaaaagatgatgttttaacttcttccatgtctgt

SEQ ID NO: 24395 - DNA, 2300 bp, Homo sapien
tggaaggcaggccaagtctagctatctttgtaaagggttaaaaagaatgaattcgggcagggcagtggctcacatctgcaatcccagctactgggaagcctgaggcataagaattgcttgaacctgggaggcagaggttgcaatgaaccgagctcacgccattgcactccagcctcggtgacagagtgagactctgtctcaaaaaaaaaaaaaagaatgaatttaatgaattaactggtctagtgacatcctaataacacagactatccatatttatatttactagcttctgaactaaatgatgataagttattgcttgacctggtgagtgtggcctcttagcagtcagtgaaagtttaaacgaaggacatacagcagcaggttgctcttcattaattaatttatttattttccccccagaaagacctccactgatagtactgtggaatattgggttggacggatttaaagtagaacgtgggagaccagacagaagtctacagcaaaaggccaggcaaaaacttgatgagagcctagaatacagaagtggcaaaaaagaaaacttcaaatgtcacagtacaaatcctattgttcactatcctgggtcccatcccaggcaacgtgcatgtaagattttacctaatacaggggttctgacaacattatgcttgtcaggttttcttaagacaacaaaatggacttgcattcggggagcacacactgacaaacaaatctgtcctttcagactatatatattcccagcttctggacacagaacacagtgatccctcaattagtggatacttgtgatatgaaagaactgaggatttgggaggaatgcagaggagtaacattggtcactggcaggtaagtgtgaagggacgactcaccacgtcaagcaagcagtcaccctgcccaatgcctgctccagaaccttaggaaaaaggcagaggtgcggcgtggcttccatttctctccagaatccagtaaactagactagcctttgagtaaaatcaactgaaagggacgacagatgcaaactacctatgagatgctaagtggtatttgcagccaaaagaaaatgaatacactttccctgtattcccagcaaacgtggaaatccgcaaaccactcatgaccccctccctagcactaagtgagtacttaacaaacacctttggaaaagaaccccgccctcttctggagaagccgcagcctttccgcccagagccgggtcccccgccacacagcacccctggagtgcgtcccaccccgaacgccccggcgcgctgacccagcgggacacctccctggtgcgcgcaagtctcccaaacttcctcccgccgccccggcccgggtccacgcaaggagggtggcattccctcccgacagcaaggcgggtggggcgggccgccgggactctgcggggtggcggtagacgtcccaaggtcaccacccgagcccgaaccgcctcggagagcggtctcgtgactccagcgcccagcagcctcggccctcggggctagccctgcggcgcggggtgggggagcccgtcccggacagggagaaaggtgggagcccaggaccccgcggcgcgtggggctgcgtcagagcaggtgtcgggctaggaaggccacctgcgccccaagagacccgggagcggcttaagtttgtcctcacccgcccgccgccccctgcccatgcaggggtacctgctccccgcctccaagaagagggtcggcgcttccctgaggtggatacgcctgaggaagggggcggggcgcccctaacgcacccagggcccgctcagcccgccgccccgcggctcggccctctcttcaggaaccccgacgtgtcagggaaggaggaggcgttcttacctccgggagaccctggccctccggccccctgggcaaccccatgatccgaccgggctgtcgtaaggcgagagcgaagcccgccaagcgtccggaggaagctgtccctgccgcggagctgctaccggggtggagtacaaagcggaaactccctctgccgccgccgccgccgccgccgccgcctgcccgaagcgccgcagccgggcagagcatgcgcgctggggccggagcgcggcgccactgcgcctgcgccacagcagcccggggagaggtgggctgggctgcaggtcctggcgttgtgctggatcatcgcgcccgtactctgaagttttctccgtggcgctctttgagaggggttcctcctgcatcttgagaatattttgcatttcggctcccttctcttctcgctgccatcggatgccc

SEQ ID NO: 24396 - DNA, 2300 bp, Homo sapien
gcccaggctggagtgcagtggcacaatctcagctcaccgcaacctccgccttcccagttcaagtgattctcctgcctcagcctaccaagtagctgggattacaggcatgcgctgccacgcccggctaattttgtatttttagtagagacggcatttctccatgttggtcaggctggtctcgaactcccaatctcaggtgatccacccgcctcggcctctcaaagtgctgggattacagacatgagccaccgcgctcgggaaggacagtttcttactgaggaagttagctactcatgcttatttaaaacattgcaaaagcattataacagggaactcagggtgtggcctgagtcctgttattctccaggctgctattatatacagctgtttaggcttgcctgctatgtgagatcttactacctgttcctaggcatcagtacctgtctggtcactcaacagtggccacaaattattatcactctccattccccatcaacctataccatttcagtgaatgacagttttaaaactacaaaaacaacacatttgggaagttatgagagtagaaattgaagtttattggcttcacaaaggataagagcaagatataccacacaggagggttcccatctcaataccttaacttgcatattcagattattcaaattattggggaccagggtttggggatcgtgcacagctttgagtaatatttgctagttatatttaagaacaaaatggcatccttagggcagttccaactatttgtgagctctggctccagacaaacctctgtctgtcaggatgaactccaggaggagtacaaaaggtgcaaaaataaaataaaatagaaaacatcatatatatatacacgtatatatatacacacatatatacacgtatatatatatacacacatatatatatatacacgtatatatatatagtttttagacagggtcttgctctgtcacccaagcaggagtgcagtggtgttatcatagctcactgcaacctcaaccttcctggctcaagcaattctcccacctcagcctaccggctagctgggaccactggcaccgggctaattttcttattttttgtagagatggaggtctcactatgttgcccaggttggtctccaactcctaggttcaagtgatactcccgcctcgacccccaaagtgctgggattacaggcatgtgccaccgcgcctgcctactcttttaaagacgctagggatgcaaagaagagacgaaagcaaacacgaaacctttttgatctcaaggaactaaaggtctgagtctgacacttcccatcccacacacatatacagagggaaggatctcttctccagcaaaagttttcacgaaagtcatctctttcctcattgcttaaaagaaacaaaaagccaagaagccgttatggagcgggtgtgggggcctgtgaccttttgtctagttgccatcctccgggaccaacaaggggtacatcaaataagggacgcggcggctcaaatgacatgaacataggagtccgcattctctgagatgtcattcctccaggaagacccaggaaccgtgaatagggcggggtggtgggcaatatctgaagcgaggtttcctgggaacgcgatgccactggccaggacgctggagagggcagcgggcttgaagaatcccttctcaaggggtccgttcctgggtcgtatatggagaagtctgtccaagcgtgtgtctgtaaggtctagagccgggcgtgcattcagaatcctcaagctcatctgtacttggactctgaccctgaagcgaggcggtttccgaagtctgattcaccgaggggacaggacctatttggggcatccgatggcagcgagaagagaagggagccgaaatgcaaaatattctcaagatgcaggaggaacccctctcaaagagcgccacggagaaaacttcagagtacgggcgcgatgatccagcacaacgccaggacctgcagcccagcccacctctccccgggctgctgtggcgcaggcgcagtggcgccgcgctccggccccagcgcgcatgctctgcccggctgcggcgcttcgggcaggcggcggcggcggcggcggcggcggcagagggagtttccgctttgtactccaccccggtagcagctccgcggcagggacagcttcctccggacgcttggcgggcttcgctctcgccttacgacagcccggtcggatcatggggttgcccagggggccggagggccagggtctcccggaggtaagaacgcctcctccttccct

SEQ ID NO: 24397 - DNA, 2300 bp, Homo sapien
accatacctctttgtacatgccagactctgcaatctgtttcatgtttttccaactctgagcttccaccagaatgcacaggctaaccatatctgcatatttaccctcaacgcccactgaaagaccacatcttccatgaaaactttcctcaaatctggtcaaagaagacaatggccttttgtatttctcctagggattttatattcctccttgtactgcagtaggagtaactgcattagatataggaaccttggaactggtgctatatggtttttgctttttaggttctgtcactacttgcaattaatacatatttaaacgaaaataaatgcccctctaggttacaatgttccataaggattttcttgaaggcaatttctaagtgtctgaaaaaagctcggttggagtagacatgaactggacatacaggacttgtattgctttaaggaaatacatgatgtcagaacattttcaaattattgtctcttttctgaatgctttctctattcttttaaaaatcatcgtccattctgtataattggcccagatctttcttactggtagtgtaaaaacttacaggagtgaaatttgaaagctacagaaaacattagagaaaacactaagatataggaaatgttagagaagcatcatgcaaatacttgcctagaaacattttgttggaattcagattctttttcaattttcagaagtaaatgtagataaaaaggtcaaaaaacaaaaatccatcttatcgtttatcagttcaaagtaaatgaaaggagtttaccatctgacagtcctttggaaaactattatgcaattactctcggcccagatttcatctagaacattcaagtccattgtaatcttaccacatccatacacgttttgggttaagccacctccaaatggaatagctcaataactaatacactcaagagagattattttttctctctttttaaaaagagttgcttaaaaaaaacaaattcagggggcagctcacgcctgtaatcccagcactttgggaggatgaggcgggcgaatcacgaggtcaggagtttgagaccagcctggccaatatgatgaaactccatctctactaaaaatacaaaaagtaggcagacatggtggcatgtacctgtagtcccagctactggggaggctgaggcagaagaatcacttgaacccgggaggcagaggttgcagtgagccgagatcatgccagtgcactccagcctgggtgacagagagagactccgtctcaaataaataaataaataaaaataaataaaaattcagaatagggaagcaactcctccttatgacgagtacctttcggcacttatatgggcttgcttttgcattgatggcaccactttcattcaaaaaaaaaagttcgcttgcacaatctgcaaagatctgtttggcttggtttcatgttctaaaagtatggttttagattaaatgaaaaataatacttctgaaaaataagcggttataaggtttttaagttttctttatgttggtgtaaacttataaagcccttcctatgaaaactgtcccccaaatcacattacttggtcgtcctcgaggaacgattttgaatgaaaagcacataaagtgctgtagcatggagacgagagacaaataactatgcccttctcccaaaataagttatgacttactaggggaggaaaaggagcaaagagtataaagcccggtcctctgcgggaagtacccggaggcctgccccggaacgcgctcctttcggctacgagatgaggggcacgcagacggacgcgcccctcggtgagtgtgcgtgtatcagtgcatgattcctttactccgcccacagggtctgggcatccgtcattacctacggctgcctggtcagcaaacaacagcagatccgacaaccgccagtcacctcgacggtccacgcccaccgctagcctccagtttcccgcagaccggaagcccttttgccccggctcgcaggtccacgtcttattgacagcaggaaccggaagctcttctgccccgatcgcctgcgcgcggcctcgttggccgcacaggcgcagtggagctcgggcggagttgtgggagtggaggaggaagaggcggtagggggtacgggggctggtcccagaagatggcggaggcgggggtgagttgggggtctcccggcgaagcgcgggtgacgtggtgctgaggaaagcggcctgaggaggagggtggcccttgggaagaagaactacttgtgtttttgcagcctgggaaccctggtggcaggtgcggg

SEQ ID NO: 24398 - DNA, 2300 bp, Homo sapien
catgtgactagtgtgtgtttttttcttttttttctgtcaaagcttagctcacatgggaaggactcttctggtccacatgttactggtgcctggggttctggcaatctcccagattagaaatcaagagatatcaccaaacatagcagcaaaggtcagtttaagtttatcccagcttgtgcacaagggagctagcattgagagaggaaaaaggagtggactgctccccgagggtactctgtgggggggttcgttttatggggtctcttaataggaaaaaaattacatcagggcatgtgtagaagaaagttttctaacgcttgtgcagtggctcaacatgctgcttcatacattgggtgtagcattagcattgtaaatctccagccctgggtgcgaattttagcgttaaaatgaggaagaggtaactttaggttagagttgaagtctaactggtgtgtggcgttccagggaagtctctagctgcctgaaataggagcttgcatttaacagcttcttgggtctctcattactgattagctgagagttagataaaagctagagcttgagtgagggactttgatccttttcctccagattattttaaaacagggaatcaaccagcctgcctgtctcacacattgttctctctctctgaactttcagaattttccaactgtaccaactatcccataattgcattgtcttctatcacccctacagaatcttgcttatgtagtgggtaaggctgtgttaacttggtttcctgtctgcaatgcttgtatcaccaactagatacataggccttgaatataggccagtgtcttcccatcttgatgtcttgcagatattgtcacatggtgatgtcaagttaagatgctagagtttccaactgtcatgtatcctggaaaggcgctgcagtgaagcatcattagctggtcagtcaataactttcagcagacatgaattgagtgcctactgcctgtgagacactgttcactgcccttgtgtgtgtgttagagggggtggtcagggagggtctttctgataggtgcacctgtgagccgagacctgaataaaataagagaatggggtatgaggatagctgcagaagagcagtcaaggtagcaagaacagccagtgcaaatgccctggggttagaaagccagtgctgggctattaacgccttcccttgatggacctaagagagcccttcttctctttgcacttaggagtcctcaccaacccattaaatgagtccatcagacaagatttccaagctaacatttttgtgactttatggaaaaactatttttttaatggagaaaacacattttactcctgcagccgagacacgcactcccctctcacatatttgacgtcatttttcccccactcccttcactcacacatacttcacttttctttattttagaatcatgctgagtaacattttgtgaatgtgtttaacacaaccatagagtcagggtcatgcattaacaactgctcaagtggcataggttaaacaatgccagtggcacttgcccctctcccctctgccctcaacacacacactcctgggagtcctgagatcgctatactagaagattctaatgtggtcacttccctgggtgacccatcttcatctttttcaagattgcctggttatgtgctagacagagacaccgggtaaagtgacctttccactgaatcctgggatccaccaggtattactagaagtttttcaccctggattttagatcgctctgtcttcaggtatgattttctctaatctggaatactctattcatttgaattacaaagggacatgtggttttggtttgtttactcttaggtcatgaaatgataatttagcagttaatgggcaaagaaaaagaccttcttttcatggccaggaactttttgggagcctccgtttttaacagcagtaacttgctctacactgactctgagctggcccacatccctgaaggtatggtcttaatgggattagggaaaccatggctgacagggcttccttgggatgacttctcagcacaaatgttctgcctccctggatccagcccagagacttgacttgggataggaaaagagtgaaaggtgaacgaaagaccataaaccacttctctatgtttcctacaaatgctggggtgtctattattctgcatagtggggcgcattaagcaaattctcctttttcaggatgactgaagctgaatttctgtttacttttgtttatgcatctccgttaaaccaggatcatatcctcaacccccaaagaggaa

SEQ ID NO: 24399 - DNA, 2300 bp, Homo sapien
ggtggggggacgagccagcgcgcagagtgccgcctaatccagctcgagctcgtgggccgcgggtgcatttatcatcccattactgtaacaaatccgggctccactacatgaaaggtaaaatgaattaccgacgttaagccgtcaataaagtcatttctgtaaatggtgtctccaaagggccgccgtattattcagctggctttatcagctggctggaaattacgtggaggagccgggccgcgcggcgcgcggggccgctcactttgattaagcgtcttgccagcgcgatgtgacagagcttttgaccagggttttattcacaggcctgtgatgaacgccaagctgatcaggcggaatgaagagtaattaaaacctataaattatcttccgcagcccttctcgaggcgtctcctgcaggcgagataaggcgtcgagaccctatttaccgcgctgaaagggaccgcggcgcacaaaagctacgcagctaaataggatattgatagtgtcctaattagaatttaattaagtacccacgcttgcttgcgggataaagatttcaattttgcgaacttaaatataaataaaatcccacccccatttcggggagaaggggtgggggcgcctggagatttcggggagcccttgggtgtgctactgaagaggactcgggagactccaaggtggggttggaggcggcttgggaaggtagagaagactgcagcgcagcgttagggagagaggttttctcccctaggctgcagcgcaagtctagccgggaactcagccccggaaatcgggggaccctcgcctgctcccaagatgcggtgagcaatataaattcctgctctccaccagcccttttgagaaacttcagctactgtggtggtggttcggcttgttgtgggtttagttgcatgttcctcctagcctaaccctctgtgacttttctggaaaactggaggtagggggattctttcgcatgtcacaaatagacaatatttccaaagggatcctttctctactgtcccagttgcggagggcgttcagggcgaggaggtccgctggagctctaagatgacacccccgaaggcctcgtttgctgacgcctttctcggccaccgcaggcttcagcatagtcggatactggtcctccaaaacgaatccggagacaagtcccgcaggtgcctagagcttcagtccacacgccacccccgtccctcacattcccggttatgagaaaattttgggggtgcctcgaccaggaaatagcgaaaaagagatcggcagacgggagaatgatagcagctggaggaacggcatttccctcaaactagggaagaacgcacagagctggagccggaggcacccagggagttgggagcaatcccaggaaattcagtcacccggcaattgagggaaactccctgttcacaacttcagctagccagggcaaatacttggggtgcagcgctttcatttatttgattttactttgcagggaaatctaacacagaggttaccctgaactctaaaagctagggcctagcgcgcatccgcgttctgactcgccggccccggggccctcctgagattaatctgcgttgcccggactcccactgccagggaaggtccaggcaactggctctggggctattcctagccctctgggcttggctctatggcgccagggcagctccagggtgttgtcgaaagtctggaccgggaagggcatgggtgcggattccccacaaagggaaagcaatgcagcgggccggcaggagacgtacaaacgtaaacgtgcgacgctagctaggcgcagcgggcctttcagattttgctatttgtgaaaaacaaattgcgcctctgaaagtaaccaactctaggtctatttcacatcaccgacctccctgtctcactccccctccctccactacacacacccaaacccacacccacccacaaacacacaaaccggcagtgacaacaaccacccatccttcaataacagcaaccagagacagaggagaaaataaaaagctgagtttcttaggcgtgggggtgcaaaacagccaggctcctgcctactgcccctgctcccgtagctcacagacccataatcctgcatttctctaacaagttgtttatggagttgcttctccatttgcctacatcccaaaattcacccctcccgggtttcttctgccccctcctgagtcccggcctgaaggagggggagggacgcgggtgcgggcgcgggtgggggagggcggacccgacgcacagggccagcgccgaggcgc

SEQ ID NO: 24400 - DNA, 2300 bp, Homo sapien
ggattcaaattctggtgtagctctttataaccacacaatttaaggcaagttgcaagttatgagtgttgagcaatgtatgcaaatgtttagcacagtgtctggcattaacagtaaatcctggataggaattaatgcttgcacaagccattactctgtgtggaagttcagagaagtaagtcaaccaaggtcacacagaaagttaatgaaagagttgaatttgggacccaagtctctctggtctctagccagaggtgaagtgactacacttgacatccactaagtgcttcctttaagaacagggatcctcaataattagcccatgacattttctaataagtcccctccccacacccatgagaatcaaagatgagctgaccaggcagaggcagagggagagcagggagctctgccaggctaagtgagcgggttcctttgcctaggggactgccctccagtgggcaaatcccctgtgtcctcaattatctggtcctgtctaccccccagactctagctggagccatcacttcctcatttccaattttcctctttaaatttttctgtcctggcttctgctgcttgtcctctggcggaaccagtgacttcctgaatgttgaaattgtgggcgccacgggggacctctgcttttcagggcactgctaggagctcactttcctgagtttcatcccctttcactttctgacataccacgggccaaagaaagtgacttcgcctggcacagcttcacttcctgccacctgtcttcctcacctcttacatttcaaataggccaaaagtctacggctcccctgctccaggctgtcccacctctgagaggctgcacctgccctccttcctccctggagggcctttgcctcatcttgatctggatcaatcccccattatccttttaagcccagctctggtatctgatatctcttgattcagatgataaagctatttgtcatatttctgccctgtctcccctgcctcccggcacttctgtcttttcagggacatcaacctttgccgcacttcacagcaattttctggaatgtagttgtagccgcaaccatcttgcatggtagactgtgaatatctttcatgaaaaaaggccatttcttcatctcctcggtgcccagcaggctcacaatgtctctaatgataataacaacaacatgaccatagtgtttattacctaatacttccatcctagccaccttatatgatttaattcatttaaggctcacgaaattcatatcttccttatttatacaaacagaagagtgagatgctcaaagctcaagtgatttgcctactgccagacagcccctatgtggaagaggtggaatttgaagccaggcattctagctcttagtgtctgtgtcttaaccaccatgctatacagcatccctggtagagatgcctgacgggagggagagaggggagaagctactttccttaaggagctcagatctcactggggcctggacaaggacacctgtaacacatgtacacatgtgcacacatgtgtacacacacagagagagaacatgggaaaactacaagaagaaatactaagtgctaaaatgtgtggttcagagcaaggcttctcaaactgtaatgtgtatataaatcacctggggatctagttaaactgtagatttggatttgatctgatggggtgggaccagagactcattgttagaacaagtgaacttgcatttctaacaagttctcaggtgatactaatactgctggtccatggaccacactttgagcagcaaggatgaactctaaaggttgaggcaggtcagagaagggagatttcactgtgggctggagaggtcctgggacagagagctgagtctgggcccatggcagggcttggttggccctctctggagccatccagcttttgggtctcagggacctgggagtgacgggtgcattcagaggcccgtaacttgtgtcccaaagcctcctcgatcccccttaacaagcagcagcactgtgtgggagatccacatgtgaatagcccgtgtttgagaaatgtccaatcctgatcatgtcaggaaacatcctgcaaattctgaaatcagagccaaagggaagtgctgcgaggtttacaaccagctgcagtggttcgatgggaaggatctttctccaagtggttcctcttgaggggagcatttctgctggctccaggactttggccatctataaagcttggcaatgagaaataagaaaattctcaaggaggacgagctcttgagtgagacccaacaagctgcttttcacca

SEQ ID NO: 24401 - DNA, 2300 bp, Homo sapien
ggctcgttcagtcttctcaataacttagaggtaggttctttttccattcccattctacacatggagatccgagctcagagagatgaagcaacttgctcaaggtcacacagacaggaagtctcagacccaggattggaagtaggccatgtggctcctgaaatcacgtgctcttgggatgactctgaggcagagagtggagaaagactcccaagtctgaggaaaccagtgaagactgtggccaagaagtagctgttgaagctgtgttcactgacaggttcagatagcccctgatctgggtgccgggaggatcctggctctgtcatgtgggtaaaatgcacttggcaaacaccctacacttgcaaaaccttttttttttcctcattggtgcggtgggaaaatgatcactaatccacagtaacatgaggaatgaatgaaggagcacgtgcaaagtgcctgatgcatacgtagtaggtgccaataaatgtgctccttctctccttggtaaagttggcttccggctaggctcagtcatcctttccacaaatatatgtggagagaacaggctagagcaacgaggttgggagtggggaaatgacccagggtgatcagaggacaaaaatagattttaattaacccgtaagaacctagtgcaggacaaatgagagttagcttcaaagcaatagccttaggtgggtgcactgttgttccagagatgctgatgctacaccaaacactgacaccagcccttagattctccccccaggacaggcctggtgtgattcccatgttgggggtgctagggcaggaggcggccttttaaggaaactgagtctcagggacaggaaccacctggcaaaatcacacagctactcagggcaagagcagaagctggggctttgatttctccgctggaagtctctcccacaccggcgggcctctcatccttccttagcctcacatgctacattggagatagactattctgctctcatctgaggccatggtttattcaagactggctcagaatggctttggactatttggactattttctaaaataactaaacccatctcaggaggaggaagctggggatgtccaagggaatgtgcccatgcatctgcctggcagtggccgggcttggagtagaagctgagtgcaccatgatcactgccaagtgccggcatcaagcatttggtttctacaccagcttcacgcagaggacaagggccagccattttctggtggaagaaaaggtctgaggcgaatattccttttttttttttttttttttgagatggacttttgcttttgttgcccaggctggagtgcaatggcacgatcccgcctcaccgcaacctctgcctctctggttcaagcgactctcctgcctcagccttccgcgtagctgggattacgggcatgcaccaccatgcccagttaattttgtgtttttagtacagacggggtttcatcatgttggtcaggctggtctcaaactcccaacctcaggtgatctgcccgcttcggcctcccaaagtgttgggatcacaggcgtgagccactgcgcccggccgcaaatattcttgtattgggagccttgggctttttagagtcacctcagaggttagtggggtgctctacgggagcctgtttaagagtctggagtccttagtctaggtttgcgaaagatcttccagaagcgagatctattcaattctgaagaaataactcaggaggtctttcagaaactccttcccgctggacctcacgggactctcctggactcggtgggttgaggtttgatcctctttgcaggccaggggatggattaggtgaccccagaggagccctgctgacacctggattccagctgctttcgtggccatgtgggggtggctgtgcgtgccccgccactgcgtgcgtgggtgtctgtgtgtgttatcggtggggggcgcgtgagtgtggccgcgggtgggtgtgtccgatgtgccccggcttgggaccgcgcccgctgcgcccacttgtggctcctgggagccgccagggggaaccgcgccttcaccgcctctgccgaggacgccgccagataggaggctgatgacatgagggctccgtctcccgagtgatggcagcgcgcgctgcttcgccgcctccgccgctcagccccggactccttacgtcagggtagcggggtcccccctccgcgcgggagccagcgaacagcgagagagcacagcagagcgcgccgcggagccggggcgccctcactgcgctaggagccccactaaacccagcggag

SEQ ID NO: 24402 - DNA, 2300 bp, Homo sapien
ggagtaggaaagggctcgtctgctttgggaaatttggctctcaagcttctggaaacacctgaccccatgccaggtgagacaagctcacactcaaggcccccttagtccaacggtcagtggacagaacaagcaccaaaggtcaacggcgtgggcggtggcctctctgccaaagtgtgtgggcccaagtagggtattcacctccctccctgtctgtgagaaatttcagacccctctactttttccagcaggagttcatgttccttttaagataatcctctatagacctctggcagcccagccttcaaaatgtctccccctgtctctcttactcatggagagccccgcttccccgcctcaaaaaaaagtcttcctctctcttactcatgcatggagagccccacaaaaagacactggttcccagggattcttccaaagatgctggaagacctctcagtgtttgcatttcccaagctcggtttccttgtgctgtccttgggcattaaaggaaggctattcagccatccccatcagcaggagcaggcatcaaaagaacagctactgcagggggagcatattaggggcaccagagggggctaggaactgggtcttgtcttctcaaagtttacaacccactgcaggggccactcaccagccctggcaccctaagggcaggaacctccattgggcacgtgtgtctccagcactgggagcactgtctggcacctggggcactgtgagtgttgaatggataaaggacctgtaagaattgccataagaggtgttgccctggggcaaggtgggacaggaaagttcttgcaagagaagagaggctctggccttgggccctggctgagcagagagctgggaggtgggtattcgggtaggaggaaagctgtggagggggaaagcaaactgcctgcgggggtgggggggttctcggcgggagttgggggtggagggaaaggcgctttacagcagcactccctccacagggagaccagagctctgcctcttcctccccaccgtgccctttggggtccagttgtggggccttccttgaggcccagctcctgcctctggcctccggaggcttatctccccaacagaggctggctccccagaaaacaggattcttagacttcctaaaaataacctgaagctccttatcagaggctaatagtgtatgtctcccaggaatactctagaaagagtaccaggggtcaggaacccccactcagcctccacgaatctgagcggaaaagcccgggtctcctcacctgtaaagaaaataactgcagccggcaaatgtgaccacaggtgagaaggggcttcggaccagggcgcacacctctagagaggtgcccacagacagcctccccttacttacgccctgcttcgctgcagtgctgtgaagccatcggcattggaagtgcggagggcagcgggcagtgccccagggggaaggggggacgggtagggtttcagagcccagaaggcctagacagggaggcagctccgggagaaaggtacccgccatcccaccggtcttggaacctgaggactgctgggaagggtcaaaagtctgccctaagggtggacaagggacagagattggggggggaccacaaaggcctgggcgcaaccttgttgagagggaagggatccggacccaatctggagccctggtctcttcccacctgcaaccgtggctgccacttggcctcggttataaaatggacaaggattcgaggtgctcctcaggttaagagaggggggcctagaggtcaccctggcctcggtgccctccgtggccgggttaagaggaggtcccggagttctgctcacttcagccgtgtgccgggcactgcaaatcaggaagtgttggcgccggctggcgacctcccgcctggggccaggggaggagggtggttggacgctgccaccgctgccggggctgtgcagggctgggcggggagcgaggacccggcggctcctgattgcggccccgggggaggtggccgagccggataagctgcggcgggctggagggcggccacctcccctgcaggtccggccctcccgggcgggtggggcgcgggggaggaggagcctcgggccgagccaccgccttcgccgcggaccttcagctgccgcggtcgctccgagcggcgggccgcagaggtgagtgtaccctcccccggtctccgcggggctgcgtgctgcgcccggtccccgagacgcccgcccggttgcaccctgcgccgtcgctgcgcggacctcgggtgccgccacacgtctgg

SEQ ID NO: 24403 - DNA, 2300 bp, Homo sapien
ggcccaagggatggtaacaggcaggtaggttctgggggaataatacccatcgtaacaataaatataaatggctaattttcatcgagtgctgccagcatgctctttttgatatgttatcataactaatcctgcatcactgcaaaattccattttacagaacaggaaattgtggctcaaagacattaatgatcttactgaaaattccatagctggtaagttgggatttgaacccagttcctatggatctgaaacccatgttctttctgctatggtaacagggtttcctagagggcaaggaggaaaaggttgatggctttttgctatttggagccaagaaggagagagacttggcttttagaattggactcagaaggaggaaagtaacacacttatgtacccggccctgaggaaggcaggcatgtctcaaattttatcgtatttattctaagggcttccaagaactgatttctcagaaaagtcaacagcaggtttttctggggctagataatggctccacggaacagctagagctgcatacgtttcttgccacgaggagctcttaccaagacaaggtggtttttaatgccaccttggtttttaatgcattttcttggcgaaagaatgccagactccatgtgtgagaacttccaccagtgagtcgagcccaggtgccaggctctgtaggacagtttaaaggtgcccagccatacctgactacagcaccttaaatgcaggctgcatcatgggactcccaggtatggaccaggaggaacagtggagagtgttggatgcagggcctggagggaacggagcaagcaagctggctggaaaagacttggaggagggctttgacctgggcccacctcatgctgtcaggctcagggagcagggagtgcattccagtctgagggaacaatctgaaaaggcacagagataagaaacaatgctcctagacctcagttttctcacctgaaaaatgaagactatagtacctacctgcgggctcatggcaaggctgagagatcatatatgtaaagctcagcatagagtaggtgttcagtctgtgtttggagactaaactgaccaatgcagtgtcaacaaggcccacggggtgcttggggatctgaggactgcaatgtgcctgcagggggacctcgtgggtcagagcagcgggcttcaaggcggagagggcaggctggagctggcttgtagaaggccttatgtgctggctgagggctctactgagccgagggacatcatcaaggggggtgattctgaactgagggatggagctgcagccacagctgcccattctgcaccatacgcaaaactcttttgctgagcggctcccagggcaggccacggccttggagacagccatgtcgggggcccatggggactacctggatgagcattttgcttgtggttgctgatgtccacgagctgggcaagatgcttactgtttgcagcttccctccttgagtagttggcctggcttggcaggtgggccagaggctgggaggcctgggcagcagagaaaagacccctagcctgggagctagaaccccattggctcccacctgtaccattgactggcagctcacttgaacaagtccctgcccctctggccctcggtttcctcagctgctcagtgaggccctgcccactcctgtggcctgtgacgccgtctgactgccccacttttctcccgcaggtgcccatctgcggtgaccagccagaagccaagcgtgctgtctcggagatggcgctcgccatgggcttcatgcccgtggacatgggatccctggcgtcagcctgggaggtggaggccatgcccctgcgcctcctcccggcctggaaggtgcccaccctgctggccctggggctcttcgtctgcttctatgcctacaacttcgtccgggacgttctgcagccctatgtgcaggaaagccagaacaagttcttcaagctgcccgtgtccgtggtcaacaccacactgccgtgcgtggcctacgtgctgctgtcactcgtgtacttgcccggcgtgctggcggctgccctgcagctgcggcgcggcaccaagtaccagcgcttccccgactggctggaccactggctacagcaccgcaagcagatcgggctgctcagcttcttctgcgccgccctgcacgccctctacagcttctgcttgccgctgcgccgcgcccaccgctacgacctggtcaacctggcagtcaagcaggtacccaccccatgcccttcctccctctggcaactcagcacatgcttgtccagcacct

SEQ ID NO: 24404 - DNA, 2300 bp, Homo sapien
gccacccaggagtccctgctgtttggggctgaaggcagaacagcctcaggtgcccaggcccagaaccgcgggcatggcttaccatggaccatccagaatctgcttggatgtgcccaggcttgggcacctccccgtatctgggctgctgtgtgtcaagcccctgcctccctccgaccacccaccccgacataaccacatcagccctggttttgcccttaagaactctgcagaacaagtttaagcccctttgcatgagaggccttcggtgtctctgactgatctcgtcctgcgggagggatggttgcctggcaacctcaccagggcctgcagccctaaagatttttgggacacggggaaaattaccttgcatgcgcccctctgtgccctggtatttgcatcagggcagaattgggttaacagaatatcagggagagccttggcagggcagagaatttagacaaaggcagttgaagggtggcaggggagggagggagcagtggtgtgtcttttaccctggggggtagtgggcaccgtccccgtctttcccactgctgctggaaatacctgccagctcaggggagagggagtgggctcctccatgcagatctgccccgtcctgggcagcaacattgtactagtccccagggagccccgcagagcctcctgccaaggggctggtgctttgtagaagtcagtaagaaaatatcgtcaaagagcattgaaaacattagcactaggagagagcttgatctacacatcagggcctcgaggacaaaagaggggctgtgacttgctcaaggtcaagatctttgttccagtcagcgatgctggagagcaggagtccagcctctagccttcaggcctccacaccgccccacaccagctgaggcgaggagccagatggtctgtgtctttcttactcctttctgtggccccagggcctggcagagtaggtgctcagtgaatgagtgaatgaatgacctagttctgaaatcatttactcaattgtgaatttggtttgcctgtagaaagcagcgtgggtataagcatggatctggaaaatagctggatctgaatcccagctgtgctacttactgactgtgtgactttggccaagttacttgacccctctgtgcctcagatttctcatctatgaaataaggatataatagcacctggcctacagggatgagatggggttaaatgaattcacagtggtgtacgaagctcttagaatggttcctggaacacagcgagctcttgttaagggttcatgactgatttcttcccttcctctcatttccatcaagcatcttgcttttctgcctgaagtctggggttcttcctttgtcttaggaaattctgagcccacagatgcaatgatgccggtatctgtgggtggcaaaggacgagggcagtcgagtagctgctggcagagaagcagcaaccctgacagtgagtaggggctgaggtctgtggttctcaggaggtgcccagccctgcttcccagtcctgccaatcccccatgctcggaggggatggccctgtgctaggtgtttaggggagggcccagcctcaccaaggtccctgcattctgagcaggagcaggagctgcaggggctgccaggctggaatgaggggtggatgagaagtgtctcaccagcacctgggctgaaccctgttgggtgactagcgtcctggagtgggcaggacctatgcatcaaccagccccggggctgggcactggaggtggaattaatttggagaaaataaagacagtgttgctgaagatgtgagcttgggactaagaatcaagccccatgagcttgtggaccaggagggagcatcaggggcctgtttctgtgggcacaggtgccagctgatgcctgggtccccacctggtgtggcctgaaggtcctccacttcccaggaaccctgctggcaaccaagccccatatgaattttctaaatgaatgattagtgccacccccagtaaaacaaacaaagaacaacaacaacaacaacaaacctaaacctggaatgctcactcctgcagccttccccatctcagctgatggcaactctctctttcaggtgctcagacccaaaccccagagtcatccctgatcacccacaaaaccctggggccattccagcggcaattccatgcactccagcttcacatgtgccttcaggatctccttgctcctccactgctcccactgcctccagcctccactgcctcaaatctgggcatatgcacggcttcctcgctggccccagcagctagctgcctttga

SEQ ID NO: 24405 - DNA, 2300 bp, Homo sapien
aaattacactgctattaatgttattttatggttcctccttgtatatatatgtgagattccttagggtacctatgtatgaatgaaattgtaggatcaaaaggtatatgtatcttcagttttactaaagatcgccttattgtctccaaaagtactgctcctttaagtccctgccgtcactgatgaggttttcattgttctctacccttgccaatagtaggtattgttagactttgtaatttatcagttagatgagtgatatgtctcactgttattttgaatttccctgactactagtgatattgtatatctttccttacatttatcagtattacaggtattttttttctagtacttacttttattgtatattatggtttaaagttacatgcaaagttgtaagtagcacaaagtaggtgctactagatagaactatgccctgctcgtatctttaaaacaaatgcgtttttgatacttcagaaagtgaatgtgagagttagagttacatctttcaacatagataaatgaaaagcgatgctgaaaggcttgtggaagctacctataatacaccatgtatgtaaagttaaccatactgtgtatctgtgggcacagtacttcagcctatttgtgtttcactttttctgtatgagatgatcttaccaacctcacagggtgattggaggtgagtgggcagtcgatgatctaatgaatgctaagcacttagagtagtatctggcatgtaagcattgctgatatataacagaaagtgttgctgggcatggtggctcacacctataattctagcacttccggaggccaaggcaggaggatcacttgagcccaggagttggagaccagcctgggtgacagagtgagaccctgtctcaaacaaaacaaaacaagattaaaaaaaatatagaaagtgttgttactgctgtgcataatagtctattttctgtagattcaaatgatatgaattagagtgtaaaattatgtattggaatggtgtgtgcgagtcactgctctgtcgtcccagggcagaaaatgctgatggaattggggagggtacatggggcttctgatgtgttttcttcctaaaagactcagaatgcatcagaatgttaagatttgacagggtagtgtagcaagttctttttttttttttaactgtttgcttacaatatttcaaaacaaaaatattttttaagcatgaaaaaaacattggcaactgtgcagacattttttggaggaaataatttggggtggttttccaatttgtgtgtgtgtgtgtgtgtgtgtgtgtgtgtgtgtgtgtgtgtgtgtattagaaagcatgaactttgcaattaaattgatgcttgaatcctgactccatcatttaccagcttcatgattttgggcagtttatgcaatctctccaagtcagtcttctcatctttaaaatgttatctcatttaattctctcacgaaaccatgaggcaaaatgcttcatgttttgtttagagaattaaatgaattaaatgagataacattaagacctggtacatgtgcctagtacttagttttaggatgaactatacatactcagctttagtaatgtgaaagacggtaacaccatcgtatataattaaataagccctgaaatctggcagcatttatgaaattgaaatgctgtctgttgatagttgattctaatgtaaatgtgcttccatctcagggccagctgaggggcccacggacatagggcacccacaataggcgtgtgtctgctgtgtgtttgtgttcggccgtcctgcttctctgtttccacacgtacacatgcccctgtgttactttggttcatcttctgtactctgtcagttttctgctggtcagaacatctgtgactgtgacagagctgtccaggattgcagtggataggtgggtataatcactgggacccttctggggactctggaacctggcttctgtttgggaactctgtcagtgatcatgcagcatggaagagcggggctggtgccagagagctgatagagatgcaggctaggtgctggtagacaactgtgagctggcttcatttagatggttctcatgtctcttgccacaggaatttcttcacatggctcctggagaagtgaccatcacagttcgcctcatccgttcctttgaacatcgcaatttcaaacctgtagtgtatcacggagtgaatttggaccaaactgtaaaggaatttatcgtatttctaaagcaaggtatgagatgtgaaagccattttgttttactagtagtttttaaaaatagct

SEQ ID NO: 24406 - DNA, 2300 bp, Homo sapien
accccatctctacaaaaaataaaaataaaaataaaaaaattagccaggcatggtggttgtgcccacatttccagctactcgggaggctaaggtgggaggatcgcttgaggcctggagttcaaggctgcagagagctgagattgtgccactgaactacagcctaggtaaaagagtgagaccacatcacacgcgaaaataattaaaaaacaaaaactaaaaaactaaaagcaactgatctttgagaagtgataactgcattctcaaagtacctaatctcaacaataccctaacttaaaacctgctgactaggagatgtatttgactgcaaatctggcccacacaagcaataatctgagtttccatcaaggaagctgtaagcaccaagtagagcaaaaacaaatccaggcctcaaatggaaaaagcagctctgaattgtgattttcgaagaaacctgcatttcttacacttcagtgtactttccccatatttaactccaagatttttgttaatttgtttggttttcctttctcaaacaaaattatgctcagactgaaaaccctagatttgttccctattgcatcttcatttcttcccaaacattccataaaacgtgacctacattaagttagcaagttaagtctgaaagcgtctaccttccctggggagggggaaggtgtaggcagggcagagatttgtagtccagccctcttgccacaaattatgaattagagaggaatgactttgcttttttaatgatctccagagaattttccatcatttccctctcttcacccagctcctttgcaaccactgccagagaagtcttcctttagcttcttaaacatcgatcctaaaacacttccagacacctgtgctgctcctttcagttcccatggagattaggctgtgtaacaatctcgcaaagacgttcccctccgtctcctcatcctcttttcaaacccttttacgatttcccatctcactcagcatgacagtcaaagtccctgtgatggccaacttctgcatcacctagccagtctgccaccgccaaaactctccagcctcatctttctactcttcccctggttccttgcccacgcctttacacttgttctctgcttggaatcttccctcccctccttgaggaactttctcaaatgtcaccttccctcaatactccccctcctccatttaaaactataaacttccaactctctaagcccctaaagtactctatatttaacttattgtataaactactgtccctacttgtaagttccaagattgcagggattcacccgctttgttcactgctgtctgccaaggtctagaacagtgcaagttacccaacaggagttcaataaacagccattcatttaacaaatatttgctgagcacttcgtcccgtccaagtttgttaaatcaagacaaataagacaccgtccctgcctttaacgcaccagatggagaaatgcaccacagacataaatgtgcaatacaggcctgacactacggccacaagcaagtcaaagaacgtgccaaaagttcagaggaagaagcctcggcttcgcctttcgggagaccagtccagctttccaccatcacgctgctcatcagggaccatctccgggggtctcctctagaccccaagggaggagcgggtcccgcccgccattcccaggtctcagagtttacttgtccagagatgcaacttccggcctcttcaggccgggcaagatttaaggaaagaaaagaaacataaggacctccgttcttcggtctccgtcccctccccttcccccgcgtgccgtccccacaacgggccaggactgaacccaactctcgaccaactcccggcagcaaaactaagcaccctacttccgttgtccccacctgttcccggcgtccccttcggctactcccggcgtttgcgcaagcggtcccacgtgggctcgggcggggctagcgccgcggcgggggctgggcacgcccctagcgcatagctggcttctgattggctttccggtgctcgcccgagcagggttggggcgagtggaccgcgcctctaaaggcgcttgccagtgcaatctgggcgatcgcttcctggtcctcgcctcctccgctgtctccctggagttcttgcaagtcggccaggatgtctcaggtacagcgcgtgcacagccaggctgcgaaggtgcagcgggcgggaggcccgttgggggctcagccggctgccagaagctctcgggctctttccttccgtgcccctcacttgctcatgggcccatgcctagccctga

SEQ ID NO: 24407 - DNA, 2300 bp, Homo sapien
agggcagagatttgtagtccagccctcttgccacaaattatgaattagagaggaatgactttgcttttttaatgatctccagagaattttccatcatttccctctcttcacccagctcctttgcaaccactgccagagaagtcttcctttagcttcttaaacatcgatcctaaaacacttccagacacctgtgctgctcctttcagttcccatggagattaggctgtgtaacaatctcgcaaagacgttcccctccgtctcctcatcctcttttcaaacccttttacgatttcccatctcactcagcatgacagtcaaagtccctgtgatggccaacttctgcatcacctagccagtctgccaccgccaaaactctccagcctcatctttctactcttcccctggttccttgcccacgcctttacacttgttctctgcttggaatcttccctcccctccttgaggaactttctcaaatgtcaccttccctcaatactccccctcctccatttaaaactataaacttccaactctctaagcccctaaagtactctatatttaacttattgtataaactactgtccctacttgtaagttccaagattgcagggattcacccgctttgttcactgctgtctgccaaggtctagaacagtgcaagttacccaacaggagttcaataaacagccattcatttaacaaatatttgctgagcacttcgtcccgtccaagtttgttaaatcaagacaaataagacaccgtccctgcctttaacgcaccagatggagaaatgcaccacagacataaatgtgcaatacaggcctgacactacggccacaagcaagtcaaagaacgtgccaaaagttcagaggaagaagcctcggcttcgcctttcgggagaccagtccagctttccaccatcacgctgctcatcagggaccatctccgggggtctcctctagaccccaagggaggagcgggtcccgcccgccattcccaggtctcagagtttacttgtccagagatgcaacttccggcctcttcaggccgggcaagatttaaggaaagaaaagaaacataaggacctccgttcttcggtctccgtcccctccccttcccccgcgtgccgtccccacaacgggccaggactgaacccaactctcgaccaactcccggcagcaaaactaagcaccctacttccgttgtccccacctgttcccggcgtccccttcggctactcccggcgtttgcgcaagcggtcccacgtgggctcgggcggggctagcgccgcggcgggggctgggcacgcccctagcgcatagctggcttctgattggctttccggtgctcgcccgagcagggttggggcgagtggaccgcgcctctaaaggcgcttgccagtgcaatctgggcgatcgcttcctggtcctcgcctcctccgctgtctccctggagttcttgcaagtcggccaggatgtctcaggtacagcgcgtgcacagccaggctgcgaaggtgcagcgggcgggaggcccgttgggggctcagccggctgccagaagctctcgggctctttccttccgtgcccctcacttgctcatgggcccatgcctagccctgattcgttggacagagccttgtgagcgggattttccgtttggggatttctaaatctgctgcccaccccgcaactgccggaaagttgcccatggggtggacttcgctgtgtagcgggagaggggtgggagtcgagggtgcttgatggagagatgggggaaggggttgcacggattggaggagcgaggagactcagtccccatcccgaagcacagggcaggacgtcgcggcggagtggggaagcgaggagtccgtggccgagagcttggaggtcaggggaagtacggggccggctgctcagagtgcgggacgaggagaatcgcggcccggggagaggtgacccaggggcccctcccttctctccagtgtagacccttgtctgagaccgagctatgtggggcgacctctggctcctcccgcctgcctctgccaatccgggcactgggacagaggtcggtgttgaacgcgcgggccccagggggagggaggggaccaacgggctccggcgctgacaccgcggcactcatgccctgtcccctttcagctgtttccagcatactgtgccccgtctgtcctcaggccagggcttcgctgcagccccggccactccctagtgcctggcccggtggtggccaggcagttggccgcgctgcttctcccgcagaggggacccccactgggggcg

SEQ ID NO: 24408 - DNA, 2300 bp, Homo sapien
agaacatgacagtccaaagcacagcctcaaaatctgcaccaagatttctgggcagggaaaaagttatcatcaggaaggcacagacttgttagcgaaatgctctgacctagcccaagaaaccaggtgcttctctgctcctgacatcaggcttggccaggctgtcaagtgctccaaaaagtgctccaactttgatcctgcccatctagggcagaagctgaacggctcaacaatgatactactgagctgagagccttcagcaagtcttttccaagctgcagcctttgcttcttccctagtagagagtagctgctggtgataaccagtaaagaccttctaaaaccaggatttgaattctgttactactggagacactgagaatccggaacatggtcttttccacctcaggaaccatcaccataccccacctgaagagtagggcctcaggcagtttgagagtgaagttcccagggacttccagtctgagctgctgagcctgctttgatgagcagatgcccttccaacccccgctctgcatacctgtatttatgtcgcccacagttgcttgtttgtagtggccatagatgaacagcatctcctcatccgatggcttggtcttaaggtgcctaacctcctctgcagctttctcaaactcagcctaaatggaagggagaggagaggattgagggcctcctctgggtgggagagggtaagaatcctactgtggcctgatgacagcccagttacggggatggagaggtgggaaaggtggcacccttcgggcaatgcagcccctgaagtgtgtctgcccctccctgccccaacagggcagctagaaagattcagcaacacaagaaggggaagcccctccagttcactcattcaatcgaaaaccatatatccagagctctcacaaacgcaggcatcaggtctggaaatacagcagtgaagagggcaggccaagccttcgcccccagtgggggtcccctctgcgggagaagcagcgcggccaactgcctggccaccaccgggccaggcactagggagtggccggggctgcagcgaagccctggcctgaggacagacggggcacagtatgctggaaacagctgaaaggggacagggcatgagtgccgcggtgtcagcgccggagcccgttggtcccctccctccccctggggcccgcgcgttcaacaccgacctctgtcccagtgcccggattggcagaggcaggcgggaggagccagaggtcgccccacatagctcggtctcagacaagggtctacactggagagaagggaggggcccctgggtcacctctccccgggccgcgattctcctcgtcccgcactctgagcagccggccccgtacttcccctgacctccaagctctcggccacggactcctcgcttccccactccgccgcgacgtcctgccctgtgcttcgggatggggactgagtctcctcgctcctccaatccgtgcaaccccttcccccatctctccatcaagcaccctcgactcccacccctctcccgctacacagcgaagtccaccccatgggcaactttccggcagttgcggggtgggcagcagatttagaaatccccaaacggaaaatcccgctcacaaggctctgtccaacgaatcagggctaggcatgggcccatgagcaagtgaggggcacggaaggaaagagcccgagagcttctggcagccggctgagcccccaacgggcctcccgcccgctgcaccttcgcagcctggctgtgcacgcgctgtacctgagacatcctggccgacttgcaagaactccagggagacagcggaggaggcgaggaccaggaagcgatcgcccagattgcactggcaagcgcctttagaggcgcggtccactcgccccaaccctgctcgggcgagcaccggaaagccaatcagaagccagctatgcgctaggggcgtgcccagcccccgccgcggcgctagccccgcccgagcccacgtgggaccgcttgcgcaaacgccgggagtagccgaaggggacgccgggaacaggtggggacaacggaagtagggtgcttagttttgctgccgggagttggtcgagagttgggttcagtcctggcccgttgtggggacggcacgcgggggaaggggaggggacggagaccgaagaacggaggtccttatgtttcttttctttccttaaatcttgcccggcctgaagaggccggaagttgcatctctggacaagtaaactctgagacctgggaatggcgggcgggacccgctcctcccttgg

SEQ ID NO: 24409 - DNA, 2300 bp, Homo sapien
aggagcatggggacacagtttgagaaccacagcccatactcttagctccatgtttttgaccgcacccaggctgccttcatctcagctaggacccaggctggtcctagctctggcatggcccttgaggcatccctctgcacgcaccttttcctcaccaagagggcatggggcacagggaattcctcccctttgttctgggacatgtctggaatcctggccaggcagcgtgctgggacagaccaagtgcggtccctcccatccaggagcttacagcccatgtagggagggctgtaagggctcagtactgagcccctagcacaaaggccctgtccttagaaggccctagtcagtatttattcgctgaacggattccacctcctgcatatcatacaattgtctgggcagccataaagagcttcattgtgctttaggtgagtgatctcaggcaagtcacctgccctctgcatagtttccttctctgtacacccaccatggagcttcctactttatcaacctcataggtttaagaataaaataggatcctacttaaggcagaggtgctgaaagcaaactgcatccttattcctgtatccctggggttgaaattagcggtagctcctgtgtctggggcatgtgagcagatactcttgctgggctctttgaccacaggagtctcccagaagcagggctttattttatgtctcacacagagaggagtggcccagacctgcctcaggaagcctccatttgcccatggcataggacacaccccatgttcctcactgctccattctcctgggtcctagcagtgaccgtcatgcgtgcctgttttgcatacctcccaaaccgaggtgtaacctgggcagcttctagacacactgcaaagcaggtcatttaatgtatgactgtgcaggagactcagtttaaaggagcttcagacggaagtgacagtggttgccaatgacctttgacttatctcacagctctcccttgagcacccactgaatgcccaggtattggggacacagcagtgcctaaacacagaatgtggtggtgtgggggtagggggcggccttcccagagcacacagtgttggaatgagacagaaataatatgtaactacaaactgtcctcagaatggtgaagaatttgaacaggtgcctgacacagaataccaggaggggcctgactctgggttgagtgggcaggaaagcactctctgtggaggagactttaagctgagacatgaagaatggagaagaggtgttgtcctggaggggtggcaggagctgcagaagagccactacaggcttaagggccagtcatctgaggaaagaaagttctagacatggggagaggggagtgtgctgggagctgaggttgggtggggaggcggagcggattgtgagaggcttgtgggctgtgtaaagagttcctgaagtctttcttttgctttctgggtcagggcttgggtgcagtgcccgggtggtgtccttgaactgtgagatgagacacctcactggacacctagcctggcttgccaggagaccggggtgggggcgcctccttccagggctgaaccggaagtggaggagagctgcaatggccttcccatgcccagaagctgcaggagcagacaatggggttggcaagctctgggtagggtacaggccgcacaggtctgagggcaagatgcaaatgtcactttcagtaccaagaaaaacgaggcaataatctagagtcctgggctgaacgtggacagctcccgaatcatcaggtgggtggggattaggacaaaatcgtgtatcctggggagatggagggaaacagaactgtgtattggtgtgctaatgtctcagtgcttggtacaaccctggcaactctgccaggccgtattcttgttttatgtacaaagaaaccgaggcaggctgcatgctcaaggtcatgggatgcaggcacgacaggttttctgaactcagaactgactcagatttgccagtcggtttggacttctcacccactctgaagatcacaaaagaaagaaaggtcaggaagctcttagtgcctggtgaatactggatggtaaatgctcacaggtctggaagggaggaagggttccccccaaacggtgggtctggtctgttccgggcttcacaggagaccaagcagagaataagacagtgcggagcaggatggagggctcaggggtcttccctgcagaggttcctgggggcgtggcagggctgtggctgacagggtgcttcctacggttttttccaggcccagaggcctttgggcca

SEQ ID NO: 24410 - DNA, 2300 bp, Homo sapien
gcttttacagcaggagcccagcctgcggaagggagccactagccaggagggaagtcttggaaggccaccgtgaggagtttccctcctcgggctgaatggcctcgctgaattctgtactctgagctgccaaggagggctgggatctggctccccagctcaggccggtgtaagtgttgcagggggcaggatgctgatggccgagtcctgtgggtaggagccctgccacccctttgctctcactggagccttaacagccccagctgagcgtggcatgcttctttacacagtctccaggggctgggcccctggctaacagggtttagggtctaatcctcacagtgccccactgaaggaggtgctgctgcccattttacaggacagaacaccaaggcccagaattgagctatcatgcccagccacagcgtatgctatcactgttctacccacccaccgggccctcttcctgaagtctcaggggcagcgtctaggaccaggagaccgtgtcctctgagatctgggcatgcctgccctgtggaggctcaggaggcctggagcgcaggtttagaagcagccagatctgagtctgaaacccagtgcagcctcttggtcactgtgtgaccttcggtgcatcatttctctgtgccacaaaataatcacccacactgcaagagtgagcagggaacatgagagcacacggaaaatgcctaggctggtgccaggcacagagcgggcaccgaggcatcactcccctctctttttggcctttctaaaataggcagaagtgggaggggcttggaatcttggaatttaggcgaggggtggggaggtttctggaactgaatcaagagagttaggttgtcagatgggaaacaacggtggtcaaatttaggctgggtggatgggaaagcaagttaagggaacacaaattcccccaaggccagaatcgaaggttataagacagcgcgtgcctagaggctgggctccctgtgggctcgcccagggcagcaggcctgcccgtttggggccctctcctcactgacacagcaggactcccaagacagatgctgcatgtgacccaggccaggtgcccagagctgctaacaaggcagggccccctgccttccactctgtagagctgcaaagcagctgcctccccacttccccagggctgaattcctaataggtaagggaaacttaaccaggcacaggccagtgtgcacctcaggggacccctgaaaggatgtttgtgcatatatatatatatatagatgtagatatttatattatatatataatataaatagatatttatatttatatttgtattatattataaatataaaataaatatatatattatgtgcatatatataaatatatagatatatagatatatatttatgcagttcggggaaagactagtccaaagctttcatctgattttcagaaggctccgggaccctaatcaggttgggaagcatgaccgctttaaggccagatcctcactaagtaggaagagaaagagggccaaggggatgccgctggggaattgtgttttttaataaggaactctggaagaccagcgtccttttcagaatcaaaggaatacaccctagagggagcattctaggcctggcatgaacagaaacatctgggggcagaatcggcctgcggtttctccagtcacatggaccccacccctcctgtcaggacccatgtagtaggtgccctcaaggagaattaatttattttccagagcaccttgtcctcactgggcgctccccctggggttagggttgggggcaccacctagggaagcctgccttcctgccgggagatgaaggggcaggagtctaatcagacccagaagtagatctatggggatgaaggaggggtgggtgggagttcttgatgataaattgaggccagacagctgttgacctgtgctcttgggccacccacccccaggctgggtatgaacaacgtggcccccaccaccctggagggagcccagagcccaataggcaggcctttggtgtggccctgcaggcccacagcgacaccatgtggcggcgagaagaaactgcagcagagtcggcacaggaccccagcttccatcctcacgttgtgtggacatggtccagcttcctgccgcggaccatgagcaatccaagggtaggggagcctcaagagggagacactgagcctttacgtaatgaggcagggaggggttcaagcaattaattgagaaaggatgtgacaggactggcacctggtcactttgtggccgtgagcaccag

SEQ ID NO: 24411 - DNA, 2300 bp, Homo sapien
atcgggaactgggggcaccgccatgggattacaggagctcaagtgtgggacgcacagggctcctccccatcagcacagcaccagagctggcaggccctggatgcagaatgtagaagtcaactgggtgtcaaggtgaaagcccgtttatgagggatgcctggcgggactggtgtgggaggcagtggttccagctggcgtcccttcatttgttcatctgctgtgtttgctgagcacttgtgctatgcctggcccatcgtaggcacaggggcgtgctctcctgggctctctgcctggtggtgggggaggcatctgtacccaggtaccaaggtgaagacacagctggtagtgacccccactggtgggtctgtgactgcctgtctcactctctgtgaattgctcctgggagccaggggtagggctaagcctagaaatgaggaaccctcagctgtgaggagcagggagactcagagtggaaattctcaaagcaagccctggaaccacttcagcggcatttttggggaattcttaaaatgcagattcctgggtctggtctcacaaggaggatctggggcctagagatctgcatatctctgacaggcacccagctcattctgatgtaggctggagggtcacacttctgcaatgggacaggtcaccagggagatttcacttagaggggatgaaggggtcaaggacactatggatgctttgggtctggtcagattgatgcctaaaaacaggttcttgctccttaaaaaagctgagcatttgccatctgggtactcccgcaatgtctgcacaccgcatccatcgcccagtccccagagctaagaattgccattcaggggacccagcctagtccaacctcctgaatccagatgaaaaaggaacaggcctggggaggccagcgggaaaggggttgccagtcccagtgcctgctctgggcaggcttttcagttgggctttgagctcttcctctggatagcctcaggagggaggtgccggtcctcccacaagagataagcaagtgagcagggcagctggcaaggtgggggaggcctggaggccgggtcggccgacttgagtcctggctctttctttttgggctctgccctgcaccatgttccccaaacgggaggagcgctgactgcggctcgcctcatgggtgtccctcagctcatttctagccccttccaagcctgaccccagcgatgacctctcagagggcacgggttccagaagtctgttgcaggaagcagtttccctgtgtggctgcccttggatcaactttgggagaattggtgagttgttatgtgaaatgatgtcttaaaagacagtacagtcacagctcacacacaaatataaaatgaatacctgccgaacagcttgtttaatttgtgagggactcagtaagatcttatcactggttcatagcattcaaagtaactgatatggtttggctatgtccccactcaaatctcatcttgaattgtagctctcagaattcccatgtgtcatgggagggacctggtggaaggtaatagaattgtgggggcaggtttctcccatgctgttctcgtgatagtgaataagtctcatgagatctggtggtttcataaacgggagtttccctgcatgtgtcctcctgcccaccgccatgtaagaagtccctttgctctttcttcgtcttccaccatgattgtgagacctctcagctatgtgaaactgtgagtccgttaaacctctttccttcataattacccagtctcaggtatgtctttatcagcagcatgaaaacagactaatacagtaccatacctataaggcagaatgataacatgaatttacaaatagatgcaaagctgactgaatacacagggagggaagtgaaattaattgtatttcaactggacaataattattgtgcctatggacgagaatcatttgcattgctaccaatcatctagaacttacagagttgcagtgtagctcgaagacaataaaagacctgacaccccattgaatcagataatccagaaggctgtgcttagacaatgcctagttttgcattgaaaacacctagtaattttttttattcatcttaaaatctttcagttttcagaagtgggccacgcatctggctctgagcttcctagcagccaaatcaaagaggaaaccagcttcaaatgtagtgtctatgtatactagtcgttcacaataagttcagcttctcactgcattgagacctggttctccttccagaggggcctcatcaagggaactcaagtgatgtagaaagc

SEQ ID NO: 24412 - DNA, 2300 bp, Homo sapien
actaatgttgttttgttttttcatcagatatcacgaagctctggtataaagcacggattgcatttttgtgttgttttctttttatttatttcaacgccaaacagccatacgcagcgttgttacagaaaacattcaaacaacacagaaatctgtatagtaaaaattgcaagtccttacctcaggcactttgcgatggatatttagggtgctgcggttcaagcagcctaggaaataacatttttctttctagcctgaaacttgaaccaattgagaaataagatcaagacagatgcggccaaatatcactttataaagtcagtattgcagaatgtggtttatacttgtaggcaagtgggtttcctaactaaaccccagaattagagagacaacagttcatactggaccagttccagtagagcctcgaccactaatcacagcctggcccagggaaatccagttacaggctctctgtaggggggcacactgtcaaaggaaggagagaggaggggaccgaactcatgccagttccttattccaaatgcatcaatcatgtaagctggcctcacctgtgtatacgtgcctgcatgcatgcttgcgtgtgggtgcacatgagagagaggtgggggatagacagacagagagagggaaggggtagaaacaagtcaggagcattatagtaatgactgctgcccatgagaaagaaagaaataagggtgattccctttccccatatatcatctcgtttcctgccactgtcatagtgcttccgcaaacatccttgcacatttcattaggcccttgggtgagtatttatgtagaaagagtttctagcagggggttggtgattatgtatactttaggtttgatgtgtactgagcattggttttggacctaggagctgaatggattttcctcccttttatttctgctgggatttaccagcctcaatttactaatagtctcttccggtagggaaggctgctaaggacaacacattgttaccttaacagctgcatggccttctgcgtaagggccagttacagagagtcgggtcagccatgtaagggtagattcaggctttcctgtctgagcctctgagttgcagtacccagacatgtaatgaatcctcctccacctccaatgccctcctctgtcaaatggacatcgtatcacctaggggtgtgagggagaattaaatgagctgatgtacttaaagtgcctgggagaaagatcaagaaaggaggagagagaagaaggaagggagtgggcaccagtgcagactaaggaaaattgagtttgcaagacccatctagtgctgggcccagtggctcatgcctgtaatcccagcactttgggaggccgaggtgagaggatctcttgagcccaagagttcaagaccagcctgggcaacatggtgagactctcttttttatgtaacagtaaaaaagggccatcgccctgtactaagaggccaaaagagacgccttgtactaagaggacgtcttgtactaagagacgccttgtactaagaggccaaaagcaaacctccaggatacacagcaccgatggagagggctactgggactacctgcctgaggcttaaatagcctcccagggggttcatcctcaggacggtccccagatgcctgagtgtaccacagatcctccttggtcatcatcaaaggaggagttcatgggagtgaaacttcatggaattagcgctaatgacttcaataatgaaaaaatcggaaataaagtgcaaggtagctatcggggggaatagatgcaatgggcctcgactgtgtgacaactttcagtccgagagtgggtattatcagacgtgttgttagggatgagaaagccgaggcttacaaaggtgacctaagttgcccaccggcccccagcgagcttgcgctttctgtccgtggactccagagacagtgctctttccggacccggggttgggcgggattgccgcgtagaaggctaagccagcgtgccctctcctggcctcctccagcttgggcccagcctgcgggagccgactccgggtccccgcgccctccctctgcctcctcccctgccagcctccgcgccgaccccgcgccagtccctgccgggtggaggaggcgcgccggcaaagccgcgtcctgatcaatggggcgggcggcttagcgcgcgcggccacctggtccgaggaggagcagtcccggggcccgccgcaggtcgggtggctcagccatggctcctcggggcgcagcggccggccggagcccgggaccctgcgcggggcgctgagc

SEQ ID NO: 24413 - DNA, 2300 bp, Homo sapien
agagacctatgggttatccatatatataataggaactttggtgatttttcttaaaaaagttaaataccaattaaaaagtgttacccaatatccattaaaaagcatatggagtctaaggcagaaaaattgcttgaggccaggatttcaaaccaagccttggtaacacagcaagacccccacccctacaaaaaattaaaaataaaaaagtatatgaaaacaaatatctcatgatttgtgctggatggagaggtctgggactgtgggaagcatagtacctgttctgaaatctacagctttgtaccaacaaaacagaaggaactaaagcaacctactctataaacaaatgaattgtttcacccccttggccaacagttactgagtaatcaatatggacaaagaactgtgtcaaggtggccgagcgccgtggctcatgcctgtaatcccagcactttgggagccgaggccggtggatcatctgaggtcaggagtttgagaccagcctggccaacaaggcgaaaccctgtctctactaaaaatgcaaacaattagctggtcgtggtggcgggcgcctataatcccagctactcgggaggctgaggcaagagagtctcttgaacccgggaggcagaggttgcagtgagccaagattgggccattgcattccagcctgggcaacaaggcaaaactctgtctcaagaaaaaaaaaaaaaactgtgtcaagggctctgggagatcctaagacaaggtacagttccctcccccaagaattctgcagtttaagtcacagacatgaatcatgttgggtgcaatataaagatagtggaacagagggttatggaagcccagaggagggaaagagtctttccggactggtgggttagaaggagggtggggaggagaggagaccttatctacagctagccttgaaagatggggagatttttagtaagtaataatggtaggggacagagaggaattggagaatgggaagatggaaaaaatgaacatttcccattgggaaagagcagggagggaatatacgcatccagcacaagtggcaatgtaggcaagacaggtaccctcactggactcttactatagcctctcgtcaacatgaagccataagtaacatcaagcaagtatcaaagccacacaaggagggagtgagacaaggacagttcctgggaaaagagaagcttaagctgtctttgaaaaaaaataatattcatggatgagcagggtggaatggaccagggcaggaggtcagaggagcgggcacggtttcatgtttacaacccctaaatatcagtatcaaggacataaacagtttcttcaatgaataaattgcaacaactaacaaagaaatgaaagaggaatctgttgatgaaaagagacctaaaagacacatcaatctattccaatttgcaaattgtatttgaattctgattcaaactctaaaaataaatatgagataatttgaagatgttaataaattataatttttaaggtattgtggtttttttaagaatccttatcttttggaggtatattttgaaatatttatggatgaaatatctgggattttcttcaaaataatacaaggagtcagggaaagatacggatgaaacaggattggctaggatttgatcatcgttgcagctgggtgttgaagatctattttacccttcggtctgcctttgtgtacgtttgaaatttaccgtaacagaaaatgtaaaacaaactacaagaaagtgggcgtcgtgagtgatgcctgtcaggtgaagccccgcccactggctcgggcggctccgccccgtccgtcttctctcccgcgctccgctcttgaagggttccagtgtgtggtgtttccaactttctcatgtcccctcgggaatccattcgtatcccatgccataagtcgcgctgtctattcttgaccaggcccggcaaactgctccgagctcccaggaatcacccgccgcctccggtcgtggcccgcagcagcccggctcccccgccctggggcgtttggtcgcgcccggccgccggccctgggagcgcgtccgcgtcgtcatggcgacgctccgagcgggcgccggcgctggcgccggccgaatccggcccgggaaccacctccagggtgagcggccagggacctggggcccgggtggcccagggtcggccgctggggcgccgcagcctagctgctgaggcgaccgagccccgggtggtgtccagccgcaagtcggccgcggcttgggtccgaggagagtcgggcccagagggtgacctgaggatgg

SEQ ID NO: 24414 - DNA, 2300 bp, Homo sapien
ccatgtggaagctgccaaggtttggggctttcaccctctgcagccatggcctgagctgtaccttggccccttttagttatggctgggacacagggcactgaatcccaagactgcataaagcagcaaggccctgggcccagcccacaaaaccatttttccctcctaggtctccagacctgtgatgggaggggctgccatgaagacctctgacatgtcctggagacattttccccattgtcttagtgattaacatttggcacctcattacttatgtaaatttctgcagctggcttgaatttcttctcagaaaatggatttttcttttctattacatcatcatgctgctaattttccaaacttttatgctctgcttcccttttcagcataagttcaattccaaaccatatcttcgtgaatacataaaactgaatgcttttgacagcacccaagtcacctcttgaacactctgctgtttagaaattacttctgccagatacctaaatcatctctctcaagttcaaagttccacagatctctagggcaggggcaaaatgcccccagtctctttgctaaaacaaagaaagagtcaccttcattccagttcccaacaagttcctcatctccacctgagaccacctcagcctggacttcattgtccatattacaatcagcattttgggcaaagccattcaacaagtctctaggaagctccaaactttcccacattttccttcttctgatccctgcaaactgttccaatctctgcttgttacccagttccaaagttgcttccacatttttgagtatttttatagtagcaccccactcctggtaccaatttagtgtattaattagttttcactctgctatgaagaaatacctgaggctgggtaatttataaaggaaagaggtttaattgactcacagttccacatggctggggaggcctcaggaaacttacagtcatagcagaaggagacacaaacacatccttcttctcatggctgcagaagcaagaagaatgagaaccaagtgaagggagaagccccttacaaaaaccatcagatctcttgagaactaactcactatcacgagaacaggatggggaaaactgccctcacgattcaattatctctatctggtccctcccacaacacctggggataatgagaactacaattcaagatgagatttgggtggggacacagccaaaccatatcactggttaaaagtccaacttttaatttcaacgatgataaaattctaatctcccacctccatcattctcacttttctttgctaggtttgccatatctgaattatttttaccacatttctccctgccctcctcctcactagatttattctggccacaaagtcttgccaatggcgcttccatgggccatatcagagtccaacctttgggtgtccccgatgactaatccaacaggtttttctgtctgtataactgatcttcttccctctcctctgcagctcatggcataagccaaagtaagactgattcccttctgctgtctctttttatataatttccttattcaagaacctacagtgcctcaggctctggccagcctcactatacccgcagacactctttcctccttattcatttactaacttagatacactggtgcccaggacatgcaggcacatgtgggacaatacatgtgtcagcgctgggcatgcagggctgagtaaagtagtcctacccagccaggggatctcacagcccatgcctttcaattctggatgcactgtcagcaccaccacatgggattggtgactttattcttcctcaaagtcacatgtgtttgcttgagctttcctaactagactataagtttcttaaaaccctaatcttgtcctccacttttggcccccaactcaagaagtgttccttataatgctgtgtacactaaaagtgcttaataaataaatgctcactaagcaatacaacaaataaataacaacttgatttgggatcaaactctaaaatgtttttattagatgtttatgacaggagttaaaatttaaatgtaagatgtgcctatattttatattcacagaaaatcaaggaatttcatcctacttttgatccactcattaataacacttggctcagcaggtccagggcacaaaaacggtttcaacaagtagcacgcaaggtaagtctcagcaccagctggaaatgttgatttgtttactcatcagcataaggaaatcaagcaatggtggtttgataacacctttattgagatacaatttacacaccataaaat

SEQ ID NO: 24415 - DNA, 2300 bp, Homo sapien
ttttttaaactttttattatggaaatttccaaacacacacaaaagtagagcatggtatgatgaagatccctgaacctgtcatgcagcttcacaataactaacactttgtcaatgttgtttcatctgtgcccctgtttttttgttgttgttgttgtttggatttggtttcgttggaatattttgaatcaaatagtagacattgtgtcatttcacctgtaaacacttcagtatgcatctctagtaagaattttttggtttatataaactccatgtcatcatcccatctgatgaaataagcaataattcattaatatcatctaatattcaaatccaaattcaaatttctccaagatgccttttgtttgtttgtttgttcctttgtttgtttgagacagagtctcacttagccacccaggctggagtgcagtggcacaatctcggcttactgcaaccaccatctcccaggttttagcgattctcccgtctcagcctcctgaatagctaggattataggcgtgtgccaccatgcctggctaatttttgtattttagtagagacggagtttcaccatgttggccaggctggtcttgaactcctgacctcaggtgatctgccctccttggcctcccaaagtgccaggattacaggcgtaagccaccgcgcccagcccaaggtgtcttttttacagttagtttatttggttcaggatcccaataaaagtcacatattgcatttaactgcaatgactctcaagtctcttttcttttgagtccccctccttccctgtttatgccattgatttgttggataaaccacgtcatttgccctgtagaatgtcccacattctggctttggctgaggtcacattgcactatttacatacaaacaactgagcagccaaaattgggggggggggctcagaaacagaacagactttaataataatagctaatggctaggcggcacaaaccgtgaggcacaggttacatatacaccaactcattttatcacacagctagtaaggggtggagcccggctttaaccctaggcagtctgttttcaccctctgtaaaggattgggcatggctgtgttccaagaaaactttatttacaaaagcaggtggagagctggatttggtgcacagattagatgatccctcatctacctcacagagcagctggaaaggagaaatgacagatggcacgctgctctgtggactgtacagtgtgaagcacctgggaggagcttggggggcagcgaacatggtaataaacataaagctcagagctccccgccaagggtgagcgcttccagacggagaagtacacgggccggccagtcagatgggcatgggttctgatgggggccctgccataggccgcctggtgacccacgcggggctgccgttccttcgggggttcaacggcatgatcaaagacaccgggatgtgtgtgtgtgtgtgtgtgtgtgtgtgtgatgatcaaagacaccggggtgggtgtgtgtgtgtgtgtgtgtcatgatcaaagacaccagggtatgtgtgtgtgtgtgtgtgtgtgtggcatgatcaaagacaccggggtgtgtgtgtgtgtgtgtgtggcatgatcaaagacaccggggtgtgtgtgtgtgtgtgtgtgtgtgacggagtctcgctctgtcgcccaggttggagtgcagtggcgtattctcggctcactgcaacctctgcctcccaggttcaagcgattctcctgcctcagcctccccagcagctggggactacaggcgtgcgccaccacgcccagctaatttttgtattaatcaaagacgcatttcaacgcagaggaggaagtgctagcggacccaccccaaggtgcacagttagagaaggagcctctgcggcggccggagccccccacggacatccccttgaggcccccccagccacacccccaagagtcccgcccccagacccgtcgagcgagctcccctccctgaaatcctcgccccgagatctccggccggcgagctccgccccctgaagtccccatcccaagatccggggccggcgagctccgcctcccgaagtccccgcccccagatccccggccggcgtgctttgcggccgccctgccgcgcgcacatgtaggcgttccgagcggcggcggaggtgagcgcacggacgagcgggagggacccttctccggcctgatgcgacccggtaacgcgttcagactgcggagtagcctaggggcccagagtggaagcgtagcgaggacccctctgcggggctcctgcagcccctcctccc

SEQ ID NO: 24416 - DNA, 2300 bp, Homo sapien
gtttggcatgcttataattgacttaattatctcaacattcttctctatttgaatttctgttaaacttctgtgcagtgtgccgtaaaggacgtatgaccttcacttagccagaatgctgtcctttccacaagaagtattctattcttttcccattagccccagaaaattaaatttgtggttggtgccaaatacaaaatcaagtgcagggtttcgttacaaggtggtcatcaaatgatccaatatagtgactagaatatattaacttttaaaagaacataatttaagtaagagcaaaatatttacatattttatagataatttgcatatattttttcttagactccagtttaaggaacagtagtctacacccctgctactccagggtggtccaaaagccagggagcttgttagaaagagtctctaggccaggtgcagtggctcactcctgtgatcctagcactttgggaggccaaggcaggaagattgcttgaggtcaggagggttcaagatcagcctgggcaacacagtgagagcctgtctctattgaaaaaaaaaaaaaaagaaagaaatgcagaatttcagggcccactctagacctaatggattagaccatgccatttaataagaactccaggtgatcagcatgtatattaaagtgtgagatatactaatttattatttcccaattcaattttcagtgggcccatgtgagcctggggcacagtctaaagctctctctctcttttttttaaggacaataattgcttcttctctttccagggttgcaggcaggtagatttaaggtgaactcagatttttcaaggaataatggtgagtattggtaacttcaaagggtccatcctggtgacttgcaggggaagttccactcaggaacttttgtgtcttgcttaacaccagacacaagactacatgtaagccatgtggctcacatgtgtaatcccagctactccgaaggttaaggtaagatgatctcttgagcccaggagttggagaccagcctgacaacatagcgagaccttgcctctaaacaaaaattacatattgtatgattctatttatatgaaacattcaatttctggtggaagtctcatatgatctttggttggaggatgactggatgttgacagatgacaatgaggtgaagagcattttagcagagggaatggcatgatcaaagacaaaatggagagtcagaggcaggaatgcatatttagggaggaatgaatgagcactggctacaacagagatctgggaagaaaagcaagtgaaggaagtaaagctggaaacatggattgacaagttgcctttttcaaatggaaaaactaacaggtgtgagggagaagagagtcaatagaaatttctgtcttttccagatttgttcacattcccctgatttgtagtcattttgtcggcttgggaaagtggtttttgaaagatcgtctttataaaggtaggctctgataggatgctcaagctaagagcaaggaaggacaaagaaggcgcctggcgacagaaaagggcactaacaaaaattgggcaaaaaggaagtgtggcggtccccaaatcccttcttcctccatttcagctgagatcattcgccagtaggcaactgtggtattaccaataagtttgtatcaccaataaaatattataatgcacctggctaaaaaccctggcgtgataacaccaaattcatgttattagaaggaattaaattttaaaaagcacaccgttccaggcacacagaaggagcccccgaacgtttgttttataaacgcaggttggttgctgaggctttgttttggagcctacgtttaggagaggaaatgattcaaaactgccccccaaaacctatatcctccaggagcactgaggttggggcgacctgctgccaactggtctggttttcccttttaacacacgcttcttgcccactatccggtccctgcggtcagtgggtgcagcaggggtcgcagtccaaacaaccaatcgcgacgcggctgcggggcgggggccacagcgctccgcctcccccctccaatccgccctcccaatcctcctaggccgctctctctcgcacctgcgtgtccctctgcgctccgactggtgcgacttctccctgcgctagcgaggcagggttttggcctcgcctctcgcgagatcgcctcctgttgctgccgccgccgctcctggccactgactggcggcgcctgcgcagccgccatgttcggttgctatgctgcggcctaggagagggggtgtgcttgagggaggaggaa

SEQ ID NO: 24417 - DNA, 2300 bp, Homo sapien
attcttgtgaatttttgtctatttccagtagagaagcatactcagccaatgttttcacttaataactatgacaaccttaaaggatgtcacttaagttagaaaataagcaggcttaagaagtgattctaattaggacccccactcagtttgctagtcatgcctgcctgacagaacataagcttttgtaaagtatttagactgataacacatgcagtatgaaaacattatagactgcagttagaagactaattttttaaaagcactcaaaacatagaactaagatttagaatatatgtccatttataatgaaataatttgtgttcataatgtgaacatgtaagataagtaaataaagcattacttgttttataatatcaggaagagagaaggaaacattagtttataacaatgtgctatttaatatctgtattttgaacatttaaaatactctgatggtaaggttgccaaagtaattttgaattcataaaaattgtttataccacaataatgtgggatatgtttacaggctcttttattttgtggtagttactttatagttcagatgaatttgcatttcagtcacttatagtaaataaagtatattaaatatttgttggaataaaaatctcaatgtaataggacatagataaattatgcaacagcctgctttgatgaaagctggtgcattatgtgagctgccacagttaatactttgtattaacattgcttacttcccccatttgcttcacctatctgactacaattgctggaatcattctttttgtggtgcttcctccaagtgaaataactatgttattaaaacctactggattaattttatcaaatatcagacttactgatctcttggcagagatttattggtgtctcagtgtgatcacaatacaagttgtagcaaccattttataaaactcttagagaattatgtagataaaatggaaattacataatcctaaaacatttttgagggctaattgataataatttcagcaattttattaagaacccagtaaattaatccctaatttgtatgttttttgttcaacttaccgtgtctgcaaccattatatagacttcattgatactcagcaattactacagtgtgtcttacaatgttataaaaaacaaacagcaatctctgtttctgccagaagttagatatttttttatagtcctgatgaatttgttgtgagtagacaccacatagttatttctgtttgcatataaatttgctgctatttatttgtatgtttttctactgtagtatgctattgatttctgaagttataatcataatttttattttagtaatccaagctaaatgggcaaccagaagtaatatctgctagggtgcaatccatcagcattggttcagtgcatatacataagtaaaccagtttaaaaaaattttactaagcaaaaggtagtagcaatattgctagttaaagattaccattttaggggaaagttcaaaggtttaacttcctgaaaccttttaaacttttcagtgcaagaatgaaaatgtttgaaagccttgttaagctcataaaagtttcatttaaacactgtagagtttcctacctttgttgtgtaaaggatatagaaaatatttttctatggacagaaggttgaaactgttaacttctttaatttcattgtttaaaggagataaaatgttatttgtgtgtctttcatgctgtaaagaaaatgaatgtatctttcaaatgtcattagaattatggcttgattctaaggatactctatttgttttaaagtctacacgggattgaaaagaaagggaagagtattacacttcattgtacaaaatgtaattttagaagaaaaacattttcattataaacaagagcaatcattgaagcattttcagatataatgtacattctttttcattttgctttgcctctagaatagaaacttttcagaaaatttgcacatactgtttgtaagtataaaataattgaattctagacttttggagtgtggaagggtgtttgtgtgtgaaggtaataaatgtgttgctgcatgtgtttaccatagagaacgttgccaggctttgtcaaatgaggacattgttgtgagggtgtgacttttgtgaagccagaaaactgtgcctaagattcattacagtgagtatgtgcagaggcccctgacccagtaaatgctttttgcctttttattcccaatgtcttggacagttgagacaacttggcccaactctgaattgtagcagtgatgtcttatatgcttacgagtttatatta

SEQ ID NO: 24418 - DNA, 2300 bp, Homo sapien
catatcatttcgtttttttgttgagataaagatgcaagatgaccagcaacaattcctcccatccctgaacacccatgctgctcctctcatgaagagtgatgaaaatattccacaattagattgtggtttgtggttctacaactctgtgaaaatacccaaagccatggaagtgtacactttaagtgggtgcattatatctcaataaagatgtttttaaaaggtggagaaggaaaatttctctattttaataatatttaaagaaaaaaaaagaggtagagtctctttcatctccttgaaactgggcggcctctgtgatttgcttaaaccattaacaggcagcagaagggacgctccgtgactgctgggcatagcccttcataggcctcagagcttctgttttcactgttttgccacaccagcggatctgcaagagagtagcccaggcagaactcagctgttctttgcagccaccccagcggagatgccacacagaccagtgaaaccaccttggcagctccagcacctgttgagctgcccagccaacaccacatggggcagagatgagctgccaagcctgtctactacgttttggggtggtggaggagtgggcagtgccaaatcccgagaagaagctcaatgagtatttgtctcttttcatttcagcaagcagagggtcctcaaggtaacaccttccagtggctcccccacctctctcagagctctagccagggcccacaaggccctacatcttacccctttcctctctgactgtcacctcctcttcctcttgcttcctcacttctagccacactggacttccttgaaaagacagacctgtccccttgcagggccttttgcccttgctgttcccttcggttctccccagatggccacagggttcctcccacacctcctctaggtcttcattcaaatgctacctttttttttttttttgagactgagtctggctttgtcgccaggctggagtgcagtggcgtgatctgggctcactgcaacttccgcctcccgggttcgagcgattcccctgcctcagcctcctgagtagctgggactacagtcggacgccaccaggctcagctaatttttgtatttttagtggagacggagtttcacagtgttggccaggctggtctcgatctcctgacctcgtgatccgcccgcctcggcctcccaaagtgttgggattacaggagtgagccaccgcgcccagccaaatgccaccttcttattgtgacctgctatgtaaaatcgcaaaccctcactgcctgtggttattccctacttgtacttttctttttagcatttaccaatgtctgacagtatttaatttcactaatttatctcgtttattttatgtctcgtttatattcctgctataacgtaaactccgggaaggatttttgtctgtcttggttgtctgtcgtatctcgtgtctagaacacagaactcacagtaagtaggcacttcaatcaattacctgtagaatgaacggactgaatgtcaccttgttagagtaccctcctgaccacactctgctaagcagtaatcttttatttctctttcccagttttatttttcctcatttacacttaatcaccttgtgacacctatttgtttactgtttccccagtagagtgaaagtcactttaacagcagagatttaaatgtattttaatccctacaaaggagaaaaagggaggaaatacgtgacaggctctcaataagtatttgcgaaggatttaatctcttgaacgaatggatgaatgaatctagcagccagctccaccagcctccttcgtgataggactaactggggtctgtctgcggacgggcgcctcctccgcgggcggagggccgcagcgggaactgggtttcggcagcgcccctttaaaccagccgcggacgcccggctgctggcgctagttccagcccggccgggcccggcctcgccggtttctctccagtcgccgcgccggccaatttccggggcggtgtcatcgcccgtttaagagcggagcgctccgccctgggggcggagctgggagggagctttaaggggtggacgggcgggaggtcggggtcctccggggattagagccggtgggctcgttgtgggcgccatttctcggcgtctaccgaggagccgcccctttctcagccttgctcggctcttccccgctctggtcgccggggctgcgccgtccccagctcaggtaagcgcgaggcccggcggcggcgccgcagtacagtccgctgcgctcctagccgagtggaccctt

SEQ ID NO: 24419 - DNA, 2300 bp, Homo sapien
catatttgtccccctttggctttccttactaactttaatggccacaacatttaggcgaaaggggggcaatcattggtggtttggcattcgcagagacttctgtcagtttctgcttgaaattttcccatttttaagagaatatgggaacatttcatatgatctccatcacgaagatagtgaagatgctgaagaaacatcagttccagaagctccgaaaattgctccaatatttggaaagaaggccagagtagttataacccagagccctgggaaatacgttcccccccctcccaagttaaatattgatatgccagattaaactcctagagaggacccaggcacacacagactccacttggccttcgcctcttgttcattcatcccaaacctggaaatggaaacaggcttcaaacactcgtctcacgccgtgtttgagatcaccgcctcatcagtatgcatcatagatggaggtggtttcagtatgtgggtgtgtgtgatgtgtacctgggtaagagacttgctttccaggttcgcactttcaggtgtagctgggggcagtaagtcgaattgttttagtaggtcctcaaaaggaataaccacacagctgtttgtttaaatgctactgtacctatcaaaactattgtttaaaaagtatttttatacactgctaatctaaaattgtatttcagattgtgcctgtcataacaatagcaaatgtaaaaagttctctttcccaccacttgtttataaacctcatagttgatatttttagtgttcctactgttaaaatactctctccttgggctttgctgatactggtctttaatattctgataggtgaatttttctaatggaatgaacccatgcatatatagtatttatatgaatattttagcagtgtaatatgttgaattctagttctctgcattaccattattacgttaaagtattttttaaagcttaggtgtgaagatatgtgtctattgcagatgtccttgaaaactgcataaaacagtatgtgcctggtgtggatcttaccaaagtactaggcatgaatgtagggactgcaaatcccatgggtcttaatatttaggtgttagtaaccaaggtctctggtagtacccgttagtagaggaagaggccactgcccttgggaacttgtgacaggctctagtgtggtaccaggccataaagtgacactgttatttagcaacttgaatttttccacacaggtagtaactgtgtggaaataagcaacaagtggtttgtccatttctaagaatcttaaactattagttggctgtagtgtgaagcattacttgtcattggaaagatggagagagtggccttaaccggaagtggtcagtagaagcaggtgtcattttaagggccaaactttaatctgtcagcaatagggaaacaactgttcaaattatctttgtagataagaacagtgtttcttttttcttttcttttgtttttttgtttgtttgttttgttttgttttgagacagagtttcactcttgttgcccaggctggagtgcaatggcacaatcttgatctcagctcgccgcagcctccgcctcccggttcaagcgattcttctgcctcagcctcgcgagtagctgggattacaggcatgcaccaccacgcctggctaatttcgtatttttaatagagacagggtttctccatgttggtcaggctggtctcaaactcctgacttgaggtgatctgcccgccttggcctcccaaagtgctgggattacaggcgggaaccactgcacccggcaggtacagtgtttctttaggtgctggtggtacaccagggaatcagggcagaagctggatcctgcaagagtaatgtttgagaacaaataaatactttcgaaaggaggtcgaaacaaaaaggagtgtaggtgttattactgcagagaagactgaatggagtccacttttcttattagtaacttactaaaaatgatctcaaatgggctccacacactttgccctggccatgaggcaaacttgttgggtttggagaaaaacacataaccctaaattcactatttttgccctatataaaacattaaaataacatgctctgtacacatgctgtcaacaaaagccagctctaggaacctgagtgccagaatgcctgagggagctacagctgggcttagttggctgggattgagctcgctgtctgagggagctcgctctgtctctctcacactggcagtttacaccagccggcagccctgagcagcagtgggtgtaactttttataaataaggat

SEQ ID NO: 24420 - DNA, 2300 bp, Homo sapien
acaggtaaataaaagacaaaggcgggtgtctgagagactggccgcatcagggaaaacagtgaaggaggggtgtctgatgcccagggcatgatgggggaggggtcaaggcctgcaggccaaaggaagccagctggggacagatggcagacagcatccctcaccctgtggcacaagcctggaagctgggtctgccctccctcaggagctgtgcagcagagccactgttgcactgtgacaggacaccttgatacccgcttcttggatggagagggtgcacttgttctgaatgaggagctcaaggtgggaaaataagctccgagctctgtctttgccacaaagatggcagcagaggccctgagttcatctgactacataggtgattgggaaggacttctgactgttctcgcagggtccagaggacctgactctgccaccagctcccggagggtgggggcgctcctggcagcgcctcccctccacgggctctgctttcctagtggggtcaaatcaattacttgcaggtctctaaatgcaaagtgcaaagttccatgtattgattcatctaatcctcaaaacaatcctgtgtgcttttccaagcccatttcacagatgaagaggttggattggtgagggggttttccacttttacaaatttttagttgacaaatccttcttgggagaaaagagtacaaaaaagaccaatgtgtaaaacagacagattggagcaactctgtttaggggaggaatggagggagataaggctctccagaaacaagaggccctgaagacacatctatgaagtcagccttaagggctgagcctgaggactggtgaagctcactcagctggactcccttccccagggccacagattgcctgtggctgaagtgaagttgtggagagcgcctcgggggctgggactgtccgcccgacacctggacaccctgctcatgcccgcctggggcagtgctgtgagggtgcgggagggccactccgcggaggccctgacaggccatgcgttcctctgatggcctgtcccacttcagagcccaggacctgcgtgacaacatcccacagccacttcaggaaaagaggactaggagagactggtgagggcagccagggctctgctgagcagtgggacagcggggaagacagaaatcctccagggtctgcccagatggccagagggcgaaaggggtgctccaaatcacagacccgctgcagccttgcccttagacaccacccaggtctgtcccccaacttcatagaccaggaaactgaggcccagagagaaagaggtgaatttgcctaggtttctcagctgatgggtggcacggcctggacaagaacccaaatctcttgacctctggtccagtacccttttccaaaggaaaaggaaaacatggttttgcgagaataacacagagacagggccaaataagtcaaaatgaggactagacacttgaaggtaggagccctgtatctgcgacgcgattctctgttaacctgccgggtgacctggggcagaaagcaacccccaaccctggtctggatccagtttcctcccgagtggggtctaacaccctcaccagcaccttccactctggagtgagagggacaggtacaagagcgccgctgccgcctgggatctctgcacagccacttcgcaggcagcctgagaaacgtccgttgctccaccaggcggagttctgccccgcgagtcttcatcccaggtaaggcccccccacctcgtgccctgagtctacgcgcgggccttttcctttgagccagggatacacccgccgccggcccccacaggtctgcgctcatgcacatcgccttgcatccgttcagttaccggcacccgctccctcgctcgcaaactcccgcactagcccggccaccgcctctgctcgcgcgcgcggggtgctggagcctcaccgcgggcgctctagccccgggcgggttcccgggaagccgcggcgagcgcggggaggcgaggatcccggcagagatgggtagggtgccaacgcccaggccccgccctctccacccggccccgcccccgcagggcccgccccggccggcagggaggatgtgagctcactcccgcctccatgttcccggagtcgcctggaagcgtccgcccaaggtcgcgggccgcttggggagtcagcagcgcgccaggccccttcgggccccacacgcattaggtgccttcttgatgggtacggagtgaacgcgggcggcggcgggaccgaggcagcgcccagtttgtaaccgccgcgccgcccgtg

SEQ ID NO: 24421 - DNA, 2300 bp, Homo sapien
tgagacctggaatgagccaccttagaggcagctgaggctggtggcctcttggttcccttctcccgttgggacacgtttcccctattggtgtcctgtgtgagacagccccgccaaaagggtcctgccactcctctctgaatatactgcacagctcagggtctggcatgtccaggatctgaatagatgatcctgctggaggagtcccagtaggacccctccgagttctaggcaggcagagaatgaaagcagcatttctcagaaagccctgtgcatcctgttaccaatgcaaaggaatggcacttcagcaccccagaaaaggtggggaaacctcctgcatctgctgtgggtcctaggggatggggggcaggtgggaacagtagaatcctggcctgtggcctgatttctgaccctgttccctcaactatcatacccttttcacttgggtaggctgctgcagctgctctcctctctatacttgcatttgacaaagggtaccaccacagcaggccctttccaccaggctgcacgcggtcacacttgatacagatgggctttgggagataaggctgtaccagattggtgatcacacacttgactgtacatcgtggcctctggtggcaatcactaatgtaagctcacattcctgaggcactcaccaagttcctagcactgtactgagagctctatgtggacttgcatgtacatcttcttacctatagcatggaggtgctgctattgggcagctggtgaaactaaagcccacagaagtagtttcctaattaagtaactgctagtcacaaggtagagccctcctttaatcctatgcttccagactccaaacctgtgcacttaactgttactccgtaagaaaaggtttgggtctgattcctcttctaggttataaatactagggagcttcctctttgagaagcctcctaccccatctccttactgtacctagcaaagtgtctgtcatacgattagcactcaataaaagttttaaatgtgaatgagaatggtaaaaacagaatacttagtaggctaacactaggatattcttctgattgcacttttttgttaagttggtcacttaagactaaggtaaagcttctgtgctttttgatatagatgctgatggagggactggatctggtagatacatagcaatctaatcatggcccaaagcctccaatatagtatacacatgcatcctaacttacaatgatcaacaatgaaagaattaattacactgtgctagcagccatggatatcacattgcataagagatagttccctcccttagagataagaggcagacgtttaaactgtcagttgcgatggcttgtgactctcatgaggtctgcgtaggggtcagcacggtcacaaaacctgtggaggaggaggtggttaggaaggaaaatccaccgagatgaagctgtactggatacaaaatcacacgttcctgggctttggcagggagcttgcccactgcacttcctgcctcgaggctatggctggggtgggattctggcccttgtaggcggcctgggtccagtctccgccatgcactcactaactccattactgctaatgggatgtcatcagcgaagcgagtggtggcggcaggtggagtcccgccccaagacccccgggcggcatccccatcgccgcgctccagcactcttcgccacctcgtaattttcttctgtttctgtatgatcaggtctgtccttcgcttttgctttccattacttcgtcctagccctggcctgaatcccacaactggcgccccaccttgtgcacccgcacccgccctcaataccggcgggcagctcctccactgccgcagggttaccagctgcgtgtccgaggggcagagagagaaacagagggggacggggcaggcgcgctgggcccgcccccccgtgcctggggcagcttctcattggtgaaacctcctccccggccgcccgctgcttggaaaatcagcctcggattggctgacagccccccgacgggcgtggcttccgaggagagggcaagaacggaagcgagggcgcgctctcgagaggaggggttgcctaggcgacgccggaggcgcgctcggggggtgggaaagcgagcccggcagctcaatgacaaatcggtggaggacggctggggtccggccccgggagggggcggggcgcgtttaagagctgcgggccgggtgcggacggcggaggcggcgggactggtccctggtaagggcgcggcgcccgcgggccccgggcggggtggggcgcgggctggggagtggg

SEQ ID NO: 24422 - DNA, 2300 bp, Homo sapien
ccaggaggcagaagctcccgggccacaggctcccaggcagggcaagggcaacctgatgggagagcagagactctggccctggtggagattctaaggaggcagaagggctgccatctcggggatcctcctggatccctgcttctgacttcggtcggcaaactcacacccgccctagttttgcccgccagcttcgggtcggttcctccgattgggagggagggggcgctcggcttccagacttgcaggccgccgcgggcctgcggtcccggccgagctccacggtggcagggctggcccgagagactggcggtgggaggcgggggcaggaggccacgctccgcctccgacgtccccgattccccaatatcctgggaaagccaggatgaactcccatcgtgcttctgccttgagtctagcccgttgcgagggaacggggtacggctccgtgtcctgtgggcattgtcatgcggccccagacccgggtgggggcgtgaagaaggacagaggagcgcattgcacttggggccccggacgggtctgaaagtcaagtttccactgacagtgttccttgtccggtggcctgagaacggtgaccctagaaccatcctttatcgggttgtgtgaagagcctggcccagttgcctcgctgggcctcccacccagcccctgtgatacaggtgttactgtcccttcacagaagaagaggtaggcgataggaaaggtgaggactctatccaaggtcactcctgcaaagctggcagtggctgagcccgagtggaacccgggtctgagtgaagccaaagtttgtctgctggcgaaagtgggaattccctgggggtgggggtgggggtggggtactgtagaccctgccagcccctcaagccctgaggctcagtggcctccgggccgcgcgcctgggatcccgcacaatcggggcgttcctcctggcccagcagacgcagccgctggccaggcctccagtggctactgccttcccgccctccagctcgcagggtccacgcctcggccagtgcgacggcggcccggggagctgggtgagggcactgcagccccagagcggcagccgccggcggagcctgcctctggcatcccaggccgcgccgcaccccgctcgcctcgccaggctcggccgcgagggagcgccccgggagggccgggggcggccacggcggcgggagtcgcctctgctggttggggagggcggcagctgggacagaggcagggcctgcgcggcggcggggaggcgggagtgggccgggaggagcgcctgggtccagcgcctggaacccgtcggtgccgccggccgcccagctgggcaagggtccggggcgcccacgtggtgggaaagtttcgaggtagcaaaagtagcccggcattgcggggggtgggaggggagaggaggggaggggagagggccggctcgcccctccttctcgggaaggcagaaaggaaaaaagcggtgggaagcaggggtgagcgcggggagcgggcagccccaacctgaacagattccgctttctcctcctccccccaccccgggaagctcgagcggggaggtacggaccgtctcctctcgcacgggcaggacgacaccctccctcccccccttttttctgccaacgtctatctcaacgcgcgcgcacatacggagattgtgcggcttttttcccccttgggagaaaaaacggggagagtaaaagaagagagaccaaagagaagaactcctcctcggcgagctccgcactccgtgccgcggcccggcgcggggacgccgccgccgcccgcccgctctctcccggccctgcggcgggtgccagtacgagcgcgagcgagggcactgcacccggggacgctgcgagacttttcggcgctcgagccgacctcgccgccgccgcggcaggcagaagagacaggagcgagaagggccctgcctccccctcgccttcctcgcccggcgccccgcgcccggccgggccgcgcaggcaggcggagggaaggagggaggctgcgaggaggcgggcggagcagaggccccggcgaagcgcgctgcggccgcccgcccgtggatgcggcgcccagggatcctggagacaactttgccgtgtgacgcgccgggaggactgcagggcccgcggccgagggctcggcgccgcctgtgagcgggcccgcgcggccggctctcccgggcaccaagcttgctccgcgccactgcccgccggcccgcggcgaggacgacctgcccgtctccgccgccggcggcccttcctggcgcgaggcag

SEQ ID NO: 24423 - DNA, 2300 bp, Homo sapien
ggtgaggactctatccaaggtcactcctgcaaagctggcagtggctgagcccgagtggaacccgggtctgagtgaagccaaagtttgtctgctggcgaaagtgggaattccctgggggtgggggtgggggtggggtactgtagaccctgccagcccctcaagccctgaggctcagtggcctccgggccgcgcgcctgggatcccgcacaatcggggcgttcctcctggcccagcagacgcagccgctggccaggcctccagtggctactgccttcccgccctccagctcgcagggtccacgcctcggccagtgcgacggcggcccggggagctgggtgagggcactgcagccccagagcggcagccgccggcggagcctgcctctggcatcccaggccgcgccgcaccccgctcgcctcgccaggctcggccgcgagggagcgccccgggagggccgggggcggccacggcggcgggagtcgcctctgctggttggggagggcggcagctgggacagaggcagggcctgcgcggcggcggggaggcgggagtgggccgggaggagcgcctgggtccagcgcctggaacccgtcggtgccgccggccgcccagctgggcaagggtccggggcgcccacgtggtgggaaagtttcgaggtagcaaaagtagcccggcattgcggggggtgggaggggagaggaggggaggggagagggccggctcgcccctccttctcgggaaggcagaaaggaaaaaagcggtgggaagcaggggtgagcgcggggagcgggcagccccaacctgaacagattccgctttctcctcctccccccaccccgggaagctcgagcggggaggtacggaccgtctcctctcgcacgggcaggacgacaccctccctcccccccttttttctgccaacgtctatctcaacgcgcgcgcacatacggagattgtgcggcttttttcccccttgggagaaaaaacggggagagtaaaagaagagagaccaaagagaagaactcctcctcggcgagctccgcactccgtgccgcggcccggcgcggggacgccgccgccgcccgcccgctctctcccggccctgcggcgggtgccagtacgagcgcgagcgagggcactgcacccggggacgctgcgagacttttcggcgctcgagccgacctcgccgccgccgcggcaggcagaagagacaggagcgagaagggccctgcctccccctcgccttcctcgcccggcgccccgcgcccggccgggccgcgcaggcaggcggagggaaggagggaggctgcgaggaggcgggcggagcagaggccccggcgaagcgcgctgcggccgcccgcccgtggatgcggcgcccagggatcctggagacaactttgccgtgtgacgcgccgggaggactgcagggcccgcggccgagggctcggcgccgcctgtgagcgggcccgcgcggccggctctcccgggcaccaagcttgctccgcgccactgcccgccggcccgcggcgaggacgacctgcccgtctccgccgccggcggcccttcctggcgcgaggcagtgagggcgaggcgctcaggtgcgagcgcggggccccgccgcagcgcccgccgcagcgccgcgccaagccgcgcccggctccgctccggggggctccagcgccttcgcttccgtctcagccaagttgcgtggacccgctctttcgccaccttccccagccgccggccgaaccgccgctcccactgacgctgctttcgcttcacccgaaccggggctgcggggcccccgacgcggaaaggatggggagaaggctgcagatgccgaggcgccccgagacgcccgtgcggcagtgacccgcgacctccgccccgcccggcgcgcccctcgggcccccggggccctcggcgccccttccctgccgcgcgggaacccccgaggcccggccggccccctccccctgcgagccggcggcagccctcccggcgggcgggcgggcggaggcccgggcgggcgcgggcgcgggcgggggcggggcggggcggcgcgcccggagcccggagcccggccctgcgctcggctcgactcggctcgcctcgcggcgggcgccctcgtcgccagcggcgcaccatggacgggctgcccggtcgggcgctgggggccgcctgccttctgctgctggcggccggctggctggggcctgaggcctggggctcacccacgcccccgccgacgcctgccgcgccgccgccacccccgccacccggatccccgggtggctcgc

SEQ ID NO: 24424 - DNA, 2300 bp, Homo sapien
gggtgctcctgggagaccctctactttcccagggagtcgaggctgccatcttgccaccacaaggcaacgaggaggcccacgtgctaaggacgatgaacagaaagctgggaagagcccagtacttggcatcaccagcagctgaccaaggccatcaaccactcgttttcagaattatgatgtcagaaaaataaacctaattttgtttaagccacagtgagttgagattccccttaagtgaagccaaacgtttctatctgatacccatgaatgaacgctttaacgtgctcatcaaatattatgctccctacttaccttttcttctttctctttaaaaggccctttgctggcccttagggaaagccaaggggcccaggaactcaccacatgtttgaatcaggggtctgatgctgaagaagccagtggcagtataacttaccctaagcatttctcaccttctctaccccaaataggggctggggatcaaggacttcctgagggctaagatgagaggagcaggcccaggagatccaaggaacagaccagaagatacagcccaggaaaggggggttgcaggctcaggcccttgggccagctgggtgctcaaggctacaccctttgtgaggctcccaccctggctccctgcagcccaagggaaagggctgtctgctagtgaccaagtgggcgtgatgggtctcctgtgtctttgactccaccagactcccacagcctcattcagggcataaagaacctacaacctgccctttcttttttttttttcaagacagagtctcactctgttgcccaggcgggagtgcaatggcacaatctcggctcactgcaacctccgcctcccgggtttaagcaattctcctgcctcagcctcccaagtagctggtattacaggcatgtgccaccatacccagctaattttttgtatttttagtagagagggggtttcaccgtgttggctagcctggtctcaaactcctgacctcaggcgatctacctgcctcagcctcccaaagtactgggagaacttgacctttctaaagccctaaaagctaatgtttgagtgtctgctgtacatcaggttcttttcatcttcatgaaagtccttcgatacaagactttgcatccccatttataaacgaggaaactgaaggatcaagaggtcaaatggttcgcccaaggtcacactgctgggaagagggggaattctgtttccttcccagaaataaccaccctacaataatatgttgcttcagagcctattttattcagtctcccagacaaacactattcattgccatctgagtgcctttgtcccagctctgcctgtccctccagcctggaataccctctggcctccactggcattccagcttcaagactcagcctcactccctccctaatcataaacagccatcacttatggaaagcacaccacaatattttacagcagtcctacccgacaggtccctgtatctctgctttccagatgaggaaactgaggctcagaaaggagcattttctggcctctgtcacacagctagtaaggggggtggccagaaggcaaagccagctctgccagggcagtgtcctcagaagagccgagagagggaggagttgcttccaggtcaaggtcaggcctccaaaaagaatgcttggtctgggcccttctctcctcccccacacttggccctgcaaattggctttgacctttcatgcccctgcctttgagcttctccccattcaattgaaatcacaaaggaagaaaagagggctggcgagagggaaaggcccctcctggcccaggcccaggtccccagccacgcccccgcaggcgcatcgagccctccagggtctgtttgcacagttggggtgctgcgctaggaaccccacctccgggagaaaggcaccacgaggtcatctgtttactctgggattagcggctccccgtgggagttcttttcctacgagatgaaaagaaagcggacaatctgtcaggtaaacaggccgcattgttcccagccatgtcgggggcccctttgtgggccgggcctttgaggtcggttgctcccttgcacagggaaagagcttacttaaacggaatggaacggaacgggaggccccggctggtgggcaggtcgcctgctgctgatacaggaagggacaaagggctcggacgattccggtctttccttagctgctctccttgcaagctctttcctccccatgggtctcttgatgagtccaacaagacgggcatggagcccgatctcacagatggggaagctgag

SEQ ID NO: 24425 - DNA, 2300 bp, Homo sapien
gtaccaggtggggtggtgggccatgcaccaaatccatagagaaacaggggggtctgttgggagcagtggctgtgcactggtgcctcacatacatcgccaccttcaagtttctggataatcttgctgggggtgcatccccctcactgtctgtgggaagccaaggtcaaggttatggagcctgaggggcatggggctgacccagacaccatggccctgcctccccgcatctgaccagtccaggcatcatttatagggtctgggctcccctcctgagtttgccatctccccaaaggacccagagtggaggctgggggctgtgggaatccctggctggagtggtggaagagggaccagcgcaggtaggagcttgcggttcccctcccagtgtggaatggctggaagagggggagtcagggacaaggcctttgcacagctgcccacccgtccacactctggaagacccttcacaccttcctgagctctgcctggccccagtcctggagctccttgttggtgctgctctctggggctctgcagagctgttatcctgctgggccctagtgaagccatggcaggcttcggtttcatgtacagtgatgggaaggtggacagagaaggcagaaactggtgctgcctaggcctcagaccccacaggcaggtctgaggagctggtggagtccctgactgtccccccagggccctgcaggcaggtgatcttttcttggagaagaagaaaatgggagaagctgcccatgtggggcagctgctataataggtgttacgggccatgctgggaaggctgactgtcttcccagtaccctgggagggagggtactctgcatcactggggagcaaactgaggctccgagaggggaagtaacatggccacagacacacagtggatgcagactatgctggtccaggcacacatgcatctctcattgtgggagaattcaatgcctcatgttttaaaataggattattttgccgctggcagtaaaatgccagaagtcctggggaacccttacgttccccacgtccctatctccttcagggtggaggagtgagtgtaaatttgtctggatgggacagtggggactgacctgaggagtcagagcccgctttgctcctaggctgccagccttggcattgtggcactggactggtgtccctgaggtcattttcccagtggagacagtggtgtgaggggagaggaaaggactggtgcccagctcctggtggatacaagacagagtcctcagggcctcaggccgtgagtcggctgcttcccttttagctgtcatgaggttagaatgacgatttcccttaatcagggtggcggtgtgctcttcactctgggaaatttcactttttatctcattggatcttaaaaataagtctgtgatcaaggcagggcacatgtttatctctcatgtatgtgcatgtgtttgcctgggtctgtgtccttgtaatatatacatgtgcatgtgtgagtgttcatgtacctctgcatgtaactacatgtatcctgtatgtgtgcacgtgtgtggctgcatatgtgctgtgagtgtatgtgtgatgcaggtgaccatgtgtgactttatatatgtgtgtgcccatgcacacgtctgtgactttaatgcggtgtgcacgtgtgtgtgtggcctgcgtgcaggtgtatgcatgtgtgtggctgtgtatatggtttgtcggcgtatgttctgtgtgctgtgtgagtgtgtgagcctgcgtgtgtgtgtgcatccatgtgtgcctatgcgtgtgggtcctgggcacgcatgccgcacgactgagatcacagcagaggtgagaacaccgtggctctgtggtggctgtgactgctgagaggcgaggcttcatctctctcctggagattgattttgcctggggaacaatgctctaattcctgtgagtcactcgttagaggagttcaaagaaaccaggtggcgggagggtgtctgggatttcaggtttcagggtgattcgctcattctgctctgattactaatttattcttcaagcaagtcctttaactcagagttcttaaccttttctgcgccgtgggccccttggcaagcaagtgaagttcgtggactcctacaataatgctataaatgcatagaagaaaagacacaggactgtgaaagaaagtgatgatgcgatgtctaaaacgttcaaggcaccgcatctgtgatcaagaatacatgtgctgctttaccgacacatcaaagagcaaggtcagccgtgggggctaatgaatggctagcataagtgggaca

SEQ ID NO: 24426 - DNA, 2300 bp, Homo sapien
ttcccagggcagcctctacgtccctgaccacactgtactgtcactgctgcttacccatggacctctcctgttagaactcaaggacgagtccagcaaaggacatgttctttccagaccaccccagagtgtctcccatttaaacaatgggtttgtcatggaccctgatggggtgaggttggttgtgggggtcggtgttcaggatgtttctttggaagttcccttaagagtaacccctgggcaaggaactggaaggaagcaggagggagaccctgagcaggacacaggtcttgtgacagctttgactgtcttcatggggagtcctggggctaaaataccccatcagcactgtccccagtcaggcagagatggccaagcttttatacttctgctgggatagtcattgggatgtgggctatcccaggagggacatgacagagggcaaggctgctctctgagcaggggcagttcctggagaagccgatggctgggggactgtctgctgacagcaccacctgaagccggggaaatattcccattctcctaacagggcagaacagtggggggcagtccttgagggctgcacagaggaagtggtttgccagttgtgacctatggctggagggaggagggcaggaacagcagagtgagggagggttttacccacatccatgcgtgggggagtggggagttctggaccaggtccccaagggatgtcatttgactggattaatactcagggacagaatccccatctcctctgtgccaggtgctgtgccatgtactggagaaccggatagcacctggataggggtcagggctccagggaactccactccctcctaatggccctcccctccaccccatgacccactgtctacactgctgccagactgatctttccaaaaggcaaatcatacatgtgactcctctgcttaaaacacagaataaaatcctagctccttgtcctggcctgccaggccctctgatcttccccgccctcctcacctcatctcctaagctctcctcaagaccagccatgccaagtaggtcttcctcaaggctttggcagtcactgttgccaagggggtagggaactatgcctggaactatttttccctaggtgatgttcacagagatgcttcctttgcatccatcaggtctcagctcaatgtcacctcctccaggaaggcttctctgattactcttttggtgcattccttttttctttttttatgtttactcaacaaacatttatcttaactatgtcccatgcactgttctaggcagtgcaggtaacggggtgttaagcgagccaggccctgtcctcttggagcttacagtctaatgggaaagacaatcagtacacaagtaaaaataaaaaataaaaaaatgtcggcctgactcgggggctcacgcctgtaatgccagcactttgggaggccaaggtgggcggatcacctgaggtcaggagttcgagaccagcctggccaacatggcgaaaccccgtctctactaacaataaaaaaatcagtcaggcgtgatggggggcgcttgtaatcccagctactcaggaggctgaggtaggagaattgcttgaacctgggaggagaggttgcagtgagccccgagatcgcgccactgcactccagcctgggtggcagagcgagaccccgtctcaaaaaaaaaaaaaccaacaaaaaaacccccatgatttcagagcgtctgaagtgctatgaaaaaacaagagcgaggaaaggcgacagagagggcctaggctggaaatctcggagccgctctggagaccggccctgggcgtagagtggggagcagaggccagaggggccgtgtggagcgggttgggggcggcaagggtcacctgagccccacatcggagtttggggagagcacccggccggccctagagccctctggtctggccgccccggaggcgcgctcgctcgccggaaaggcacgcgcgggagtcagccaggtgcggctgccgcggggagccgccctccgggccgcgcttcctggggggcgggtctcaccgctgtcccgcccctgggccgccgataaatgcgccgagccggccggcaccgcgggttcggagcgcgaagccgccgctgggtcctcggcgcgccccgcgtctgcgcttgctgccgcgccccggtcggcgcgctgggagttccagccatgctcttctggcacacgcagcccgagcactacaaccagcacaactccggcagctacctgcggtaagggccgcgcgcggtccccgcgggtctcgggccgggccggcg

SEQ ID NO: 24427 - DNA, 2300 bp, Homo sapien
gtagaacccagggcccaggtaggccaggggtgtaggaacaaacaggatggcgagcgcgggctcagcctttgtgaaggccttggacctgcttcccagctccccgagctgtggagtgagatcctgaagcactgctctgaggcttccctctcctttcacacctgctttgtaaccaggtctccctggagctgtgttgacctccgtgctgcatttgggaggcaggggtttgacatacacactgagcatttgcattaccatgtgtggtgccaagctaagtatggggtcagaaagatttgcccaaaatgtaacgtaagcatataacataggaagtagggagcagaagcagagctagtctggtttctttctggctcctgtgttaagaccagtgtccattactgaataaactagtgagtgatgagtatgtatttgtacaatggtgtttttttcgggaactgaattattttttcacctctcatgttacatgatttggtttatttcgatttgatagtgcttttaaaaaaatattgttttgaagcctgttttatttctcaagtttgaatgagtaattagaacctacattagaattctaaatagttaacattcactaagggcctaccgtgtgtcatgaagtgtatgggttgccagggaccgaggcacatgagacacagtgcctggcctcagagagctcaaggtctgtcaggggagcagactgatagtggtcacactagtaccagagaaggcctgtgctggaggcagatgccagatccagtcggggcacaaagaaaagaaagctgatcctcttgcagggatcagacagtaggggaatgctaaggtagaagaggagttctctgtttgaaagcagaaatggctgtagggattaaaagcctaatcacttggctattaattgcttatatgctggtgggtagcatctcagactctgcccacacatctgtttactggacagtgagctattagggtatagtgtttgtaaggactggcacttcctgggagaagtggactatttgttttcattgcttatagaattgtttaccttatcctttatagatcttgattagggtagaaattacagtgttggttattcaccaactgtgtactaaaaggcttaaagaaaaggaggaaaagataggaaggcaggaggaaatgacagagttctttaccatttcagactttcttgtgtgtttgctacccaatcttagaagctaaagaagtatgcaaatacacatttaagtagttcctaataacttgtctgatttgtttgttttttcatcctctctatttaaagttgaatattcagagttcaggtttcttaaaagaacatggaggagaaaggatgtgcctttctgccatagaaaccgtgttcacagccctgcaggtaactatgttgagtcatcttgggccagtttttagtctccacatagatagtccaccagtagtccaaacaccttgactggtatttgttcaccatgctggttcctaagctgtagacatttgagaagggaatggaggataatcagatgtgatggtgaggaggccttgaggagtatgtgtgtatgagagtagatttgaccctggtaagaggctgtccagtggtgggtctgactcaggaccatggcagtgggagagagtttcagaaaataaaagggttgaggaggggctttggcggatacaggcatttcttctctttgtctgaagtagaagggaaaagatagcaaggaagggtgaagacattgactgttggtactggacagctggtctcgcacctctgctttcacagtgaacttggtgagaaggttggtggagggtgtgtaggctgaggccggacagcgaagcagggcggagggtgggaggggaaccgtgaaggaggcatcgcctctgggagaggaggcaggaagggaaggatcactgcgcaccactgagcaagcccctgtgctgggcatttcctcacgaggtgacgtatgtctggtgtgtttcaccagtgcccatcgaccattctgacctggtggctgaccttctgaaagagctgtccaaccacaatgagcgagtggaggaacggaagggagccctgctggagctgctcaagatcacgcgggaagacagccttggtgtctgggaggagcacttcaagaccattctgctcctgctgctggagacccttggagacaaagacgtgagatgctggtttggccttatcttgcccctttccatgtaatggggtcacgatgtccttttcttattgggcttagcttcagctttactttctgggttgtgcttactgtttacat

SEQ ID NO: 24428 - DNA, 2300 bp, Homo sapien
cataaaactaagagggaatctgtatgtctgtctatttgttctgtgccaaaatcctattgattccataacaaagaatgactatccttattctatacattgtacccttttcctacaaaatgacgaagaaggcaggcttctctctccagtttctctctcttggagacctgaccccatgttctcctccctccccacgacatggatcctttagcgggcaagcccagggctgctttcagcttccatgttgggtggcatggcctaaccttaggtcagtgactattggctgattaaggaattctccctaatctaaaaaaccctaagagagcccttctggagtctaaccagagtatttacaggtgatcagggcctgacctctaacccaaggattatgtcctggggttgtctcagggctgaaacaagacaggctgtggggcagatggcagattgaggtttccccaggtctcttctcagtcagcttctgaggccgtcctgctgctccctcatatactgcttgtgaggacacaatatctaccctccctgatgatggcttccatgggaagttcctttttcctttaagtgagaacttaacagatactgatttggaaaaatataattcaagccaaagcataaaaatagcaaagaaagtagcatggtctgtttcctcctagaggtaagcagttatgcctctcacctgcagctcacagttatagcttcataccaaggagatacttcaaaccccaggctagtgagtctaaaagaagacaccttcaattgttcttggttctgcaaatggtgctcctgaattgggagtttgagttggtttattaattgaaagtgagaaggaggaaattacctggcagaatcctttattttcttattttaaaaagaggctattgtaatagtgaagtgatgtgatctgaaatgaaatatttttaagaaagttcaggttaagaataatgagatgaattatctgaaagctgacattatctgaagcgacatatggaaaataatattgtgacatcccttaaaaaaacttgaacgttcccccagacttcctcttgtccatcccatcattctttcagttttttggattttttttcttttgcatgggctatgctgttatttttggttgttgtgattaaaagtattttaaggcatttttttacatcttgtatatatattttttgtttgagtcataatactcagtctttatatataaaaaatagtgtactggccagatgtataaatgccttgtccatacaaaagctagtattgtggtgtcctcagaaggagcgggggagcctctggccccttggtcatgcctttctcacatctaaggagtgttgcctctttgacagacagccttgtgaacatagaagaggttgaaatcttaaattctcttcaggttttttattctacctcctgtcagtttagacatggaatttcaacagcaaacctgttcaaggttcacatttctttttgtttgatgctcaagtcaatctttgagttgaattttttttttttttttgtgaactctccaaatattcattcatcaggaaaggtgggttttatctgggccatatttgcaattctagacaaatagctcccatctttgagattgtggtcagctcttgggctctagaacctaccagcaccagccctagaaaacacttggatcattgctacatcaagccagtagagatctggccactccaagtgagagctctccaaatcttaccttgctcatctgccccaactttttttttttttttttttaaggcagaatacttaaggaagagtatttactaaatgttcatcatttttacattacaggaaactcactttgggaatgtacaggattggttgtgttgcccttaggaaggatacttcgtttcttcagttactactcttttgaagaacaggaagattgcttttctttagtccttaaacagtgttgcatgcttacagccaaggattcttcgcgtgtccctagcaatcctcagtatagctcaggactattttaaaaattaaattagacgaattcatctgatcttttcttgaaactttcttgaaacaagtgacatttaaactaagatttttttttaacttgcccttggttgactgttgcttcgtgttttgcttgctttatgctgatatatccatcccatgcttttcttttatattctcaggatggtttttgttctcaggattctccctgtttcagtgcactttccagacatctaaaaggcacttgttgacaaactgcagtgcaccaaaaaggattgtttggcttttttgcttca

SEQ ID NO: 24429 - DNA, 2300 bp, Homo sapien
acttctttcagtagttttacaatactttttgctcaattatgtgaagtgtgacagattttaaattttattcagtgacatagctctgaagtctttatttcaaactttgaagcagttattaatatggaaaagtgaaattctataaaatcctgtttctctgatttttcattgatttttgctggcaggcaatagcgtgtttatcagaatgtttgttcctagaagagtactgtagttataaagttaaaggcatttactgcagtaagattttattctagctgtacgtgtactagtgatcaaagctattaaaactttgtgttagaatgtatgtcggaatatcaaagcagcagcagcagcaggaggaggcattgcagctgttttaagttttggctgaagtcagattttgaagcctgaatattttatgttaagataaaagaaaaaagaaaaaggagccaagggtgctttttcatatttgtgttttattaatatataatcagtttgtttgctattttaagactagctggggcaggtgggctggtatgtgcctggagtcccagctacttggaaagccaaagtgggaggattgattgagcccaggagttcaagttcaacgtgggcaaggtagtgagatcctgcctctagaaaacaaacaaaaagctccacagactagttggaaatgtttttttttaaaaaaaaaaacaacaaaacttttgggctaagaactatttgccaagttcttaacatgcacatcggaaatctcagacccttgtcctttctagataactttaaatgaaggctctagatgttaagtggtttatatgcttcactgtctctaagaaaaataactatagtccagtatccttttcttgttttaggcatctgtcatcagttctggggaataagtttgaccatggagctgaagccattatgccaactatctttaatttaattccaaacagtgccaaaattatggccacatctggtgttgtagctgttaggttaattattcgggtaagtatgttataggccatgcttgaaataagcaagtggtaaatactgatggttgataaatattagaggcatttttgttaacataattatattgagtcattaaatttattagcataattatattggaattttgtatatatatcatcttttccccctacttaattgtggcatgtgagctttttataatccataatgtgaattatggttgtgttataaagttaatgaggtattgattgttaactcactattggtttaaaatgttcgaacatccggtgtctgcttctgagtttatattgtattcttgttactcggatattactcttagtcttacctccttagtcccagtccttccgttttaggtattggtgcttgtggttttactgttcacccaaaagtttaattaattgcacataagcacgaaacaaaatgttctctttggttaggttttctaggcacttgtttgtttaaatttaaataattatccaagtaatttatacacaggtttttaacaaaatctaatagttcacaaaggtttaaaatggttttccacattacctccccaccactttcaagtcatttttgcccagaggcagctcttgaaactttgaggcttgatgatgttgtctaaaatctatccagaatattcttgattattggttatttactttgtattataagttcttactgttcttacttgcactgcctgctttaactgttaaacccaaggtcattattggacatttctattgaaatagtatcaaaatatattggtctgatgactcctttcaaacccactccttttaaacccactcagatgtctacagctgagataatttagacctcatactaatgattgttttaggcttatcttcatgtcatcatgttgcctgttcttaactctgtaaattttctaatggcttttgacaatatcctgtgaattctttttttcttttaaaactcactgacattctaatctgaatatatatgtgctataagtaggttagtaaggaagtgattctcttaattttgttttgtttttgtatttgcaagtgttgacctctgttttttgttgttcttcacagcacacacacatccctaggttaatacctgtcataacaagcaactgtacctctaagtctgtcgcagttagaaggtaaattttaaaggattttctcattgtttttgaattgtttaaaaaccaaaacaaattccaaatctccttccatggataaaatttcatgtataacatgcttagtattacttaaaatcactgcagtaaatgactttgagttgaa

SEQ ID NO: 24430 - DNA, 2300 bp, Homo sapien
ctttatattaaacaaaactttgaagcttggcttcttgaatttttttttttttttttttttgacagagtctcactctgccacccaggctggagtgcagtggtgtgatcttggctcaccgttacctttgcttcctggttcaaatgattcttgtgcctcagcctcctgagtagctgggattacaggtgcgtgccaccatgcctggctgatttttttctgtatttttagtagagatggggcttcgccatgttggccaggctggtctccaactcatgacctccagtgatccgactgcctcggcctctcaaaatgctgggattacaggcgtgagccaccatgcctgaccttgggaccttggcttcttgaatttttttttttttttttttttttttgagatggagtctcactctctcgcccaggctggagtgcagtggtgcaatctaggctcaatgcaacctccacctcctgggttcaagtgattcttctgcctcagcctcccgagtagctgggactacaggcatgcaccaccacacctggctaatttttgtatttttagtagagacagggttttaccatattggccaggctggtcttgaactcctgactgcctgatccaccagcctcggcctctcaaagtgctgggattacagttgtgagccaccgtgcccggctgttttttttttttctttaagggctgaaaagagaatggagaagtaattttggcttgcccaaacaatagtacttgcgtgttgttattccttttcttaacagggaaggtagatgaatgtcagctcaatggcttattaaaaaaaaatacggccaggtatagtgaatcacgcctgtaatcccagcactttgggaggccgaggtgggcggatcatgaggccaggagttcacgaccagcctggccaacatggtgaaaccccgtatctactaaaaatacaaaagtcagccgggcgtggtggcacgcacgtatagtcccagctacttggaggctgaggcaggagaattgcttgaacctgggaggcagagtttgcagtgagctgaggttgcaccactgcactctagcctgggcaatagagtgagactccgtctcaaaaaataaataaataaataaataaaaataaaaacgttggctggagcttgagtaactttgcatttaagtgtttctttacagacagatgtatatgtggtatcaagggcaatttaatggctaccatttattccttacttagtttcaggtatgttctctgtcttatctcatgtagtctttataacaaccctgcagggtaaatagatagtggtatcctaatttttatacaggaagtaactgaggcttagaaataatgaggcaattttaactagtgattatggaactggatttaaatataggtctctgattttctggatagtgctgctttcataagaacagggtttagtaaacttttccttaaaacccagatagtacctattttgggctttgtgagaccatatgctctttgaaatattcaactaatatgaatcgttgtattgcaaaagcagtgacaggtaataggtaaatgaacaggcttggctgtgttccagtaaaacttgactaccttatgtgatatttcagaaaaacttgcctctctcactcagactcatattgggatcagtttgaattctgttagcttactgctaatcatctacagtgagctggccttgaactttctttggtagtagaagccatctgtgggttgagtaattggttatttaaataagcatacattcagaacagcactatgctacaccatggcggtgctgttcaacatggaaggatttgtgaaggttccctgttgtcatagtgaccatgggaatcctggaaggagacattaaataataaaaataaccccaaattttgaatatggctgtcctcattgatctggtctcctcttcctgtctgccttaaaacttgcagaaagggaaaagtggtggggataggttcttgcactcacttccagctgcttctgttcttccttcttccctcatcaggtgagaagggatgaaatgttaagaatgacctgtcttggagagaccgcctgggctatgcaactggagggaattggggggggacttatgctacgcagctttctcaggtcatcttgacagctttgattctgcgcagcagtgcagtaacatgcagcctcacatccacaccacaccagtgcaagtacctgtacctttactgggatcattggaaacaacgtttcttagcaggggcttggtgctttttgtgaatacagtcccacaggcctttctccgca

SEQ ID NO: 24431 - DNA, 2300 bp, Homo sapien
taaaactttagaagtctaaaatggtgttacaaggtagcccataataaacaatgaattatagaaactgagatttcagtaacaactgctaaaaaggtgtattacacaatttaacaagataaccagatcatcaaaatttaaatttcttaacaaatgtaaaaaataaataatattcaatactctgaggcactgtgctactttttatctatatggtcgcaacatcaatgttgctattctcccaatcccttgatgagcaaacggagccaatatccaggatccctcatatcgagaggtcagttaccgtcgtaaataatcgtagtaataaaaacaatttctaatgccagaattgaaaacggactgtggcacccaaatagggtccaaggtacatggcggcatgaaactatttctcgcttctgactcttctgcatcacggtctcccaaaggactagagaatctgaagctctcattgccacatctacaaatgaaagtatcatgtttaaagagctcacaggttctacgaatggtcagtatttaatgaacgcaccccactacacagaaactcacccagctgcaaactcagctgcaaactcaccacagcgtgctttcagactccacattaattttttttaattttagaagcaaacaactattttaaaaatattatgtaataatttaaactctggaaagccccatactcatcccagcagctcggaaaacggaaagcaaaattcgattagctccattgtacctagccaggctaacgtgcaagatcacacactcatcttcgtcagagcgtctctgccaataccaaagaacaacaaaggcaagttgagaagtctgcacaggcttaactcagcacttgttcgctttcccagcttcagaaagaagctcttcgaaggccccgggaaccaaggggaccttgtgcatcccatcaagccggccgctccgctcggcgccgctcgcgcagcttttgtctggcccggttgggagcccaggacgggagcccgggccgcccgcctcccggcaccccttctctctggatctttcttcacacccatcactcgccaatgactagttgttgtgggtttctctccctcgccccctcccttcctttcaaacgcgccccgggctcgctggcttctcccacccggcaggggagactcgggttaggaagggggcccgggtggggtctggaaaagggaaacagagaggggcacacaaagcccgactgaccccagggccgatcccctccctctgcaaagcagcctgggctcagcgacctactggttggataaacaaccctcgcatcccgctcctcgccaggctcccacctcagggccgccccatccccccaaagtgcacccaagagccgatgacagcgctggacatcgcccccacccagacccggcgcccgccactgcgcgggaggggccagggccgcgagagggctcgggtctgaccctccgccccctgaccgggtacttacagccctgtttttcgttactgttgccgctgcggaccagagagccgccgccttctcctccaccccaatgaggttaagcgcttggtgcggggattaaaaaaaaaaaaaaagaaaaaaaaaaaaaagaccgagagagcgagagagacgccgagggcgcctgcgcagtgcggtcaccctttttcttcttaccgccaccaacccgggtacaccatagagagcgtaaaccgagaccagagaggcggctgcctctctatggtaacgccccgcgcaggcgctggcctggccgtgttaggcttcgctggcgtaaagtccccgggagctttgcccctcacggagaacgttagttgaccctgatggggacccgtagggtaaaggttttgtttttgtttttttttacggaaaaggttgtggttaggccccttggaaagttgcgacaaaactcgagttagacaaggaaggtcggaactaagtggccacagcaacaatgcaccagcaagcagggagcgtgataggaagagctaaagaggaatcgggaaaccctgggtaaaagtcgtccaagtggaacttcctttggtcgggggtctgatactcgaaggaaacggtctttcacttctgggttagggcgtccgcccagagggcgactgcaatgaaggaaattgtgccctgcgacttcccgtaacagagctgtgtgtccacgctcccttttccgagcaggcgcggacgcttgtgccggaagtaaacttgttaacggttctttgccttttggggaggggagacagcccagagaaggctttggagacccttgagtcggccagcgagc

SEQ ID NO: 24432 - DNA, 2300 bp, Homo sapien
ttcacaataaccaaaaggtggaaataacacaagtggtatatacacacaatggaatattatttagtcttaaaagggaaggaaattctgacacatgctacaagatggataaaccacaaggagattatgctatgtgaaatatgccagtcacaaaaatacaaatactgtatgataccacttacacggggtacacagtcaaattcacagagacagaactagaatggaggttaccaaggctagctggaaaatggcgaatgagaaattgtttaatgggttcggggtttgttttgcaagatgaaaagaattctggagactggccgcacgaggtaaatatacttaatactaacgaattattcactcaaaaatggttaagataataaattttgttgtgtagataaaaaaatttaaaaatcgattccatctttctcatcaaatcttactttttactctttgtttctttttttcccatttcagttagattgctctcttcattgtacttccagtatgcctcttgagcctttgcaccatggtgtttcttctctggaatggtctttcattatcacccatccattttcaaaaggttgcatgtgctttcgttccaaagacattagtttatagatccaaccaggagtcgcatcctccatgtcatccctactctttcaaatcacatacctctaccttttctgcactacacagaagggcctacacacggctttcatactttagcttagcctctccgaccatacctcctaagaccctgaggatcagggggcattatctcatagttctcccgcacttctctcccatcccaacacatacactagcaaggagctccgcacacaagctcctccagtaaaaacaacgcactgggcagtgcatctcaacacatcaaattaccggcgtgcataggagcctgatgcggcaaatctgtgggtccttcgggatccttgaaggcagccctataatttgcatttttctacgctccaaaacactttccgggccagatgcggtggctcactcctgctgtcccagcactttcgaagacccaagacggcggatcacttgaggtcaggagtttgagacaaggctgggaaacatggtgaaacccatctctacaaaaaaatacaaaaagtagttgggggggggtggtgcacgcctgtaattccagctactcgggaggctaaggcaggaggatcacctgagcctgggaagtcgaggctgcagtgagccgtgatcgcgccactgcactccatccggcctgggcgacggcggtgagaccctgtctcaaaaaaataaaagccaccactttcccacttattatcccagggaaacgcacgcgacggaggagcgaaggagcgtttatttgtggaggcgctcaagtaagaaaccctgctcgctggccgactcaagggtctccaaagccttctctgggctgtctcccctccccaaaaggcaaagaaccgttaacaagtttacttccggcacaagcgtccgcgcctgctcggaaaagggagcgtggacacacagctctgttacgggaagtcgcagggcacaatttccttcattgcagtcgccctctgggcggacgccctaacccagaagtgaaagaccgtttccttcgagtatcagacccccgaccaaaggaagttccacttggacgacttttacccagggtttcccgattcctctttagctcttcctatcacgctccctgcttgctggtgcattgttgctgtggccacttagttccgaccttccttgtctaactcgagttttgtcgcaactttccaaggggcctaaccacaaccttttccgtaaaaaaaaacaaaaacaaaacctttaccctacgggtccccatcagggtcaactaacgttctccgtgaggggcaaagctcccggggactttacgccagcgaagcctaacacggccaggccagcgcctgcgcggggcgttaccatagagaggcagccgcctctctggtctcggtttacgctctctatggtgtacccgggttggtggcggtaagaagaaaaagggtgaccgcactgcgcaggcgccctcggcgtctctctcgctctctcggtcttttttttttttttctttttttttttttttaatccccgcaccaagcgcttaacctcattggggtggaggagaaggcggcggctctctggtccgcagcggcaacagtaacgaaaaacagggctgtaagtacccggtcagggggcggagggtcagacccgagccctctcgcggccctggcccctcccgcgcagtggcgggcgccgggtctgggtggggg

SEQ ID NO: 24433 - DNA, 2300 bp, Homo sapien
ccaagatttcatcctggggggagcaagaacaagcccatggaaaggggcagccctgaaaaagaatcaaattgctcttgctcgctcactcccgaaaatccagcctacccatgaaaacacaatgggaagacagcgcttaactggaagaactgactttgctacagggtcagggatgcccccttgggggtgacggtggcgctgagccggagggtgcaggggtgaaggaggcgaagactgtgagcgtgggaggcacgtctgtcagaggaagtgggctggcctcgcttggcactccctcccagggcctccacctcaggcccacaggccactcttcgggcacacacaccctgggccgccttcacggcttccagaacacggccgcagctatcccctgacaccagctgtgcttgatctgtcgctctcgcctcacctccctgcttcctcggcaatccactccccacccttcctctccactcagttactcactagtataatagtatttgaaaggtacaaacaggccgggtgcggtggctcacgcctgtaatcccagcactttgggaggccgaggcgggtagatcacttaaggtcaggggttctcgaccagcctggccaaaatggcgaaacctcgtttctactaaaaatacaaaaattagccgggagtagtggtgtgcacctgtagtcccagctagtcgggaggctgaggaaggagaattgcttgaacccaggaggcggaggttgcagtgagtgagccaaaatcgcgccactgcactccagcctggacgacagaacgagactccgtctcaaaaaaaaaaaaagaaaagaaagatgcaaacagccacagcctcgctttaaacccgcccatcccctcgcatttacaaaaccccagtttcatactttgacacacagtcatggggctccagcctgccgcctcgcagctcttccctcctgtgctgggctccaaccccactgccgcgtccttctttctagacctaggaacactgtgcaggcctgtccggtccagcggacggcaggcgctcggttctccacaccccgctctttagccttcaggcctcggtgctaacgccacctcctaagggggaccctccggcgccacccagtgtgcctctcccccacaagcctctttggtctcttaaagcagccatgctgccctcaggctgtaagttctccaagggccgcggacggacggggccacacaggagagctcacacacaagtgagtgaaagaataaccaaattagggccgggcgcggtggctcacgcctgttatcccagtactttgggaggctgaggcgggtggatcacctgaggtcaggagttcgagaccagcctggccaacatggtgaaaccccgtttctactaaacatacaaattaagctgggagtggtaacgtacaaattaagctgggagtggtggcgggcgcctgtaatcagctactcggaagactgaggcaggagaatcgcttgaacccgggaggcggaagttggaagttgcagtgagccgagattgcgccattgcactccagcctgggcaaccaaagcgaaactctgtctcaaaaaaaaataataataataataagcaaattgaggaatgagagcagcatctcaaggacacaggtactgttttggaatttattttagaccttttttgaaagtaggcgtgaacgtaattgtttcaggcactcttaagcgaagccagccggcgccccgacagccgagggtgcgggagctccccacggcccagccccagccccagaccccgctgccgcgcctcggcacgcccctgcgccccgcctccgcgcctcggcgctactcacgccccgccctccgctcctcgtcacgccccatgtcgcgcctccgcgcgactcacgcctctcccagtctctcggcacgacctcgtgccccgccctcgcccctggcgcaatttatgccccgccccgcgcctcgccacaccccgtgccccgcccccgcttctccgggcaactcctgctccaaccccgcgcccgactcatggccctccccgcccctcgccacgcctcgcctcgccttagcgcttcgccccgcccctgtcctgcctctacttccgcctcgggggagctgggagcccgacgtttccgggagcgccgcgtggttagcgtcggcggcttttggcatggcgactttttctggcccggctgggccaatcctgtcgcttaatccgcaggaagatgtcgagtttcaaaaggaggtggcgcaggttcgcaagcgcataacccaggtgagcaggcaccctggcccaggctgcgagcgg

SEQ ID NO: 24434 - DNA, 2300 bp, Homo sapien
ccgagatcacgtcactgcactccaccccaagtgacagagactccatctcaaaaaaaaaaaaaaattaaacagagaactagttattttaagagatcaataaagtggataaacctccagcaagattgacaaagagaaacagagaaaatggataaattctttctatcaggaatgaaatacagggtggcactagagagcctgaagatgacaaaagaatataaggaaatactataaacaactctattcaaataaatgacttagactaaatgaaccaattcctttaaaaaaacacagctaccatagctcacccaatattaaatagatactttgtagcctgggcaacatagccagaccccatctctaccaaaaaagacaaaaattagccaggtgtggtggcatgtgcctatagtcccagctactgggtaggctgaggcagaagaatcacctgctgacagagcgagaccccatctcttaaagaaaaagatactttgagtagcactatgactattaggaaattgaatttgcaataaaaattccccaaaagagatctccaaagaaggtttcgttggagaaggtttcagcagagaattctacaactacttaaagaacaaacagcaatctgcataagctcttccagataatagaccagaagggaacactttccagttctttatgaagctagtattgggaaggaaaagctttctctttattatattttgttcagtttatgggggcctccaaaaaattatttatttgaggcagggtctcactctgtcacccaggcttgagtgcagtggcacaatcatggctcactgcagccgtggcatcctgagctcaagtgatcctcccacctcagcctctgaagtagctgggaccacaggcatgcgctaccatgttcagccaattttcaaaacattttttgtagagatggcggtctcactatgttgcccaggctggtctcgaactcttgggctcaagtgatcctcctcgttagcctcttaaagtggtgggattacaggtgtgagccaccatgcccagccagggcctgcaaattaaactgacaaaagacagattaacggaacagaaaatcagcatgggcatataagaactcaacaacaccatcgactaatagggtctaattaaactttttataggacactcccaaaaaaggcttatttgcatggatgctggagctagcaaaataagtagctagcctactaaatggttagaggtttatgtctgggcgcagtggttgatacctgtaatcccagcattttgaaaggctgaggcaggaggatttcttgagcccaggagttcaagacccgactgggcaacgtaatgagaccaaaaaatgaaacagaacaaaacaacaataacgaaaaccacacaagaaaagaaagaaacaaaaaaccagttagtggcttgtgtgcctaactctaggtaaaacggagaggtgacgaaagtttgtatgagaacaaataggattctttaggacagacgaatgggttttgggagaacaaacacgagataagaaagggttttttattttttttgagacggagtctgttgcccaggctatagtgcagtggtgtgatctcggctaactgcaacctgtgcctcccgggttcaagcgattcttctgcctcagtctcccgagttgccgggattacaggcgcgcgccaccacgcccggctagtttttgtatctttagtagagacggagtttcaccatgttggtcaggctggtctcgaactcctgactttgtgatctgcccgccttggcctcccaaagtgttgggattacaggtgtgagccactgcgcccggccgatagttttttaaaaatgtaggtgctagtggtcttactgtcttcttcatggacatgaaattattctcatataatgagaattaaatatgatccttcatgtaaagagtttagaataatgtcagaaacaaagcaagcaataaattatcatttagttgataagaatcattccaattcatctggcgagtgcaacacacacacacactgtatttgtgtatggaataactgttcaagaacacacacacagtatgtgtgtatgaaataactcttcaagaacaaaggggaaaccgttatagggcatgaaaggggaaaccgttatagggcatggaaggggaattaggacaaggtgtgagtggaaagagaaacatcccaccgcacacgcttaaaaaagccgtttaatttaaaaataggtaatacagccatacagagaagacattaaaagatctacacagaaaattttcgctcccaatccattcccta

SEQ ID NO: 24435 - DNA, 2300 bp, Homo sapien
caaaagagatctccaaagaaggtttcgttggagaaggtttcagcagagaattctacaactacttaaagaacaaacagcaatctgcataagctcttccagataatagaccagaagggaacactttccagttctttatgaagctagtattgggaaggaaaagctttctctttattatattttgttcagtttatgggggcctccaaaaaattatttatttgaggcagggtctcactctgtcacccaggcttgagtgcagtggcacaatcatggctcactgcagccgtggcatcctgagctcaagtgatcctcccacctcagcctctgaagtagctgggaccacaggcatgcgctaccatgttcagccaattttcaaaacattttttgtagagatggcggtctcactatgttgcccaggctggtctcgaactcttgggctcaagtgatcctcctcgttagcctcttaaagtggtgggattacaggtgtgagccaccatgcccagccagggcctgcaaattaaactgacaaaagacagattaacggaacagaaaatcagcatgggcatataagaactcaacaacaccatcgactaatagggtctaattaaactttttataggacactcccaaaaaaggcttatttgcatggatgctggagctagcaaaataagtagctagcctactaaatggttagaggtttatgtctgggcgcagtggttgatacctgtaatcccagcattttgaaaggctgaggcaggaggatttcttgagcccaggagttcaagacccgactgggcaacgtaatgagaccaaaaaatgaaacagaacaaaacaacaataacgaaaaccacacaagaaaagaaagaaacaaaaaaccagttagtggcttgtgtgcctaactctaggtaaaacggagaggtgacgaaagtttgtatgagaacaaataggattctttaggacagacgaatgggttttgggagaacaaacacgagataagaaagggttttttattttttttgagacggagtctgttgcccaggctatagtgcagtggtgtgatctcggctaactgcaacctgtgcctcccgggttcaagcgattcttctgcctcagtctcccgagttgccgggattacaggcgcgcgccaccacgcccggctagtttttgtatctttagtagagacggagtttcaccatgttggtcaggctggtctcgaactcctgactttgtgatctgcccgccttggcctcccaaagtgttgggattacaggtgtgagccactgcgcccggccgatagttttttaaaaatgtaggtgctagtggtcttactgtcttcttcatggacatgaaattattctcatataatgagaattaaatatgatccttcatgtaaagagtttagaataatgtcagaaacaaagcaagcaataaattatcatttagttgataagaatcattccaattcatctggcgagtgcaacacacacacacactgtatttgtgtatggaataactgttcaagaacacacacacagtatgtgtgtatgaaataactcttcaagaacaaaggggaaaccgttatagggcatgaaaggggaaaccgttatagggcatggaaggggaattaggacaaggtgtgagtggaaagagaaacatcccaccgcacacgcttaaaaaagccgtttaatttaaaaataggtaatacagccatacagagaagacattaaaagatctacacagaaaattttcgctcccaatccattccctactcacagtcctacatacgttacttttattttccttttttttggaaatgcactggccccctactctctcacgaaggctgaactctctctacattcttctgcacctgttttttgtgcatactctttcgttgtcaaatatttccctccaactgttgttgtgtatgaaataaatacacacatataagctaaccagccccacttgcccgcaccacctacacgcccgtccccgccctccctcaggcccacgtgctccgagggccgccttcgcaggttgtttctggcgatgcctgtctgaaggcctcagactgaggccccgcccactctccctctcctctgccctttggacgcgcgcctcggttccgaacgcagcggacggcgcctcaggcagcgcggcggacagcccgtcctccggcgcgccgcgagcctcggaggaccctagcgacggtcgtggcgtaagaccggggggacgcggcggtagcggcggccgttgcgattgattgcgctggttgcctgcggcgtccacttccttggccgccc

SEQ ID NO: 24436 - DNA, 2300 bp, Homo sapien
agagccagactatgtaagtgtgaagggtttgatattgtgtttattgttgaagaagaaactggtattggagaatttgtttgttttaaggaggggagtggctagtggttttatatttcatagttgtttggctccaaaagtcagtcaggtcatttctaatcagataaacaaattcttatagatgcgttagtaattacagtgagataatgtgttgcttctccattcaacgtatgttttttctttaggtgtttctaacactttactcaaagaaacttatggatttgagatttcgtattcagagtattgggcacatgcttttcacctcacttgacatatatgatatagaaggcaaattatataaattatttgtatctgtaaaatgggatggcaggaaatcacaaagtgttgtgaaaatcagaggtgaggtaaatgaaatgcaatgcctagtgcctgcagcactcattaaatagttactgttactgataattaggtggcactaaatatgacaccttaacacccagcaagccttcgtcgggaatattttgttgcctctctcatagcaaagctttgtaagtgtggcaagatcatatagtcattgtctctattgatgataattatgggcagggcacggtagctcatgcctgtaatcacaacaccttgagaagcagaggtgggggcatcacttgaagccaggagtttgagaccaggctgggcaatatagcaagaccttgtctatacaaaataataataataaaaataattagccaggtgacgtggcacacacctgtagtcccagctactctggaggctgaggtgggaggatcacttgagcacaggatcccgaggttgaagttagctatgatcacgccactgcccttcagcctcaagacagagggagaacttgtctctaaaaaaaataaaaacaaacaaacgaactaaaaaatcacactcccttggggaaacaagatatttagaatgtgaccagtgcacattttctacatgtttcacatgtgtctggaaacttgtttctagtggacaatgatgatgtattttctgaaaaaattaatagcaagtttcagaaactaaactgcaatgcctcacagtaaagacaattttttgtcaatacaaccaaaaagaataggcacaataaagccataaaaatttatcaggggaaaaagatggagcacttatttatttaaagaagactttagaaaaaaagcaaaatgttgtagctctgatttttgttaaatgattagagatggaggaagatcagaattgtaggtgctgaatttcaaagtttagtgctaaatttaccagacaaatatttatcaaggaaattctatatttataacttgctgactctatccccacttcctatgaatagcattctttctttggtatgatattatttctagtttaggaaagaatcatctcctgtgtatatccccaggaagcatttgtttatagcagtaatgaggatggagaaacttcagttggtttcttagaaatcttttggctatactcttgggattacatataaaatgttattttcacctttttcttgtttgtcagaacatctgattaattgatttgaaaatccatactctggttgtctagcagattttcactgggtaaaaatgagaactaaattcagcatgaatctagggattaccagtgtgcaatttcagatttatgggattgaataggattcaattagattttgggaaaagagtatatataaataaaacatgtatccaatttaattttaatcaaactttttatatgggggaatttaatgatttcagctcaccatttttgaaccatttgcataactctgtactgacatttgttctcccattaaacagaaaataaagcattcccagatcaaatgggttagaggcaaatgtgggaagatgataacatcatttaataatgtgttataacaaaaaggaaatcaaagactttggtaacttctgtttcattcacagaagatcacatttctccacctggactgatttaagaattgaggttagttgactactattagcaagacttgcaattatggcatgcaggcacatcctcttctgttcacttgagttatttctgtatagcagtagatcatgaggacatggacaaaggcattgcacctactttctccttgagcaatttccattgatgtctgtgatgctgatactgaattacagaatcccgaggattctgtattgttgtagttctaaaccttttgctgtggaggttagcctgtggataggaagagtcaaacaagaacaacttatacagtttct

SEQ ID NO: 24437 - DNA, 2300 bp, Homo sapien
ttaatgaatatattttggcatatttatgaaatgaaatacaatacagtagttgtaataaaataactaggactttatgcagctggatgcatacatttcaaaattataatattaagtaaattgcaaggtgcaaaatgaaagaacatgacaccgtttatgtattggttaaagacaaagcactcttacatattgttcagggagataaatacgtgtggtaaaagtttaaaaacattatgtataggaatgatatacaccagataagtaaagtgtttacttctaggtatgatggcagatgaatgggatcagagaagaatgcaaaaggagcttaagttatatctctaatattctacttttaaaaatgtctaagtgtttgcatacaattacaacataccaagctgtaatggctcagtgtattcctctagatttcttagtatgattaatagccagatagatgtttttcaccatgggatcctcaaaggctaggggttgggtggcaaatcctgaggaccctaggtagaaggaaaaaagaagcccatgcagctcaactttgaaccccagccctctcctctcttcagaccccttccagctgccaacagggcagctccttaggtcacctcagcctggatatgttgacattcaccatcttctgggtgtggtcctccactgcaccctaccatgcaccccaagtaaagctccagctgggaaagtctttcagtttgctcaggaatctagtgacttacataattatctttagttagaagcttagagagaagaggatcatttatgtataagtgataggaccctcagaattctttcttctctaataaaataatgaggtcactaatccagttgtcattcaactgtctcttaatatttcaatgatgtgagtctagctgtaaccaaaaaacacaaggttaacctcaggattcatgcagaagctgcttgaaacctagtcccatctatagtcgtgcagccaggattgtcaggagtctgcagtgtcaaataaggcagtataattgcttctgttgaaggtaagaggagggtggggagagaggaagacatcaaattcctctgaagcaggtagagttcatcaaccctaacttaattgtaagcttcaaataggataaatcattatggtccctcattttgttaaggtttgacagctttctgacagcttccaataaaaacaaaataagttgatttatgataaagcaggagagtttccagatatatactagaagccaaaaacagaaacaaaatttgtaagcgggggtgtctagaaagaaaccaaaatcattctttccctttttcaaaattcaaatccctccagcagagcccttatattttggattcttacgagctaacccgggcttccaccctgactctcatcactaccacacccatgtgtctttcctctctccgtctccctgagacgccagtgaaccacctgggcttggaatccagagccccggaacaccttgcagtacttgcccgaagcaacgcgccaacagcgggagggagacgcagacgcgaagaccggcgagaggatgtgcggtgggagtagctgcggggtctgcaagcaggggagcgcgcacaacgttaaaccttgaaaccagaaatcccgatcctatcgagacccatcagcttttcccatttgggaacgagcgcaggggaaattaaatgcgtaattcaagctctgttttcccctcccctccaaaggtgaggtgggggaacgcgtctcgttagctcattacaaagctttccgtgggaaattccctcttcctaatgcgtctgtcttgcaactcctattagcatccttcgacagcggcctttgaaaatctcctttaaatttcaatacctctactcgtttcccaaatggggggaagggaagagaaagccggggggtagagagaatttccttcccctttccctcccaggtagccaaagcgcaccgcagcggcttggcttcctggaggaaaagcgcccgagcggggcaaagacccgcccaggctgctcttataggcgagcgcggggcgggcctggctgggggcggtgccgcgcggccccgctcgcctataaggagctgtccgccacccgggtgctgattccagctctcgcgcccgacgaggtggatttggctgtccaccgagctccggcgcctgtcgttctaattgggtttggatttgcaccgttaaggaggggggaagagaaggaagaggcgggcgaggaaggcgagtccagctagcggctgttgcggggaccgtagccccagctgcagctccgaagaatcccccgccacggtt

SEQ ID NO: 24438 - DNA, 2300 bp, Homo sapien
taacccagattgagttccaaagccctgtggtctttaatagcgcaaggaactgtcacatcctccagtgatggctggagctgagattgctttagttctgtaacaaatgctacttcgttcttgtatctgacctctgcagtttgtggggctttcaattttcactgtttagttcgttagtttattaatttttggcttattttctgtaaggaattctctgcaacattttgatgccttcaacctgtcttaccctaagaaattaaggaaatctcttatgattacgtctaaggccagtaggttctaaatgagtctgtaaaagtgacttctctaagtgtgctgcaatgacctaatgacttgtccgttgttacctggcagaactttctgcttctttccaactttccagctgcatttcagataattaaagttattttctctcaggacagaggagcgggactactgttccacgtagacgtatgtgtatgtattaccaaaaaaaaaagttaaactgttaaagtaatcacgggtgcagtggctcacgcctgtaatcccagcactttggaaggccaaggtgggtggatcacctgaggtcgggagttcgagaccagcctgaccaacatggagaaaccccgtctctactaaaaatacaaaattagccaggcgtggaggcacatgctggtaatcccagctactcgagaggttgaggcaggagaattgcttgaacccaggaggcggaggttgtggtgagccgagatcacgccgttggactccagcctgggcaacaagagcaaaaactccgtctcagaaaaataaataaataaataaataaaaataaattaatcattactcattgctgtttattaaatgccttttctgttcccactgtgattctacaatcactgcctctgtaaaaccccggaatgcaggtgttcttgcctccattttatagatgaggaaatcaagactcagggcttccccaccaggccaaaggcattctgtgagtagtttatttcaattcaacatggctgtgctgcacatggcagttggagtaaagatctatcagcatcgggggttcttcatgatctaactaaagtgaatcatgagtgctttcccactgcgtcaagaaggcctggagtttgtgcagcccggctagaggtgagcaaagcctctgtgttgcaaatctccagggcgcagcctctcattgtattcaatgcagatgacagtcccaaaggcaccgcccatacattgtacagacagctggcctggctctccggattgtgcaggataggccttaatggcagaaggtaggggagaggtgggcgtcacaaaagtgcttggggaactataaagtaaacaatgaaaagcagcacaggaaggttcagacatcacacaggagaagcacagggtgttcccctgggtggggatttaaaacaagggcctcaagttccctgcccttgtctctgggcagaaggggcagataatgctatgatacattttttgtaggtggtgccatttgactgcatttaaccaacaaaggtatgtatcgaaatccacgtggagattttcatggcaaaagtagagcgaattcacaaactgcactgtgtctggcagcttcagacaaaagcaatgggaacaaatcacgactcttgtccagcaattcttcctgttttggaatgatctttgctcaacagcccatccatgagtacagggcccccaaaggccaacaagacagggactctctccagggacaaatgccccgcagctgagagaggccgcccagctatccagcggccgcgcagccagccaagatttcaacacaggtctgccctatttggtcaccatccccgacagtgctgggccaggccatcatgtcacattggggagttttccctgcactccagggggaattctcaaccacaacctctgtatccggtagtggcagatggaaagagaaacggttagaaaagcgtggttcttgcgcaggaaagttggagcaaagaagagttcagaagtgggcgggtgtgtgtttaaaaaaaaaaaagggggtggaaaccccaccagccaagtctgcagaaaaaaaataaatgaagtctgcctatctccgggccagagcccctcccctcggcccgcgcgggaggagtgtgacccaggtgccgcttcctctcgccgccgagggtcaggagcccgggagcgcgaccctcccccggcccggcctggcccggcctggccagtccccgcggtctctgcccgggctgacgcccaggaatgtggtcgacgagaagccccaacagcacggcgtggcctctcag

SEQ ID NO: 24439 - DNA, 2300 bp, Homo sapien
gcctgggcattgtattataatatttcttccaagggccttctttccatcctcttattcaagcagatggaaatggctcctccacccaggcctgcctctgataagcctccgagcgggagaagcagaactgagcctcttatcagtcagctgcaggggtacctggtgggcctgtgctgggtggcctggtgttgataaaatgggcttgggccagccgctcaccagcttctccctcagacccatccccaggccccaacctcttagaaatgggagcagtgagacccagaaaacttccttactttctgagataccaaagcaaggcaggcttctgggggctatgggcaacaggaaggacctgatgggaaacaagtggggggggaatacaggctcggcaaggccgcgggtggagaaaggggcactagagaggccctcgagccctgaatgtggtggtgggagctggtgcctcccacaggtgtgacaggattttgcgtgtgctgagaattccctgtgaggcagactctactgctcccatgtgacggcactgagcctcagagaagatggaagcctttttttaagtgttttgttcatttaaggtatgatgtggtgtggtcgggttggaagccagatctgctggtgccgaaagcccaagcaccttgctccttcctgggagctctggctggaggggttcacccctccgaatcccacccctgccacacacacacaccctgtttgagacagcacattttaccttcagaagttaacttttttcctcagcttctgttactgttaaccccccaacacatttggtgagttcaaacggaggctggcatgcaatatttgggacatacttgtattcaaacaattttcattttttatctgaaagtcagatttcactggcttcctgtattgtgtctggcagctgtggtagaaaaggacctgaacatgggtgtttctgaaagggtcccagatgattccaaggtgcagccatagctgagtgcccagggtgagtggctcctgctgagcacacccacctgctgcagccctaccaggccccgccacaaagcccagggtggacggacccttcgtcatcagaaacatcctccaaggggctttcccagattcccttcccatcctttgcatccatctcgtggattcctcccacaatgaacagaaatctattttgtatgtaaatgtagaatctgagacacatcttaatttttaatactttactgtaattgtggaagtgattcaataacggggcatgtggaaacatagaataataaataattattcataaccctcctacatctcccatcacactgatgttcccttcattcgcttctactcacactcctgcttaaaccccaaattctcagaccgccagcctctcctgcagctcctacctcatacccagacccttgtctctgtccatcatccactcctgtgagcctctcattgtgtcatcctgattctttctcagtagcttcaaagtgctattctaaacaatgggctctcctttccatccctaccctgcttcaaaactctagagaatccccttctctatgacctcttcacctgtcgtggctgttcgtcactacccgagaaaacgcagacttcttagtctgatcttcaggatccttcattgccctttcctcacccaagcaggtgagtaataaaatttattagtgatattcaccgtagtagtgatggtggaagaagtaataagacaaggaaaagaaaaagagaaaaataagctaatgatatgtactgggtttagccatttatattctttcattttttcccacctaaaaccacagagtttatacttcccaaaacaactcagaagtagttatgttaaatgtgtaaagaaaaattaatgcatttgtttcattatgaaaccatctatacttgaaaatgatacaattatttgaaatctgtacaacctggcttcttccagctgtgctgtgagccctccacacaacctggcttctctaggagcctctaatcctgattgaagaaacagatccacccctgtaactgcctcatgtctttttgggtaactgctttcactctgttacttggtttgcttaagcaaaggtttcttgcctttatcaaggaaattagcacaccagtctgacagaagagtagattgtgtttgtgcttacccttcttctcctaaaattaagtgttagctttcaaacttgcttttgaagtgctaagaaccctgatgataaatgatgaacaaagcctcctgtttacattagaagcatcaaaacagcaggactgggccaattcacccattcctg

SEQ ID NO: 24440 - DNA, 2300 bp, Homo sapien
ctctcggaatttttttaaatgcctcatttaaggacttctgataaacaaaagttaaattttaaaaaataaactgtgggaggattttttattatttacttgagtttttcattttcaaatattatttaaatgactgaaatggtaagaaaaacagtctcaatgaaggtttaaaacagtacacaggactgactgattaaataaactatccttcatccacacaatggaatatggagcagctgtaattaggaatgagaagtgtctctatatactgatatggggaaaaataaataagcaaaggaaagaagcaaacagtaatatttatcattggtaatttttaggtaagtgatggggaagtagatgacagagaggtagctagatagtagagcattagtcagctgggactaccacaacaaaacaccatacactgggtaacctaaacaacaagaatttatttctcacactccaggaagctgaaagtccaagatcaagctgccagtggattctgttcctggatgagggctctctccctggcttgcagacagctcactgtgccctcgcatggtgaagagagagaacaagcaggctctctggtgtcccttcttataaggacactaatcccaacatgagggccccacccttatgacctcatctaaccccaatcacctcctgaaggccccacctcctaataccatcacactggggcttagcacctcaacatatcaattttggggaaatacaattcagttcacagtgcatagatagatattaattgatattatcaaaagaaaccatgggcagataaacccaaaaccaaactgttttaatggttatctattgggaagaaaaagaaacagggtgaacgggaagttacagaagcaagatttctgtgactgtaactggataaatagagagtttgggaggacgataagtgttttatgtgatttttaaaaattaaagtaaactgaaatgaatgagtcttcctgcatataaagtgtgtggcataaccacataaagcaaacaattacttaaagtggctttaaaacgcagcattttgactatacatcccaagtgagagatatgctatggacaataaaaaaaaggaaaagaaaaaaggaaagaaatcataaatggcattcagtagccatatattagtattgacatttttattaaattactatgtttccatcattaggaaccataattttcagtataaaaatgacatagcataaaatcaaggaagtttaagtaaaaatcttgtaatcttaaaagtgaattggaaattgcagtatgaactcacattgtgttttactctttaaaaaatacatattttctagttctgtccactgaaaagacccagaagcaatgaaaacccagtaacaatgagcacacttccacggctgaactctctagataacatttaccaatgaaattggctgattctaagtctagggcaaaaaatgtacaaaaggagactggatacaagtctcttattgtaccagaaagtgaaggagaaatcaaagactaatgaggtcacgttaaagtgatacaggacgacacagggcctgcctgcagcagctggtcaataatgaagggattaatccatgactgcaagactcgtgggaaggagggagtggggactgcagggagggtcctagtaaaagcagggtgggcctcgatgagcacagcatggacagtgcgatttaaatcccatcgcttgtgggcaggaggagtgaggatgccagaacctagttatcccccaccatcccacgctctcccaggaggcggcggcaggaagtgcagtctacagtaagggaaagccgccggagctggagacaggctggaaagagcaggtaacagcccacaaggagcgggggccctggctgtcagactcaacttgcaggaccatcaagtgcaggtgtggttcaagaaccggggccgcttgctctgcggtagcaacggcacataaccgcagcgatgaccagggcagccaagccagcagccgggaccccgggatgctcttggcacatgatccgactcccctgcctttgcgggtcctgtactcccgcgaggtccaggattgtgcagcccctccccaaccggccgttgggaatcttcgcagcagcagaacccgctgcctccaggtccgaccagacctgcataggtagagagtccccgcacagggcggccagcagagctacccagctgccccagggcctcgggacccctgggcctgggacccaggccagaccctgactcattcggtgatctcacaggactcctcccaccccaagaccctttcaggg

SEQ ID NO: 24441 - DNA, 2300 bp, Homo sapien
aggtggccatgcaggacctttaaagggacagagagaggaagggctcagaggagggtgtggggtggctaagggggcaggtcctgggcttctggactgtccttgtctccaccccgcctgcccccagcgggccctccaggtgtctgcagggccctaggtgctggctggccaggtgggggtgttctcatagccggggatcctgcagctccccgttttctgctgccgccctgctctgctgctgactaggatagcagggctaaggacatggtgggagcctgtcccaaacagcacttcccccggcctggacatggtgccagtgccttctgtgtattcgttcactgagtccccacaacacccctgtgaagcaggcgctgtcatcacctgatgcatgaggaagcccagcgtcatgggtgtgtgacctgcctgaggtcccccacctggtgggcaggggtgtggcctctgccccatcctggtgccacgctggcttcctctgggatacactcgtctgagctgggctccctgtgggcagccctgtgccctgggaggtggagagaggggcctgcgggaagggagaggtgggcagggggaggctggggcccggctgtctctcaacgactgtttgcttccccagtcttctcaccaggccagtgggagccagcccctcccacagttggccagtgggcagcctggggcctcttctcttcttcgctctccttcctcctctcccctcacttctctatctcttctctctccacacagcgtttctggaccgcctgcctcagtgtccctctcgggggtggcctggggtcttggtgtctatgttggggggctgggagggcagtgactcttcatttgctgcgtcctgctcagtggcctgggtgggactgtggcctgaggtgtgactaaccgtggctttgtctctgtctgtctcccccaaaccccgtgctctgctgtgccttcccgcgcggcccctcacccgccgccgacccacagctccggaaaggcccaccagtccctccgcctcccaaacacaccccgtccaaggaagtcaagcaggagcagatcctcagcctgtttgaggacacgtttgtccctgagatcagcgtgaccaccccctcccaggtcagccgcggccgccgcggcccagctctcctctcttcctgccctctcagggcgtgcatggccttcatcctctatgcttctgtctcaagagccaggaatctggccagagagagtgtcagtttccctctctcaccctttgttccctccatccatcatcctccatcatcctccatcacccatctctgagcatgtactaaggccagatgcagggccacagaggggaaggtgccgcctctcccggcgcagcagttacatcagcagcgccctcgcgacgcagtgggtgctatggcagaggggatcggggagtgtggaggacgtgtggctgtcagggaaggcttccagggccagggagagttggaaggtcctggaatggctgaagcacctggacttcagctcccacagctgctgtcagcccctcgagggcgggggcagcggccaggctgcagggcagaactgccgtgtgcacactccctaagaggcgtggaatgcccagatacagcagggagccacccaggggggcttgggtctctcccgacgggcccttggctcagcaaggagccacgcagagggtcttgggtctctcccagtgggctcttggctcagccgtggaggtgcctctggggagcctggcccacagccccaggtcttacgtccttcatggtggaggtcgggctggagtacctgtgctggaagcgcatcttgccagtgctggagtgggctgacgtgttgtcagatttgcccagaggtggccggccttccccgcactccccgagagctgactgcctcctcaagtccagccctcaaggcctcagccttcctcctgtgggtaggccaggacccttcccacacagagcctcgcctgtagggaaggctgtccagtccaggctgtggtggcctccagcaaacaccttcacacagctcagacgcctagtggggataggttggagggtgtgagtgtggggagtggccgctgggaactgcgaacagtggtcgctgctaggaagggttggggatggtgggcctcaagcccctatgcaaagactaggactagaactaaggaactgaggctgcaggtgtctgggtgggtgacgccctagttcaggggcctggcaggcgcgggagcccctctctgtgggatagtggcagagggcgatgtaggaagagcagtgtgggggcagggc

SEQ ID NO: 24442 - DNA, 2300 bp, Homo sapien
tcatgagctgaaagcatgttgagcttttaggaggaagctgctttagaagcccagactgtgtaggttttgcttttgtgactcacaaatcgggcatgagtttataataattttgacagatgcttttcactcatgcagcgcttggtgcttttgagggcattggtgcaggaaggcttgatgcagaatctctgcttatcatttgctgtctgtgtgacctacatcagcggcgcctcagtctgtcttcctgcagaataagaatacagtcagccctctgcatctgtgggttgggcatccatggatccaaccaactgtggactgaaaatatttggaaaaatacaataaaaagtaagactacaacaataaaataatataaataaaaaacaaggccgggcacggtggctcacacctataatcccagcactttgggaggccaaggcgggaggatcacgaggtcaggagatggagaccatcttggccaacatggtgaaactccgtctctactaaaaatacaaaaattagctgggcatggtggcacgtgcctgtagtcccagctgctcggggggctgaggcaggagaatcacttgaacccgggaggcagaggttgcagtgagcccagattgcgccactgcaccccagactggcgacagagtgagactctgtctaaaaataaataaataaataaataaaaaatacagcgttaacaactatttacatagtatttaaattgtattagctattacaagaatctagagataatttaaagtattttggaggatttgtgtacgctatatgcagatactgtgtcaattcatatgagggacttgagcatccctggattttggtatccacggatgtgctggaaccagtcccctgggggataccgagggacatcatgataataggcccggaagaggacagacgaacacactgggccatggggcagcactgagcggtggtggaagaaccccgagtagccggagaaagagcaggagggccttccagggaagagggaatggcctgtgtgaacccaggctgaacctctcattcctgggactcgatttctccatttgtacaaactgcttggtttgtggtctgcaagagcccttcctgttcctccaggaagcctctcagggacctctgtccctggccagctctgctcctctgaccgctgcgggtcctgcaggccatagccctggctcctgtgtgtgcaccagacacgtctaggcctcttcagcgggacctatctctctgctcaactcaatcaacagttctttagaaatttccaggggcagcaaagtgctgtagcccctgacatgttttagggctgaatgggggtgggtatcagcagactcaatacgtatttattaacttaaaagaagtgtcattggtctattggcaaagctggttagcaataaccttatcttctccaggaataatgatcactaatcattccttcctgctgggggtaggagacaacccggcgtatggtggtggagcacctgggagacagaggcagagatctcgttcctcgatcccggcgcgttggttgtaaagtaggaacagtaatagcacctacctctagggccacggagaccgaatgaaataatgcctgtcaagtcacttagtacacagtaagcactcagtaatgctaggttgttgttattataataaatttttagcgaacgggaagaccaagcaccggttggtactgggctaggcgccgtaggcaaagatgtggagatgtcccggaggcgcctagggtatccgggcgaaaacccgagggccgaaggctgggaggaggcggagcgtcgggcaccgggcaccgggcaccgggcgggaggtgagcccctggaaaaggagggggctccgggcgcgttctcccagcagccgcggctcctctgttcagggccgcgcccccttcgccgcactttctctttgatttcgaaagcactcctctcctccacctagtctcctttcctgggttgcaggagattactgcttgcggggaagaccaagacgccaggccggcggattagtccccgccccggggcggtgcagctggagcgtcaggggagtcccgctcgccgcagccccagcgccgcgcgcgcccctccctcctcgcggacctggcggtgccggcgcccggagtggccctttaaaaggcagcttattgtccggagggggcgggcggggggcgccgaccgcggcctgaggcccggcccctcccctctccctccctctgtccccgcgtcgctcgctggctagctcgctggctcgctcgcccgtccggcgcacgctccgcc

SEQ ID NO: 24443 - DNA, 2300 bp, Homo sapien
cagtccatgaacatgggatatcttgccatttatttcatgtcttgccatttatttcaggcttctttaaacaatgttttgtagatttctttaaacaatgttttgtagatttctttagacaatgttttatagttttcagagtataggttttacacttctcctgttaaatttatttctaagaatattattatttttttttttgtgacagagtcttgctctgtcacccaggcctgagtgtggtggtacaatcttcactcactgcaacctccacctcctgagctcacgtgatcctcccacctcagcctcctgagtagctgggactacaggctcacactgccatgcctcgctaatttttgtatatatatgtattttttgagatagaatttcactcttgttgcccagggtggagtgcaatggcgcagtcttgcggctcactgcaacctctgcctcctgggttcaagcgattctactgcctcagcctccgagtagctgggattacaggtgcacaccaccatgcctggataatttttgtgtttttagtagaaatggggtttcaccatgttggctaggctggtctcaaactcttgaacccaggtgatcccctcgccttggcctcccaaagtgcagagagtacaggcatgagcctttgcacccagccatgtattttttttagagacagaattttgccatgttgcccaaccttatcttgaactcctgtgctctagcgatccacccacctaagcctcccaaaagtgctgggattacagacaggcatgagccactgcagctggtcaagtattgtattctttttgatgtattgtaaattgaattgttttttaaatttcattttggattgttcactgctagtgtatagaaatacaattgatttttgtatactgattttgtgtcctattgaacttgtttattagttctaatagttttttagtaggttccgtaggattttctgtatgtgagatcacgtcatctgccaatagagatagcctgacttcttcatttccaatccagatgtcttttccttcattttcttgctgggagtcagttttagaggctcgttacagactgtccacagagggcttgctctgcagagttggcttggtactgcttgggtagagctgttgggcccatggaaaggggctggcagacagggctctgtttgctctggacatttgtctcttataatgacatttctctcttgttgcttcacacagctaaggtagttttaaaaacatatccctaaagaataagaaaacttccatgatcatgcctgtaatcccagcactttgggaggctgaggcaggaggatcacttgaggccaagagttcgagaccagcctggcaacattgagagacccctgtttctacaaaaaataaaaaattagctgggagtggaggtgtgcacctgcagtcctagctacttgggaggctgaggtgggaggattgcctgggcccaggagttggaggctgcggtgagctatgtttatgccactgcactccagcctgggcaacagagcaagaccctgtctctaaaaaacaaacaaacaaacaaacaaacaaacaaacggaaacaacaaaaaagagatggttatgtgaaaacatgtttatctcagcaatatgtaaattactgctctgattcagtgctgtgttagatagcacttccctctgccccaattttctgctcctctagcacacaggatgtttatgttaaaggtatatcatatctatgtattttttccttttttgatttctccatggtattgcagcagaagcacacacgggaatatggaaaaatcttcaagtctcactttggtcctcagtttgtagtatctattgcagaccgcgatatggtggctcaggtgctccgggcggagggcgctgcgccccagagagccaacatggagtcctggcgggagtaccgagacttgcgggggagagccaccgggctcatctcggcgtgagtatgtgggcccgggctgagccacgggctggagggggagctcagggggaggccccctcctccaaagctgagttcctaaaagccagctcttaaaaaagcacagaacccccccatggaatgatatcagacagtctccttgtgcgatctcccagacatgagagccctgctgggctttctggctcctcctccgtgcagagttgtcccgtcaggagccaggaggggcgacgctggctccgtggtgggcagagcgcttcggaagcagggctttgtggctttgggagtccattcagtgataaccgaggcagacaaaactcacagcgcccttgtct

SEQ ID NO: 24444 - DNA, 2300 bp, Homo sapien
ggagatggcttgagcccagaagttggaaggtgtagtgcccagaagttggaaggtgtagtgcccagtgatagtgcctgtgtatagccactgcactccagcctgggcaacactgccagacccctctctgctctttttttttttttttttgacggagtctcgctctgtcgcccaggctgcagtgcagtggcaagatctcggctcactgcaagctccacctcccgggttcacgccattctcctgcctcagcctcccgagtagctgggactacaggcgcccaccaccacgccaggctaatttttttgtacttttagtagagacggggtttcaccgtgttagccaggatggtctcgatctcctgacctcgtgatccgcctgcctcggcctcccaaagtgctgggattacaggcgtgagccaccgcgcccggcctgctcttttttgttgttgttgttgagatggagtcttgctgtcacccaggctggagtgcaatggcgagatcagctcactgcaacctccacttcctgggttcaaacgattctcctgccttagcctcccgagtagctgggattacaggcgcgtgccaccacgcctggctaattttttatatttttagtagagatggggtttcaccatgttggccaggctggtctcgaactcctgaactcaagtaatccgtccacctcggcctctcaaagttctgggactacaggcctgaacctccctctctgctcttaaaaaataaatgttggccgggcgcggcagcattttttttttttcaagattacagcgtcagtaatcccagctactcgggaggctgaggtaagaggatcgctaggaccctgggggcggaggttgctgagccgaaatcgcgccattacactccagctttggtgacagagcgagactgtctcaaaaaaaaaaaaaaaaaaaaaaaaaatgcttagtaacaatacgttgtaaacggaaaaaaatcttattttttacgtttagatgcatgagtaccaacggtatgaaatcttcaaataatgtaactcagcgagcagtttaactactgactaggaaaaagttcccttccttgaaaccacatggcacacctctggcctttcccgtgctccatccctccctgtgcggccacttctttgtgcagccaggcactgggctctgagtctaggttggcggactcctctcctcgcctcggcatggaggtggcttctcttccccaagccttgtgcaacaggacccgtccttgtgagggaccagataaacgccccatgctcaaagtcgctcaccctcacctagtcctcactgcttccaatggtgtgcggaataaaagcgatgagcccgaggaaagccatcgtaaacgactgtgattgtctttaagaaagcttgtggcaagataataatgtggtcattttacaacagtaggaactacatgcaaaatcgtctcacttttttccccccctttgaaagttgagttacaataatttaagttgaaaccataaagaactgcttctaaaatgcaaaaaagaccaaagatttcttcagtataccttcagtagtcatttcgaaggacggtaataatttacaagatccccgtagacttttctttttttggccatggttggaagtggggttgaccttaaaacttggtggtttcaaggaacgcttaagtgtgaattaatatgatgtgaagaaataataatagcctcattctcttgcagtctaatcacagccttttccccagccccaggggagggagcctttaataagggtctgtgtaaactgacgccccggcggcaggagtacggagaagcactgctctgacaagttaagacgcaggaaacagcaacccaaagagcagcccccgaaacaaagttgctcagacaaacaagccgatgcagacgagcgccatggccctgctggcgcggatcctgagagccgggctgcggccggcgcccgagcggggtgggctcctgggcggcggggccccgcggcggcctcaacccgcgggcgcacggctcccggcgggggcgcgggccgaggacaaaggcgccgggcggccggggtcgccgccgggagggggccgagccgagggtccccggagcctcgccgccatgccggggccgaggaccctcgccaacctggcggagttcttctgcagggacggcttcagccgcatccacgagatccaggtagcgcgcgccgccccgggagggagccagcccgggctgctgcccagaaggctgacggcgcgggcgggagggcgccagggaggggcgcggggttggggagtcccagggag

SEQ ID NO: 24445 - DNA, 2300 bp, Homo sapien
aggaggctgaggcaggagaattgcgtgaacccaggaggcagaggctgcagtgagccgagatcgcacctctgcactccagcctgggtgacagagcgagactccgtctcaaaaaaaaagataaataagattgatggactgctagttagattaacagaaaagagaagatccaaataagcagaatcagaaatgacaaaggtgacatcacagctgatccccagaaatacaaaagattctcagagacttaaaaatacctctgtgcacacaaactagtaaatctagaggaaatagataaattcctggaaacatacaacttcccaagattgaatcagaaattaattgaaaccctgaacagatcaataaggagaaattgaatcagtaatttaaaaaaaaaatatggccccaggcatggtggctcacacctctaatcccagcactttggaaggctgaggcaggtggatcacctgaggtcaggagttccagaccagcctgaccaacatggtgaaacctcgtctctactaaaaatacaaaactaggtgggcttggtggcgtgtgcctgtaattccatccacgtggaaggctgaggcaggagaattgcttaaaccctggaggtggaggttgcagtgagctgagatcgtgccactgcactccagcctgggtgacagagtgagactccgcctccaaaaaaaaaaaaaaaaatctaccaactaaaaaagtcctggaccagatgtattcagttctactgaaactattcaaaaaaattgaggaggagagacttcttcctaactcatactacgaaaccactatcatcctgataccaaaatctggcaaagacacgatgaaaaaactacaggctagtattcctgatgaacacagacgcaaaaatctgtaacaaaatgaggacaaagcaaatccagcagcatatcaaaaagttaattcaccacaatcaaataggctttacttctgggatgcaaagttggttcaacatgtggaaatcaataaatatgattcaccacataattaaaaatgaaaagcatataattatcctaatagacacagaaaaaggttttttgtttttttgaggcagagtcttgctcttgttgcccaggctggagtgcaatggtgcaatcttggctcactgcaacctctgcttcccagattcaaactattctcctgcctcagcctcccaagtagctgggactacaggcacgcaccaccatgcccagctaatttttttgtatttttagtagagacagggtttcgccatgttggcagtgctggtcttgaaggcctgacctcaggtgatccacccaccttggcctcccaaagtgctgggattataggtgtgagccactgcgcccagcccagaaagagcttttgataaaattcaacattccttcatgataaaaaccctcaacaaatggcatcgaaggaacatatctcacaataataaaagccatctatgacaaactcacagccaacatcatactaagtaagcaaaagctggaagcattccctttaagaactggaacaagacagccgggcacggtggctcttgcctgtaatccgagcactttgggaggccgaggtgggcggatcacaacaaggtcaggagatctaggtcattctggctaacatggtgaaaccccatccctactaaaagtacaaaaaattagccgggcgtggtggcaggcacctgtagtcccagctacttgggaggctgaagcaggagaatggcatgaacctgggaggcggagcttgcagtgagccgagatcacgccactgcactccagcctgggcgacagagcgagactccgtcccccagaaaaaaaaaaaaaaaagaactggaacaagacaaagagcccaccctcaccacacctattccacatagtactgaaagttctactcagaccagtctagcaagataaagaaataaaaggcatccagataggaaaaaaggaagttaaattatctgtcttccctaatgatgtgattctatacctagaaaaccctaaagactccaccaaaaggctcctagacctgataggcaacttgagtaaagtttcggaattcaaaatcaatgtacaaaaatcagtagcatttctatacaccagtaacattcaagctgagagccaaatcaagaacacaatccaatttataatagctgtaaaaacaaaagacaaaacctaggaataactacagaacactcctgaaataaatcataggtgacagaaacaaatggaaaaacattctgtgcttgaggattggaagaagcaatatcattaaaattgccaaactgccca

SEQ ID NO: 24446 - DNA, 2300 bp, Homo sapien
gagactccgtctcaaaaaaaaaaaaaaaaaaaagaaaaaaattttttttgagacgaactctcggcctgtcgcccaggctgtagtgcagtggtgcaatctcagctcagtgcagcctttaccttctgggttcaagagattctcccatctcagcctcccaagtagcttagactacaggcgtgtgccaccatgcctggctacttttttttgtatttttcgcagagatggggtttcaccatgttggccaggctggcctcgaactcctgacctcaagtgatccacccacctcagcctcccaaagtgctggaattacaggcgtgagccaccgtgctcagccaaattttttttaattaaaaaaaagaattcttccttacccatggactcaggtcacattctctctctctctctctcacacacacatttattgcccacatggcttcattaaaatttaagttccagaaggatgaggcctttaattcgcgcactacacaggtgctcaacacacagtattttccttcagttgtagagaaatgaacagtggaggacccccgccgctgggtcgcacgagctaacagatcggcggtcgctggctctccgctcttccagccacccacatcacggcgcctagaggcgggacatcctgtgtggacaacagggagcttccggattgagccggaagtccccccagagcggatgccgcggcgggcctgtgggagcggggtcatcttctctctgctgctgtagctgccatgggcaaaagagaccgagcggaccgcggtgagacgttgcgcgggcacgctcagccacgactgcccttgccggccctgccccccgctctgcctcggagctgctccgggcctctgcgccggccgaccctgctggccctcccgcgcgcaccccgttgggacaggcctttgggcgggagagatgctggacctgggcgcagcccagcgaactcggcctaggggagacgggtgaggggcgcaacgcctgcgggatgcaggtggctcttagctaggagtttgcggcggcgcaggtgaaatgctgccaagcggtgcggagggaaccctgaaggctcctgctgggcttacttctgtgttggtatcttgcagacaagaagaaatccaggaagcggcactatgaggatgaagaggatgatgaagaggacgccccggggaacgaccctcaggaagcggttccctcggcggcggggaagcaggtggatgagtcaggcaccaaagtggatgaatatggagccaaggactacaggctgcaaatgccgctgaaggacgaccacacctccaggcccctctgggtggtaagcatgcccttagcttgggcagggcccaggagtgtgcggagcggcagctaaatcttgggcatcctcagagtcaaaactgacattcaggatactgcccctagaactggccgggagagaattttcatccacacacgttggaacagcccaaggcaacagcgagcagttgcgcacacgtgtggcggccggacctgggcttccaacagctctaacccctcggtttactctcactccttccccagccctaccccatgtagtgaatccttttatctgccgaataaatagcatttatcatgtaacagtttgtttcctcaaataatggaagacatgttcggtagcaagcttttgctctactttaaataattaatgttatacatttagttgaaatctagccaaaaggtaacttgaggatagccagtaagatgggctttctctgtgcagaatagtaggaaacagctgttgactttggaaacactttcttctatttttctttactcttctgtatctgattaatgtaacaggccccacagttgtctgaaggagtgcttgcaagaatatctgtggtgttgggcagcttattctttcttgataatgatatgggcaagagcccagtagtctctgcaactcatgtttccttgtctgttttgtccatttggtatctctcaggctcccgatggccatatcttcttggaagccttctctccagtttacaaatatgcccaagacttcttggtggctattgcagagccagtgtgccgaccaacccatgtgcatgagtacaaactaactgcctactccttgtatgcagctgtcagcgttgggctgcaaaccagtgacatcaccgagtacctcaggaagctcagcaagactggagtccctgatggaattatgcagtttattaaggcaagtgacagctgagaccagcaattccacctgccctgctaatgtaacaataggcataggtgctccatgttgtcagcctgtg

SEQ ID NO: 24447 - DNA, 2300 bp, Homo sapien
gggttcaaacccaagcctgtccctttcagtcctgtggtggcggaagcagcctcactggcctctgaactgcccctgccaatccctttcctacctgtggaatcctgggagtccaacagccttccttcatttcatcccatctatgtaccctagtcaaaactgtccaggtttctgtggagatgggtgattgggtctataagccacacacctaatctcttgcaaataaatggttgtccacatccttagtgtttctccagagcatactttctctctctcttttttttttttttttttttttttttttttttttttacaatgtgagtataagaatgatccaaatcttcaagttctggttcctttttgttgaataattccaccttcagtgtatctcttctcacatttcactataagcaataaggagaaagcaggcctcagttttttttttttttttttttgagacggagtcttgctctgttgcccaggctggagtgcagtggcgtgatctctgctcactgcaacttctgcctcctgagttcaagagatcctcctgcctcagcctcctgagcagctgagactacaggcgcgcgacaccacgcccagctaatttttgtatttttagtagagacggggattcaccatattggccaggctggtattgaactcctgaccttatgatcccctgcctcggcctcccaaagtgctgggattacaggcgtgagccaccgcgcctggcccaggcctcactttgaaccatcatgtagaaatttcctcagcaaaatgtccaagcttatcacttataagttctactttccacccaacagaatacaattcaggcaagctctctaccacttgcctccagtttcaataacatatttctcctttccatctgagccgtcaccagaatcacctttaatgcccatacttctaccaaggctcttcaagacaatagaggcttttctatcatgcgcctcaaaattctttcagcctctaccgattacccaatttgaaaaccacttccccattgttaggtatttgttacagcagtaccctattccccgtaccaaaaatctgtgttacgttctccagagaaacagaaccaagaggcccactgagcaagcgagattgattgattgattttaaagaattggctcatgcaattgtgggggttggcaagttgggaattcaggtacgagttgatgttgtagttttgagtccaaaggctggaaactcagtcagaactttctgtgttgcagtctggaggcagaattcctttttccttgagaaacctgtctttgctcttaaggccttcaactgatttggatgaggcccacccgcattattgagggtaatctgctttatttaggctgagacatgagaatggcatgaacccgggaggcggagcttgcagtgagctgaaatcgcgccactgcattccagcctgggcgacagggcgagactccgtctcaaaaaaaaaaaaaaaaaaaagaaaaaaattttttttgagacgaactctcggcctgtcgcccaggctgtagtgcagtggtgcaatctcagctcagtgcagcctttaccttctgggttcaagagattctcccatctcagcctcccaagtagcttagactacaggcgtgtgccaccatgcctggctacttttttttgtatttttcgcagagatggggtttcaccatgttggccaggctggcctcgaactcctgacctcaagtgatccacccacctcagcctcccaaagtgctggaattacaggcgtgagccaccgtgctcagccaaattttttttaattaaaaaaaagaattcttccttacccatggactcaggtcacattctctctctctctctctcacacacacatttattgcccacatggcttcattaaaatttaagttccagaaggatgaggcctttaattcgcgcactacacaggtgctcaacacacagtattttccttcagttgtagagaaatgaacagtggaggacccccgccgctgggtcgcacgagctaacagatcggcggtcgctggctctccgctcttccagccacccacatcacggcgcctagaggcgggacatcctgtgtggacaacagggagcttccggattgagccggaagtccccccagagcggatgccgcggcgggcctgtgggagcggggtcatcttctctctgctgctgtagctgccatgggcaaaagagaccgagcggaccgcggtgagacgttgcgcgggcacgctcagccacgactgcccttgccggccctgccccccgctctgcctcggagctgctcc

SEQ ID NO: 24448 - DNA, 2300 bp, Homo sapien
cacaggggccgtgctaatcttctctgtatcgttctaattttagtatatgtgctgccgaaatgagcatgcggattttaatttgtttctttatcccttttttactataaactccaagttagatctgaggtctaaattagattcacattcagccttttttatctgatacgtcatagatgaagctgtgtactttatgttgcatcctatcaggagccaatttctggttattccactgtagcaatgcaaagagctaccattagatgaggatgattgacatattgagtcctgcattgtaaagttttgttttttcctgcacaccagaaagtaatatgaggtatagcagtggcacataggaatagcctgttccttttcagccatccacctaatgtttttagcactgattgatagtcatcactagagtctataatttcattaggagttataaaatgtgatttgtgacatctgtcattatatagagtacatctagtattaatgattttcaaggtggtgattaatatgtttacttatttaaaaatacatgcatttccataatttttatttgtttaattttgagatggagtttcgctcttgttgcccaggctgagcaatggcacgatctcagctcactgcaacctccgtctcctgggttcaagcaattctcctgcctcagcctcccgtgtagctgggattacaggtgcatgccaccacacccagctaattcttgtatttttagtagagacgaggtttcaccatgttggccaggctggtctcaaactcctgacctcaggtgatcccgcctgcctcgacctcccaatgtcgtgggattgcaggcatgagccattgctcctggctacaatttttattttttgagaaggagtcttgttttgttgcctagactggagtgcagtggtgcgatctcggctcactgcaacttccacctcctgaattaaatcaattctcctgcctcagcctcctgagtagctaggttacaggcacctgccaccatgcccagctaattttttatatttttagtagagacggggttggctaggctggtctcgaactcctgacctcaggtgatctgcccgcctcagcctcccaaagtgatggtattacaagcgtgagccaccacgcccagccgatgcctggctaattcttgtatttttagtagagatggggtttcaccctgttggccaggctggtcttgaactcctgacctcaggtgatctgccttcctcactcagcctcccaaagtgctgggattacaggtgtgagccactgtgcctggcctattctgtataatactacaagtagagacacagtagactgaacaaacaagccgtgctgaactgtaggtgtgagtagttgactggccacacttgccgctttccatatgtgtgtttgcaaatttgggtccacagaattgcaaaatgctctccctccaaggatggctcataaacagtggaaaggacaaatggttaaatctgtaaaatccaaggatttactttcatatgacagagtacaccgtttaccaaaattcaaggaaaagcagaaacatttggatgtattttcctgtcaaaaaagagatttgtccctcaggaagcattttatttctgtcttttaaagggattattaatcaaacttatacattggaatcactagggaagttttcaaaattcaaatacctattcctcacttcagactgattcagctttctcagagatggcaccttatcctgccctaaaaaacacttaagaaaatctattctccttttgtgtatgttctcatgtttcgaacttgagtgttgagtatataaagaaaaaaactttaaaatctctgtgttctttctagttacacccattcctttttctgagaaaatcagcagatgtcaataaaatactttaaaaacagaataagaacaaaataagtaaaattcaagtaggacatgcttagacgagtgagatgagaattcctgccctctttactgataaagatttaatagcagttttcatttcaaaccatatacagtagtttttatttttgttttcttttctcctagggttcaattaaggaccaattaaaagcatatggcgctcttactgagaatgtgactaggaaatacacccgtcagattctggagggtgtccattatttgcacagtaatatgattgtccatagagatatcaaaggtaagtaatgaggtattttctattttaagtacacagttcttagtgaatgtgaatgaaacaagtgatgtgggtaagacatttaacattaattcatctgtctctgaaatactacag

SEQ ID NO: 24449 - DNA, 2300 bp, Homo sapien
ggaatctaaaaaagattggtaacagaagaggattgttgataatcaaagaaaaaattgaattggcatgtggaccatcaaaaaaatagacattattcatgttctcttttggtccccagaagaagctattttatgaccattctcttcgaagtgtctgtcttaaataagtcctactttgggtttcaggaatgcagaaatgcgagcagcagaggtgatacacaagcaaaatacaaatggcttgtcttttgcattcagatatatttcgatatagttttaaaatttggtgaaagaacatttgaaacacccaaattcaaattccagctctctgatgaacctgagaccagtaaatgtgtcttcatctttaaatcatgggattgttgtagcattaaattgagagaacacttgtacattttacttttcaaactagaaagcttattgtacatttatacattttgtacattgtacaaagctcagatgttcattgtacatttctttctttatccccatttcttatcacattacggtacttgtcattttttaaaaaattgctaattcactttattttatttattttttgagacagagtctcactccgtcacccaggctggagtacagtggcgcggtctcagctaactgtaaccgctgcctcctgggttcaagtgattctcctgcctcagcctcctgaataactgagattacaggcgcccgccaccatgcctggctaatttttatatttttagtagagatggggtttcagcctgttagccagattggtctcgaactcctgacctcatgtgatccacccaccttggcctcccagagtgctgggattacaggcgtgagccacagtgcccagctctaattcactttagttgcattagacaaaacaagctaaatgtactagttaaattgacattttaaatatattttgaattaaaattacactgaatacctcagtcttattctaataaatattcttgtttgacgtcagtgccagcataagaagaaattggaaatcataaagtatagaattagtggtcttttattggcactgctttaaacttggaatggctttgctagatatgaccattatctatttttcttatatgttggcagttattctttttaattgtttttataaaagggagatggaggaaaaactcctttaggttaggagtgtatgctgataaacaggtctcaaccaagagtgcgttggcatacgcattactgtgaaaaagggttgtcaaataaggagacaaaattttcatagcttttttttttttttggtcctatctccttttagtaattgactatattgatcttttgtaagcacgggtatatggaaggaataaaaatattagggaccagtattattgtggctacagttgttatgaagcctaaatcaatcctgactcaaattgagctcctaatcattttacagacaagtgtagacagtactctcttttatgcacatgtcttggtaataattttgctttctttttcctccctgtctcactaacaaatgcttgcatatactcacaatgactcctttacataaggctaaaatgttttttgctttaaattggaccagaacttaaatgctcacatagtttaatttcaaaaaactatgaggaaaggtgagacactgtactaataaatatagcatcatttccacagaaccaagtaaaatagagtgggttattgtctcataagaaatgtgattacttaaataaactgtcttaatgccagaaatctatattgtattatcatcctatcagcagtcagaataccatcctacctagtgagtataaatgaatattatggtgaggttaataattatgatagggtgggaatttacaaaggttataaagccatttgaagatttacaaatgaatgttctgataagttttaataaaaattgaattttcttttgctgaaattattaatgatataattcagaaatatagcctatttaaaacaaaacttgattcccttgcctataattataaattacattatttttcttccttgaggtcctactagtagagatagaagttctcctcccccaggttacattccagatgaattacaccaggttgcccggaatgggtcattcactagtatcaacagtgaaggagagttcattccagagagcatggaccaagtaagcaaaagtttgattttttaaatttaatttaaagagatgttgtcagggtcagtgtgatttggcacgtaactgggtgtgtgtgtgtattatctcttctctaattacatatcttcttaactgaacaaaatagaaaaaa

SEQ ID NO: 24450 - DNA, 2300 bp, Homo sapien
atattctgctgttttgaggttgattattctgtaggtgtttgttaagcctagtagtttatagtgttgtacaagtcttgtatttcctcattgattttctgtctacttattttatccgttattgaacgcagggcattgaaatctccaacttttatttttgaattgtgtttcttccttgaattttatacttttttgcattgtgtattttgcgattctgttgttaggtacatataagtttataattgctatatctttttgatgtattggctatctttcattataaaatgctgtttgtcacaacaatttttgtgtctgttttgcctgatagtggtgtagccactgcaggtctgttttgactactgtttgcatagtatatctttttctatccttttactgtcaacctattttgtcttcgaatttaaaatgtggaccaggtgttgtggttcgtagtcccagcacttagggaggccaaactgggaggatcactttagcccaggagcttgagaccagtctgggtaatctgtacaaaatctttttttaaaaatcagctgggtgtgatagcatgcacctgtagtcccatctactcgggggtgctgaggtgggaggattgcttgagcctggcagatcaaggctgcagtgagctgtgatcatgccagtgcacctcagcctgggaaagagagcaagaccctcctcctgtcccccaaaaaaagtgtctgttgtaggcaacatattcaggtcaaaatgtttgggaccagaagttttttggatttttttcatgttttgtaatatttgcatatacatagtgaggtatcttgggaaagggacccaagtctaaacatgaaattcttttatgtttcatatacatcttattcatatagctaaaggtaattttatacaattttttaaatgttttcgagacagggtcttgctctgtcacacaggctggagtacaatcatagttcactgcagcgttgacctccctggctcaagcagtcttcccactttagccttccagttagctgggactacaggcatgcaccactacacctggcattttgttttttaaatcttttttttttttttttttggtggaaatgggagtctccctatgttgcccaggctggtctcaaactcctgggctcacgtgatcctcccaccttggcccccccaaattgctagtattataagtgtgagccactgtactagccaacaatttttaaaataattttgtgtctgaaacaaagtttctattattacccttgtaggcctcttgcatgggggaatttgggcatgcatggaaaagatatattacagtggaaggggctggtagggtctcttttctcctgggggatgctgaataaactgagttgtgcatctgccttttgactgtgacatatcacatgaggacaggtttgtggaattttccattcatagtgtcatgttggcactcatatttttcatcttattttctagttgacctggggattacagttaacatcttataataacatagtttgaggtaatatcaacttaattgcaatggtatacaaacacttttttttttcttctaggcagtctcgctgtgtcgcccagactggagtgccacagctcactgcaacctcaacctcccaggctcaagtgatcctcccacctcaagcctcccaagtagctgggagctacaggcatgcactactgcacccggctaatttttgtatttttttgtatagatggggtttcaccgtgttggacaggctggtctcgaactcctgggctcaagcaatccgcctgcctaggcctcccaaagtgctgggattatggcatgagccactgcacttggtcataaacacctttcttttatgtaactctatcctttccctttcctgtgtgctgttaatattatgtgaattatattattatatattgtatacccagcaacacagttataattattgcgttatgcagttttttttttaaaccaacatattagtttcctattgctgtttatatagaaaaagagttaatgtagtgggcctgattgctgatttgtagaaggcctgcttaggagttagcctttggctgacacctgagaacttggatttcaggagagttcctgcctccaactgataatggtttgtacaaacactatggtttatgctgaatacctgcttttcttctgggagtctggaattttggtatgtgttaggcaagggggtgcctacatgatcaaccttcaatataaaacacctccccctagcgaaatgtgtaaagtattcatattgtatatttttcattagtattattta

SEQ ID NO: 24451 - DNA, 2300 bp, Homo sapien
ccctaagtgctacctaaatattccgtaaagagaaaagggggaaacaaccttacatcaaaagattaccacactgtgacagtgcaaagacaagcactttttcgcttactgcatgtaccatttctgcttcatcccaagaccagatgcaacctttcttctaaaatctctgcagggtacgtgtctgacagctaacacagcccagcagcctacttcgcgctgacctgggctttaggactggatgcagggggcccaaggtccgccctcccgcagctaggcaatcacccagcgaaatctccgcccctggagcggcgcttaggccgccgccagcccccctcccggcgcccagcccgcggcccccgacacacacgcgcgcacacacacacacacacacacacaagcgcgcgcgcacgcacacacgcacgtaccggctgctccgcagggacgtagagagccgcaggcccaaggaggggccgcccccgccgagcccgcccctccgccccagcgcggcctgtcaccgcggccccaggtcgggggctgccgcagggcccccggggaccggaggggcgcgcgaggagtcgggcgcgggccttggggccaggcccgtccctctttcacatgaagcccgggccgggcggggtggcgggcgcgtgaatcctcgcagccggccgggtcctcctggcgctcctcggcacttctagccgctgcaaccccgaggcccgcgggaactgggcaggaaaggaggaagccgcgggcccgcgtcgctagagaccggagaagaggcgggagtggcgactctgcggacaggggcgccgagcgtcctggtcgttgttttcgtcgccgccgcgggccgtgcaacccccgaacgctgcgcccagcggccgcggcaccctcgtcaggcgccgccgctgagggcaggcagcccggcagccactacacacggacccgtgacgtcgggcgtagcgcggcgcacgtcacggccgctcgctcgtgcgcgcgcacccctccgcccggcggtagcggaacccgccgcgggcgcgcgcccggcccaggggagtgggtcggcgcctgcgcagaggcccgccacgcccacacacaggccaccgcccccaccggccggacggcgcggggattcccagtcctggctccgccccggcctcggccccgcccccgcccctgccccggggcagcctgtgctgttccgtgtgcgcggcgcatacgcacctgggttgtctcgagcctgcggtagtggccagatcccagacatccgagtagatcccgtgaaaaggtctcccacgtgggctgtggacagggcccaagggtagcagagctagcagaggcagtgacggactgtgtggcaggtcatttgcaaggagaaaagccgtctgcctcttaatttgtggctcaagtttcagaatttttttcctgagggactttagaaattacttcaggcttgccacctaaccttaaaccacccccttggagactggctaagtgttatttgtgttttctgtttagttcttatcaccatcgatacttggttatgactggttgtgtacattggttagcccagcaagtattacttctccagcttaacagatgtggaaacttaagcccagagacatgagttgacaccccacccccaaagctagagtctaaaaccctttctttcgctcctcatctcccacaggataaaatgcaaattaatcagactagtggtgaggccctccgtggtgtgactaacctgcatcccgacgttttcaccctactttgatccagaaagcacctttccgccccatctcttctcctttccttaaataccccttacaacttcctgtaccattcttccctgttcagcttcttcttggtttcttcgtacattctggatccacccctttcatgcatattccagaccacatttccactggagcagttgaaatgagagagatgggaatgggactcacccgaaccagaggtaaggagctacccaacttgggctctgagggtcaagggagctggcacttgtggggcagagactgagggagaaactgttgtgtaatgtcaaaatatctctgggtttcttccaggaatttttattacagacccattaacagaggtgtcaaagtcacaggaacaaggatgtgcacctcagaaacacagaggtcagtggaaaatcagtttgcttctatttgtttaaaaaatgggggacttatgcataaatctaagaccttcttgaatctaacattctaagacctgtatgccacagaaaggagggtctcagaacgccggaggatagtatttaaatc

SEQ ID NO: 24452 - DNA, 2300 bp, Homo sapien
ctttgggcacctgggctggtttggacatgggtgccccgggcagagtccatttatgcaggtcagaatcagtgtgtggagcctgcatagacttgccctggagcggctgcctgtgctggggtggggaggagtagagggcgagaagttggtggggaagggaagcggcgccaaaagaatacccacaacatcttgcacctggaaggcaaagcagagggcagtgatctctgcagacttgcgggggcgacgcctgaagcaaacagggacatacaagctggtgccttctgtggttgtgcatggggtcttcatgcttcctgtctgagttcccagaagcttgtctctgcttttctaggcagctgccacagcctgtcacaaacagctcctggttctccacttctcatagtctcgatttcaaaatccattgcctcaccctccacctcctctccacctccacccctcctagcacctcctgactgcttgtgttctgtgtctccccactgtctcccaacctggggtggggttgggggggatgtctttcctcctgtctgctctttgatgtccagctgaagtgtcacctcctacaggcagcctcccctggctatgccagcttgtactgattgccctctcctctgaattctgtaagcatttcctatgtgtacctgcccctgggcaaggtgggcctgacttgttagagtgttagagttttaccctgttcctctaggagggcctggtaccaccacagcccagcatggtgtggtgcctcagcaggaggcatctggttacaatcaacacaagctgttccagccaatttaaagaaacttcaggaggaatagggttttaggagggcatggggaccctcctgcacccgaagccaggatgtgccaccaatcataaggaggcaggggcctccttccgctgctccctgggactctctaggtgtccgtggcctcagtccccctctgcacacctgcatcttccttctcatcagcttcctctgctttaagcgtaaacatggatgcccaggacctggcctcaatcttccgagtctggtacttatggtgtactgacagtgtgagaccctactcctctgatcaatcccctgggttggtgacttccctgtgcaatcaatggaagccagcgaggcagggtcacatgccccgtttagaggtgcagacttggagaaggaacgtgggcaagtcttcccaggaacaggtagggcagggaggaaaggggggcatctctggtgcagcccggttcggagcaggaagacgcttaataaatgctgatagactgcaggacacaggcaaaggtgctgagctggaccctttatttctgcccttctcccttctggcaccccggccaggaaattgctgcagcctttctggaatcccgttcatttttcttactggtccacaaaaggggccaaatggaagcagcaagacctgagttcaaattaaatctgccaactaccagctcagtgaatctgggcgagtaacacaaaacttgagtgtccttacctgaaaaatagaggttagagggatgctatgtgccattgtgtgtgtgtgttgggggtggggattgggggtgatttgtgagcaattggaggtgagggtggagcccagtgcccagcacctatgcactggggacccaaaaaggagcatcttctcatgattttatgtatcagaaattgggatggcatgtcattgggacagcgtcttttttcttgtatggtggcacataaatacatgtgtcttataattaatggtattttagatttgacgaaatatggaatattacctgttgtgctgatcttgggcaaactataatatctctgggcaaaaatgtccccatctgaaaaacagggacaacgttcctccctcagccagccactatggggctaaaatgagaccacatctgtcaagggttttgccctcacctccctccctgctggacggcatccttggtgggcagaggtgggcttcgggcagaacaagccgtgctgagctaggaccaggagtgctagtgccactgtttgtctatggagagggaggcctcagtgctgagggccaagcaaatatttgtggttatggattaactcgaactccaggctgtcatggcggcaggacggcgaacttgcagtatctccacgacccgcccctgtgagtccccctccaggcaggtctatgaggggtgtggagggagggctgcccccgggagaagagagctaggtggtgatgagggctgaatcctccagccagggtgctcaacaagcctgagcttggggtgaaaggacacaaggccctcca

SEQ ID NO: 24453 - DNA, 2300 bp, Homo sapien
tgctttgaacacgtctccaatttagtgttttcttagaccgcagacgttgtagttgttcacatgtctctctctccgttagaccatgagctccctgagggcaaaatgatgtccttttctcttctcccagcatcgataacggtacctgacaaatagtaagcattcagtaaaattttgttgaatgagtttccataactgcattgtagtataatttctctttctgtgtgtgtcttttctctgatgagactgttctaggaatttttatgccactcagtgcctgctcacagcaggtgtccagtaaactcatgcaagaatgactgtatgaacagatgaacaatgaacaaatgtcagatatgtcactctcagccctgcagctggtagcagttccccagaatctccatcttccgatagtggtccccacctgtgtcattgttagaggctgtcactactggtcacgttccagggtgaacccagcctgtcttattgctctgtaatccatcttcctgtggaatgtggtaattagcatgttaatgagctcacaaggaaacagtgttgcaagaagagaggttgtttagccggatgcagttgctcatgcctgtaatcccagcacttgtggaggctaaggcaggaggattgcttgagtccaggagtttgagaccagcctaggaaacatagagaggttgatatctgcaaaaaaaagtaaaaattagctgagcctgtggtcccagctacttgggggctgaggtgggaggatcacctaagcctccaggggttcgaggctgccagaccctgtctcaaaaaaatacaattcatttagggaatcaggacaatcctaggatgaaatgcagactgtgacaaaagaatccagccatatgaaaccagctctctgagaaagggtgggggtgagcctgtggacttcgcacccctgcttgaactaagtgagctgtgacaggcagtaatccttccatgccccgcctcagcggtaaggtagcatgtttaccacctgcaccacgaggggaaagttcacccctggcacccaccaatagcgtgaaagacttgggcttgttccgtgagttacatagtgactgaggagatccattccaataatggggtgcacattgtagcaaaaccaggccaatactaacagttaagtgggtaattatccctttaattaatcctcccaaaccattccccttggaaggattacagcctgtcacgctgacttagttcaagcaagggtacaaagtccacggatccctttaaagcatgagcatttcctgtaatatgagatttggtcacccagtgttgtttattttttggagtccagattactatttttttttttcttttgagacggagtcttgctcttgtcattcaggctggagtgcgatggcgtgatctcggctcactgcaacctccgctcttgggttcaagcaattctcctgcctcagcctcctgagtagctgggacgacaggtgcctgccaccacacccagctaatttttgtatttttagtagagatggggattcaccatgttggccaggctggtgtcgaactcctgacctccagtgatccacctacttctgcctcccaaagggctgggattacaggcatgagccactgcgccctgcccagattactattaacgtggagaaaggtaaaagggcgattgtctaccagaagggtctgttttccatgaacatggaccactggatccgtatgggggacacggccagatatgaaggaggggctgtttccagaggagacacctgctgagaattgtcgtctaaccctagtaattattggaactgttaaaccaatttactagagatcatccaatcttgagcgcccccctccttaggatccaaagtaacctttcttgttcattgcagggttcacatttaaggagatgcctggctgtaggaagcttgtctggcttaggagaggggaagtcttactgttcatagtaatttggatttaggccaggtagggtgttgtttgtagaattcatgggcagcactctgagtttgtcttttctaagtttccagtaagtccaggcagctatggccccttgaattgtcttagtattagtatcattgcccctgaagaggactttgtcggaagctctcctaagaaacaagcagatggagtcaggactcccttaagctgctcagggcttgccacaccattgtgttgcattcagcctgtcgtctgataagcccacttctacatccccagctgaccaagacctttggcctcagctaacattttccattgacagtctgcccaaacccttaagaccc

SEQ ID NO: 24454 - DNA, 2300 bp, Homo sapien
gttaaacattgttgaatattcagatacagggaagctttgagaggattctatttagagacaccatctctctccagagtgtttcagtctctgctatctaagactccatttgcacagatagtattacttgtctacttttttatgaaacttatcttttttggaaaagacatatttcattataacctcacagttcttataggagaaggaaaaggtaccagacatgctgtcaatttgttaagggagatgagaaatttcaaactgaccagcaatgatagaggaacatggagactattcctagaaagaaatatgtagtcctttttagttcagttactactaggcaacatagaaaggatgccagttttgcccatcaatctagttttaattttctcgatttcccaaaaggaaaggtggctgcttttatattgatgatatctttcttcatcttttggccagtttttcttaagcaaaataacagataatttgtaagatgactctgaatgagccatttagttattttaaaaattctaaaccatgtgtcaggaggccctctgattttattttatttatttatttatttatttatttatttatttatttttgctgtatactgccatcttaaagcacctgttatgcttagtaatacaatggctgtgataaaataaaattaatgatgattttctttttcaacagcagcaaagaagagtcgtgttgtctctgatgcagatgactctgacagtgatgctgtatcagacaagtcaggcaaaagagagaagaccatagcatctgacagtgaggaagaagctgggaaagaattgtctgataagaaaaatgaagagaaggatctgtttgggagtgacagtgagtcaggcaatgaagaagagtaagtgacagtataacatgagttttcaggggttcttaattaggcagtagagaggggtctgtgttataatacaatatgtcctgcctaattgcatgtctttggggatttagtattttagttcctgaactgaacacactacaatgtgggtgaatctcagaattcatctcagaattaacatgttaagtgaaagaaagcaaagaggacatatatgattccatttacatgaagttcagtaggcaaaatttatctgtggtgttggaagtcaaggtggcagttgtttctaggatgttgatattggggaccagctagaaggggccatgagaggactttctggggaggctacatgagtgtatagggtgctggttacatgagtgtatatatttgttaaaactcattgaactgaacactgaagatctgcacattttactgtacataaattctattttttaaaaaatggttcctatgcaaatgaggataaagcaaatgaatgtttttacatttgtctactttctagaaatcttattgcagacatatttggagaatctggtgatgaagaggaagaagaatttacagtaagtataagatggaaatatttcctccttgattgtgcttttttttggtgtttttatggcagtgataccattatagatgattctaataagtaggaataaacaattatgatgtattcaagataaaaatctagaagagggattcaggaagtaaaatgaaagcgtatatacaaagacataaaaggaagctaatgggcaaaattgaattaagggggaagggacactttgagacaaagaaagtcactttataatgctaaagggcaagattcacaataattagggaacttccgattttcacagtggcattctaggtgatttggactaacccctctgccaagcacaactagaaaagctagacaaaaatatatagaaatctgctcattatctaggaacaaagtagcaaagaattactaagccaagagaaacctaaagtggtaattcagtgtttagaagtgctttttctgtgggggtgtttgcctgtcaggctgagaggctactcatatttttgacagcctcaaggcttggggacaaaatttagagttcggggcctattgaggttagggggctttgtaaaccccataccctggattgagacttcagagagcagcaccataagatttagggggaaataaaatagcctttgctcagattttaggccatctttgaatcttctggcagactagagaatctcagtctcagaaataagattacagtggtttaagtttttcatatgtacttattatacacaaaaataacattaaaaggtaacagtaatgatgacaatagtaatagacttagggctctagatataggaattttagataccaccttaaatatgttcagggagataagaa

SEQ ID NO: 24455 - DNA, 2300 bp, Homo sapien
agaagccagagtcagatgatgacagcgacagggagaataagggagaggatacagaaatgcagaatgactccttccattcagacagccatatggacagaaaaaagtttcacagttctgatagtgaggaggaagaacacaaaaagcaaaaaatggacagtgatgaagatgaaaaagagggtgaggaggagaaagtagcgaagagaaaagctgctgtgctttctgatagtgaagatgaagagaaagcatgtaaggagttaccttgggctgtttatcaatggctttattcattgtctaagcttgtaactgtggaacattgtatcctcttggtatgtcagatctgtgttctgttattcagcttaatattctaaaatatcagtaggacactcatttcccctggttatcattagctaagcttaatagtaagtttccttggagttctattagcacatattaatctctgactgcctcaaagtgataaaccacatgtcaataggaatataaaatactgttttttttttttaaaactggaagaggtaatgtttcaaagaaatacgtttacataaaaacccctaactgtattaattgttagctgtgggtctctttgacacttagttcactagatcccatccaaacagtaacagctcccacaggtacatctcttcatttgttaaacattgttgaatattcagatacagggaagctttgagaggattctatttagagacaccatctctctccagagtgtttcagtctctgctatctaagactccatttgcacagatagtattacttgtctacttttttatgaaacttatcttttttggaaaagacatatttcattataacctcacagttcttataggagaaggaaaaggtaccagacatgctgtcaatttgttaagggagatgagaaatttcaaactgaccagcaatgatagaggaacatggagactattcctagaaagaaatatgtagtcctttttagttcagttactactaggcaacatagaaaggatgccagttttgcccatcaatctagttttaattttctcgatttcccaaaaggaaaggtggctgcttttatattgatgatatctttcttcatcttttggccagtttttcttaagcaaaataacagataatttgtaagatgactctgaatgagccatttagttattttaaaaattctaaaccatgtgtcaggaggccctctgattttattttatttatttatttatttatttatttatttatttatttttgctgtatactgccatcttaaagcacctgttatgcttagtaatacaatggctgtgataaaataaaattaatgatgattttctttttcaacagcagcaaagaagagtcgtgttgtctctgatgcagatgactctgacagtgatgctgtatcagacaagtcaggcaaaagagagaagaccatagcatctgacagtgaggaagaagctgggaaagaattgtctgataagaaaaatgaagagaaggatctgtttgggagtgacagtgagtcaggcaatgaagaagagtaagtgacagtataacatgagttttcaggggttcttaattaggcagtagagaggggtctgtgttataatacaatatgtcctgcctaattgcatgtctttggggatttagtattttagttcctgaactgaacacactacaatgtgggtgaatctcagaattcatctcagaattaacatgttaagtgaaagaaagcaaagaggacatatatgattccatttacatgaagttcagtaggcaaaatttatctgtggtgttggaagtcaaggtggcagttgtttctaggatgttgatattggggaccagctagaaggggccatgagaggactttctggggaggctacatgagtgtatagggtgctggttacatgagtgtatatatttgttaaaactcattgaactgaacactgaagatctgcacattttactgtacataaattctattttttaaaaaatggttcctatgcaaatgaggataaagcaaatgaatgtttttacatttgtctactttctagaaatcttattgcagacatatttggagaatctggtgatgaagaggaagaagaatttacagtaagtataagatggaaatatttcctccttgattgtgcttttttttggtgtttttatggcagtgataccattatagatgattctaataagtaggaataaacaattatgatgtattcaagataaaaatctagaagagggattcaggaagtaaaatgaaagcgtatatacaaagacataaaaggaag

SEQ ID NO: 24456 - DNA, 2300 bp, Homo sapien
tcttaatgctagtgactctgaaagtgaggagcttcacaggcaaaaggacagcgactctgaatctgaggaacgtgcagagcctcctgcaagcgattctgaaaatgaggatgtcaatcagcatgggagcgactctgagagtgaagagaccaggaaattacctggtagtgactctgaaaatgaggaacttcttaatgggcatgcaagtgactcagaaaacgaagatgttgggaagcatcccgccagtgattctgagattgaggagctccagaagagtcctgctagtgactctgaaacagaagatgctctaaaacctcaaatcagtgactctgagagtgaggaacccccaaggcaccaagccagtgactccgaaaatgaggagcctcccaaacctcgaatgagtgattctgaaagtgaggagcttcctaaacctcaggtcagtgattcagaaagtgaggaacccccaaggcaccaggccagtgactctgaaaatgaggagcttcccaaacctcgtatcagtgactcagaaagtgaggaccctccgaggcaccaggccagtgactcagaaaatgaagagcttcccaaaccccgaatcagtgattcggaaagtgaggatcccccaaggaaccaggccagtgattcggaaaatgaggagctacccaaaccccgagtcagtgactctgagagtgaggggcctcagaaggggcctgccagtgactcagaaactgaggatgcgtccagacacaaacagaagccagagtcagatgatgacagcgacagggagaataagggagaggatacagaaatgcagaatgactccttccattcagacagccatatggacagaaaaaagtttcacagttctgatagtgaggaggaagaacacaaaaagcaaaaaatggacagtgatgaagatgaaaaagagggtgaggaggagaaagtagcgaagagaaaagctgctgtgctttctgatagtgaagatgaagagaaagcatgtaaggagttaccttgggctgtttatcaatggctttattcattgtctaagcttgtaactgtggaacattgtatcctcttggtatgtcagatctgtgttctgttattcagcttaatattctaaaatatcagtaggacactcatttcccctggttatcattagctaagcttaatagtaagtttccttggagttctattagcacatattaatctctgactgcctcaaagtgataaaccacatgtcaataggaatataaaatactgttttttttttttaaaactggaagaggtaatgtttcaaagaaatacgtttacataaaaacccctaactgtattaattgttagctgtgggtctctttgacacttagttcactagatcccatccaaacagtaacagctcccacaggtacatctcttcatttgttaaacattgttgaatattcagatacagggaagctttgagaggattctatttagagacaccatctctctccagagtgtttcagtctctgctatctaagactccatttgcacagatagtattacttgtctacttttttatgaaacttatcttttttggaaaagacatatttcattataacctcacagttcttataggagaaggaaaaggtaccagacatgctgtcaatttgttaagggagatgagaaatttcaaactgaccagcaatgatagaggaacatggagactattcctagaaagaaatatgtagtcctttttagttcagttactactaggcaacatagaaaggatgccagttttgcccatcaatctagttttaattttctcgatttcccaaaaggaaaggtggctgcttttatattgatgatatctttcttcatcttttggccagtttttcttaagcaaaataacagataatttgtaagatgactctgaatgagccatttagttattttaaaaattctaaaccatgtgtcaggaggccctctgattttattttatttatttatttatttatttatttatttatttatttttgctgtatactgccatcttaaagcacctgttatgcttagtaatacaatggctgtgataaaataaaattaatgatgattttctttttcaacagcagcaaagaagagtcgtgttgtctctgatgcagatgactctgacagtgatgctgtatcagacaagtcaggcaaaagagagaagaccatagcatctgacagtgaggaagaagctgggaaagaattgtctgataagaaaaatgaagagaaggatctgtttgggagtgacagtgagtcaggcaatgaagaagagtaagtgacag

SEQ ID NO: 24457 - DNA, 2300 bp, Homo sapien
cttctgtcattagcacccttggtgtgggaaacagcctatcttctgggtgcctccctaccaccgccatgggccaactgtactggggtggggtgtgatgggtaaggagatggcagtcctgaaaatgtaaggcagccaagactcagaaagacacatctgtgccactacagaatttctctaccaggatccaggagggacagccagctggtaggaaggagctctgggaactctccgtaagctgtgtttacactgacaaccacactgctttaactaaggctctgtattcatttgaaagacttgtcctgtctcactaaattgttggctttctgagtacaaaaattagatctgatgcttctttgcaggcttctagagctaagaacattgttgtgtgtccagagtgtttctatcctttctccaaaccaccagtacagttagttttaacgctaaaattcagtaattttcatccggcaattgcattgtttataacccaaccactttcctgactgttggacttacatctctggtgaaactaaaaggttctcttccactgaacctccgcctggaattttgatctattaatcctgctccatttacacaggtgtactctcaccttctctttagaagagggcttagagccttgatatcttctatcaagtgattcggtttcgggcattgctaattctttgttcttttgattctcaagactgcctgagaagatgtcattcccacagctgaaaagaaggaatttggattcaatgctgtttccaccacttcggaaaggaatatccatgaactctcttgcaggaaaatgggaatttccagagagaaaccacttctcccctttcttctcttcccacgtcctcttcaggagcctataattgggctctgccagcatactctgactggctaacgaagggtcagatatctgcagtagtaacaaaaggctctttttctacatgtctacacctcctggggagtctttgcttaaacctctactggccctcctccgatccaaaggcaagaatgttcccctctctgtccaagactaaaatgaacaagtaaggaaatggattttactcagcctattgcaatagggagagcactccagatatgatcagtgtcttggcagcgtagttttgacttttatagggaggaaggtgggatgattgacagttgggattgttttgcaatcaggagaagtttcagtcaggtgaacaggaaatgttctctgtgtctaacaagttggggggaggagagttctaatctcaactaatcactcgatatcatcagcgggaatttggaaggtctgtttggctttattaacaggctcagaataaaggggaaaggtctctggccttgtcacaggcaaacaagggggtcatctgcacgcgttttatctgagtcacatggagacgggtggttctttacagtgtgccgttccagaaacacaaatagatgagggggtttcttaatcaccgctgttttccaggaacacagggctcaggtaaagttcaacttcaccttcctccggtgtttcatcaggggaacccttctggaagcaaagacgtgtacttcttactgttggctaaatggcttcttaacaaggaaattaaatcgttgtttagaatgaaagagaggaagacgccgggagaggaggcgctgtggatcgcgccagttagtaacgcatcacagctcgcgggcgtcatactacaagtcccagtgagcaacgcccgctttcttgcctactgcgggcgggaaccaggcgcctctgggcctgacgggaaagacagtggtttggctgaatgacggaaaagtcatttgagcaggtcttcatttttcggaagagtatctcaaaagctcttcaaacaaggcacggacacagaatctaggaaatgataaagaatcaatgataacgttattaccacgggggtcagaccaggatccacccgaggaaggtatttaactaaagcccgagttccagctcaattttcccaggagtctcctttccggccgtgcctggcgtcattgctgttgcgtcttctcattggccggttgacgggttgcggcgcctgcgcgctgcattcctttgagggtcgtgggcagacgccattttggccccagcggtgcttctaggaagtagaacgccggctcgcatgcctgcccgcccgccagcctgccgggtacggccttttccgccggggcttccaggtcaaagaattcgcctttgccgctaccgctttcttaccctccgcacccgttaagttctccggtcgggcggcagtctctgaacacttagccgcgcc

SEQ ID NO: 24458 - DNA, 2300 bp, Homo sapien
gagcctctgagaagtgccaccattacgaaacctgtttaacttattgaacccagtgtggccatcatgggggcgactggttgggtgtctctttaagaaagaatctgatgcaggcagtttttttttttttggtactaactgacaggctgatcttaaaatgtactatatatggaaaggtaaattacctagaatagccaagtttgaaaaagaataacaaaattggagggcacatgctatctgattgcaccgcttcctatagaaatcaagacagtgtagcactggtgaaagaatagacagagaggggaattgaagataatagagaatccagaaacagccccatacatggatggtcagttgattttagacaggggtgcaaaggtaagtcaacagagaaaaaatagtctttttgacaaataggactggaataatagagtatcaacatgcaaaacaaacaaagagagaaggagaaaaagaaaggaaggaaggagaaaaagaaaggaaggaaggagaaaaagaaaggaaggaaggagaaaaagaaaggaaggaaggagaaaaagaaaggaaggaaggagaaaaagaaaggaaggaaggagaaaagatgagaaagaagcaaggaaggaaagacagaaaagtctttttttttttttttgagacagtctcactctgtcgcccaggttggagtgcagtggtgtgatctcggctctctgcaaactttgcctcctgcgttcaagcgattctcctgccacagcatcccgagtagatgggattataggcgcatgccaccatgctcaactaagttttgtatttttagtagagatggggtttccccatgttgaccaggctggtcttgaactcctgacctcaagcgatctgactgccttggcctcccaaagttctgggattactggcataagccatcatgcccagccaaaagtctttttttctatgctgtgtaccttgcaccatagaaaaatatcggatcacaaatgtaaatcataaactggatcatcaacctaaatataagacctaaaactacaaaacatataggaaaaacataggagaaaatctctgggttaggcaaagatttcttagatacaacacaaaaaagcatgacccataaaaggaaaaattgaacttcatcaaaatttaaaacttctgccctgcaaaagaccctgtctagagaatgaaaagacaagccacaaactcggacacaatataagatgtaacacctatcttataaaggacttgtatccagaacacagaacgaactcttaaaactcactaatggccaggcacagtggctcacgcctgtaatcccagcactttgggaggccgaggcgggtggatcacctgaggtcgggagtttgagaccagcctgactaacatggagaaaccccgtctctactaaaaatacaaaattaactgggcgtggtggtgcatgcctataattccagctactcgggaggctgaggcaggagaatcgcttgaacctaacaggcagaggttgcagtgagccgagatcgtgccattgtgctccagcctgggcaacaagagcgaaactccgtctcaaaaaaataaaaaacaaacaaacaaaaaacaaacaagcaaaaaaaaaaaaaaaaactcactggtaaggaaatagaccaattaaagaatattaaagaataggcaaaagatttgaactgacacttcaccagagaagatatacagagcggaggtaagcatgaggaaggacgctaacatccttagtcgtcagggccacgggagttacaagcatgctccacacatatcagaaggcagaccaggtccttcactgtgccaggtgctggtggggacacaggacaaccagaatgttcctgctctgctggtgggaaagcaaaatgctgtgagcattttggaaaacatttcggaagtttctgacaaagtgaaatggctcacttgccttttgagccaacaatttcactcttgcatatttatccaagggaaagaccaatgtgcacacaaaaacctgtatgtgaacatttatagaggttttactcctagcagctaaaaacgataaacaacccagatgtcctgaacgggtggagaagctgtggtaccttcacgcaatggaattctactcagcattaaaaaggaatgaatcactgatgcaggcagcaacaaggaagaatcccaaatagccaaggtaactagacacaaaaggctacaaaccctgtgattttacttctatgacgttctggaaaagacaaaactgtgaaggggggcgggggaaagacaaatcagtagttgccaggggaggggtt

SEQ ID NO: 24459 - DNA, 2300 bp, Homo sapien
cttcctcgctcaagtccttataggaccctattgtccctatctgttcctgtctgtccctgcaagtttctcctagtctttgctagtccttgctagtctttgtctatccctatctgtccctatagtccctgttagttcccgcaagtccctgtctttccctagctctctctatttgtctctatttctatttatccctacttatctctatttgtccctgcaggcctcttcaggtcccttcaggtctgtttgtccctgattgtccctgttacgtccctgtccaggcagcacttgcagcaatttgccactgttactacttgagatcgtcattacgggagttactactgtcactacttgagaccgtcattacgagacggaacgaagggggatgaacgtagaaatgaaaacttaaaacaaaagaaactgttttaaaggggccaggggaagaaaaagggctccctactcctagtaagcaaagacagcccccaccccaagcttcttcagcccttagtatttattgggtagaataagcagggaggaggaggtaacgattggtcagctgcttaactgatcacaggttcatattattactaacaggcttcaggtgtgccctgtagataatcacaagaaacacttgtgcctgggtcgtgactgccctcagcattccttctgggcggcagacgcagtttgtcagtttgccaacattctgcttttatgagaacagtttgctgtttgctcatatagcctccagtggtatactgagctgatcacgaccctcactctttcggcctgcatcagtcacccttgagacagcccacagggtctggaatttatgagtggtttgccattgttggggcatggagcttggattccatcctaagggaagtggggaaagttttaagcaagagaggatcttgatcatatttgacttccagaaagacctccctggcgatgtggcaggatggagcctggggctgggaggccaggcagggctgctacagagatccagagagagctgatgaggaattgcccaaggaacaggagccaagaggaggggacagaggaaacatgcaggagacagatggtagcatgtgggcactggttggatcgtgggggctggttggattgtggtggctggttgggttgtgggggctggctgaatggtgggcgctggttggattgtgggggctggttgggttgtgggggctggttgggttgtgggggctggttggatggtagaggctggttggattgtggtggccagctggattgtgggggccggttgggttgtggtggctggttgggttgtggtggccagctggatggtggtggctggctgggtggtggggggtggttgggttgtgggggctggttgggttgtggccagttggatggtggtggctggctgggtggtggggggtggttgggttgtgggggctggttgggttgtgggggctggatggtgggggccggctgggtggtgggcgccagctgagtagtgggtgccggctgggtggtgggggctggatggatggtgggggctggttggattggaggaatgaagggatgggagggctccaggatgacccccagatttccagtttgggtgaatggctgatggcgatgcctgtagaccacagaaagaggagggatgcaggaactcagagagccagccatgcacattgcttcccatctctgttcggtgatgtcgtgtcgcagttgacattggctttggtgggaacatgtacaccacagaaataagcaaatgctgtgaattgggcttttcttcttgggggagctggttgataaacatttaccagcacaccactgagtattaggggaaagatgctggcctctggagatgtggcatttgaggtgttaatgggccacttttataacatgatagaggcttgagtccatggggaaggacgcaggagagaaccgcccccaacacacccccaccaggagtggggaggctccacagaccgtgggagtaggaatggtcaggagatggggttgagtggctcccatgaagtcctcacttttctctctgctgtggaggggaggggctgcattcagggagggaggtggggcctcaaggcagagagagaaatgactgtaatcaccgtgagactggggatcccgcacatctgggagcagatgggctgtgcaaagggcgcggctgctgaggacagggctgtggctggagaacctgctgcttcctgaagccgagccccaccctaaaggaccgagagcacaggccatgggagaggaatcgagtagggatgcagagcctggtggcactg

SEQ ID NO: 24460 - DNA, 2300 bp, Homo sapien
aaggcctctgggattcccagcctgcatggtggcccagtcagggcatgcagggagggggaaggtcctgcccgagccacaggttagctcccctgtgatggggcaagagcccggccacgggacaggggcatcctggggaaggggggagctctcacttgtctcactcgcccccgtgggtgccctgggctgtgcaggaggaagagctggttgagctgctggcccggcactgctacgtgcagctcggcgcctcagcagagagcaaggctgtccaggagctgctgcccagctgcatcccccacaagctgtacaggaccaagcccccagacaggtgggcgagcctcgtcactgccgcctgcgccaaggtcagcctgcatgcagctcaggcacccacccgagggctctcctttgggaggtgggggggctcatggtatacagaggagatggattccctccccacaacccccaccccctggggaacaacaagcctcagcttgacagttaagtagagccctgtcccttcaggtttaagcagtcccactcagttcagctctctgtcacaggcccatgccaccttcttccttccaagctggcatcttggatgggtccctgtgctggtctgcactgtggtgtctggccaggccctcgcttcttgggatgagagggcacctgcagtggctgactgctgaccataccatggccttgggggcccccctgcctgcctctgggcctcagcatcccctcgctgggtgcatgggaaccccccaggccagagtgtatggacattctaaacattcgatacatatcgaatattttcaaatcacccttcagatttgatgcatttattacattcccaaagccagtatatgaatagtacccagccacttttctaagaaataacgctgtattcaacagtgaaaagagagttcggttggatattatagtcggtgatggacacagcacagtggtgctggggagaggaacgggtgaaggtggggagttaggaaagaggaaggaaggagactggaagacaaggagctagaggtggtccccgagagaggcccccagagacacagaagagctccagagaagaaagaagagaggcacccgggacacagactcggagcaagatgccctcctgcacggaacgagtcacaatcctgcaaggcataggctggcaagagcgagcctgggctggggcacacagacagcgccttccacagctagcgcagccccgccctacagatgctaatgaggggacgggatggccttcctccctcctcctaaagggtccccacacccctcccaggtagaatagggtggcgccaggctggacgtggtggctcatgcctgtaatcccagcagtttgggaagccaaggcaggtggatcatctgaggtcaggagtttgagaccagcctggccaaggtggcaagaccccctctactaaaaacacagaaattagccaggcgcagtggcacgcgcctgtagtcccagctactcgggaggctgaggcagaagaatcgcttgaactcgggaggcggagcttgcggtgagccaagatcgcaccactgcactccagcctgggtgacagagcgagactctgtctcaaaaaagaaaaaaaaaggatagggctgcaccagtccctggggacgtcccaggtgcctccctacaggatccatctccagacactggccttgtagagccttctcagaaggatccatcaactcttttaccctgagcactaggtgagggattcactagggaaggcaggtgacggaggtgacatccaggatcccccctcaggccccatacactcagaagcaagtcacaccactggccgtgcgagagcaggtggtggacgccgcccgcctgcagtggccgctgctcttctcccggctcttcgaagtcatcacactctcaggtaatggcatctgacagggggcagggagcaggtatgggctgggcacccaggggtcccatgcagccttcacactgccgtctctcctggccaggcccccgcctgcccaagacgcagctgatcttggctgttaactggaaggggctttgcttcctggaccagcaggagaagatgctgctggaactctctttcccagaggtcatgggtctggccaccaacaggtgcgggccctgagggaagatctcttcttacacactgagtccttgtgatgcatctgggggctcggggagagatggggagaggggcagtgtgccgtcccgggtaacaggccggggtggagggacaagaatctacgtatgcgatggcttctgtacttcggagccccac

SEQ ID NO: 24461 - DNA, 2300 bp, Homo sapien
gtgcctatccagacaccccctctggtttggaggaggaggggggcccaagaacagacctgcttctcagaggcctgggtgcagaacacagcccactcttctgggctgtgcaggaagtctgtgctccagggcctgtctggggcacaggaagtcttcaaagtgcccagagatcagaaggcgctgccgcctcggctctgcagggacagaatgggcccctcggggagccgtgccctggggtggaggcgctgctggcatgaccctgcagaagggcaggggtggcacctgggggctgcacgctgtcttccaggaaggagctgacagccgaggcccgcgagctgaagggtgagctctactgcctgccctgccatgacaagatgggcgtccccatctgcggggcctgccgccggcccatcgagggccgagtggtcaacgcgctgggcaagcagtggcacgtggaggtgagccaggctggtggacacgtggcctcaggttggggggtgccccagctcagggtcatggtaagagccctaaagctcctccacactcccagcccagggcgggtggctggctcccaacgaggcccttcctcaggggtactgcccctccctgtgctcagccagggaccccagcctgcccacgggagccaggagacccgagtgcacacacacggttgggtagctgtgcccacctctcctcttccccctgctggcattctaagagactccaaggtcaggagaaaaccttgggggcagtctgtccagagtgcctgggggttgtggatgacagaacccgctgcatggacagccctgtgcagacacggagctgaagagttcctcaggtgtgagcactgggtcacctggagtgcccccaccgggtggtgggctctcatgttctcatgggtacactgggaacagtgagcccaccacctcccctgatgacctggccagcgctgtgtccggaagctgtgccttgggtggcggcttgggtgggaggccatgcggtcctgccctgatgcaggccccagcccccagccctcatcctcacatgcagatccctgggggaatgcaaggtgctgctcagtgatcccaggcttgcagggggtgcctgcaggaggccccacgtggacaggcagggccgcctctgcctatgagggcccaccatgccgcagcaccaggctggcacctgactcctggggctgaggctgccgagggggaggccagactgggaggggatggtgactcacaaggttaccatcagtgccttagaggaggggtagggtctgctgaccccagggcattcacagaggtgtcagtcccctctgcccagtgtgaatcctgaaaggcctgcacctgcccagactctgctttctgtccccttctgtcactgctgcctcctggggccactgtggtcccctggagtcactggctcctggggtcactgttgtccccgggtcaccactgtccctcggggtcaccgctctagccctgatgccacccggcccgccctttgtccttgcagcactttgtctgtgccaagtgtgagaagccattcctggggcaccggcactatgagaagaagggcctggcctactgcgagactcactacaaccaggtgagcccggtgcagaaccttcagggatgcgggtctggaggggtggccaggagagctgccgtgagcaagggaggctgtgggcaccccctcaggagctctgccaggtgctgagcccaggcctgcaccctcagccctggctcctggcctggggtctcgagacctgggcagctctcttcagtctcagtgtcttcctttgaagaatgttctggggctggtgtgaggtcccgggcacatggggctgacagtgccagcaaccccctccctcccttgctctggtacagaaggcagggggcgctggtgggatgcagtcaccacctgggcccacctccttgcaggacagcagtggccagagcagaggggccttctggggagcaacgccccagcctgttgtccttcccggaagggtggttctcatgggttgccgtgccctcaacccagccttgcagctgggccctgggaggcagggcctgggagatgcctgagaggggccgtgttggagggccaggctggctgcatgatggccctgggctggggtgtgactgcctgcagctactctgacagcctgctcggcccacagctcttcggggacgtctgctacaactgcagccatgtgattgaaggcgatggtgaggccctgtgttccctcccccaccccacctgctctcctggggcctgggtgctgcagctgtgag

SEQ ID NO: 24462 - DNA, 2300 bp, Homo sapien
cacaggtgtctgggcaagggtgggcttcagggattgtggtgatgaagactgaagccacaggccacaactgcttcccgtcgctggggtgtaagagccagggctctggccagtagtcgaggggagatgatgcccaccgaggctcccttcctctcttgtagagtcattcattcaccgaggcattcggtcagctgaccctgagctgttgccccctgctgggcacatagggtcttggggaggcacagagagccagtcggcagcttagccagtgactgctgggcctttgtttgggccccttgccctgcacacagctgatgatgagacaccccagggcagatggagcacagtgctgtgcaggatggagtccagacacccagcagtagcaggtcctggggtccagggagggatgctgaatgggtggccctggcatctggggtctgcccaccataacctgggtggggatcttgggtctgcgattggatctcttccgtatcctccctgaccagcctgtcagaggggccaacactgggcgtcgggcagccgtggaggctcgtgaggagtggagagggcccctggggctggggggcctgggaagggaggcctggatgcagcaggagcaccagagagagattcgggtggcaggtggagacgggggccagggaggttggattggggcctttgtgtatctttgcctggggactctgaatctagattcctgccacctttgaggtccaaggaaacagaaaccatgttgatttgtctctccgttgagaacacagctgtcgtccaacacagcgagtagcatcagaaattattctgaggtcttcacaaaaagactctgtagtgacagttcctgggtttgggggcctccatctgacatagcagtgcttgtctttggagacagaaatcgcctgtacgtgtttgggcccttcttcatctggcaaaccccgaaggaagggggtgagtgggcctcccgggacactcactggccactctgctgggcacagtgacactcattataactcgtgtgtgttaaatacattgggaaaataatgctttcagcagatatcaattaaatgtctactgtattctgcagcatgccccaggcttagagaaagtagaaagaggaaaataccatccagagacagtaacctcgagcattctggcatctttcctgctgagcatgcgtcccattcccaggacacacttgtgaccttctgggccttgtgacagggcagtctgctttcccataccctgggctgagcccctttgaagcccccagctgctcagtgaagttgcaggggtctggcctctcttctcctggaggtggccaggctgtgtgggagtgggggctctgcccctaatgcccccgcctcccgcaggcatctctgccggccttgccacaaccgtgagaaggccaagggcctgggcaagtacatctgccagcggtgccacctggtcatcgacgagcagcccctcatgttcaggagcgacgcctaccaccctgaccacttcaactgcacccactgtgggtaggtgcgcagcccggccctgcagttgtgggggcggggagccagggctggcccagggtaagggcggtggggcctccacctggggaagtgttgaggagggagaggggagcagggtgggcagacagaggggtcccgagagcaaggctgcagggcagaggtgggctgggggctgggaagcagccatggcaggaagcttctctctccagggctctgtttggggggcacttgagactcaggaggcgggtgggctggacccctagactgcagacgagggttgagatggagcagtggaagggacctgagggggcagggcaagagaccgggagtgggcttggtgctggtgttggagagaggagttgcataggcagcccctcagcccccgtcctcgcccacccccaccgtcccctccagtcctctccgtgcctatccagacaccccctctggtttggaggaggaggggggcccaagaacagacctgcttctcagaggcctgggtgcagaacacagcccactcttctgggctgtgcaggaagtctgtgctccagggcctgtctggggcacaggaagtcttcaaagtgcccagagatcagaaggcgctgccgcctcggctctgcagggacagaatgggcccctcggggagccgtgccctggggtggaggcgctgctggcatgaccctgcagaagggcaggggtggcacctgggggctgcacgctgtcttccaggaaggagctgacagccgaggcccgcgagctgaagggtgagctctactg

SEQ ID NO: 24463 - DNA, 2300 bp, Homo sapien
tctgcggggcagcaggtgatctccgcccgtgggtgtcggtggtggcagggggctccttgccgctgtgggtggaacgctggctatttaaggagaggaagggagaccacagcccctctggccctgaaaggctgcttcattcctgaggggtcccttgttgtgtcgggctgctcctctggctgctgctgctgctgccaccggagcgtgaatattctagtgtgtccctagcccatgccccccgcccccagcttggccacatagtctgagtgtgtgactgtctcagagactcagagcaggcgggggctgggtggggggcttgggctggagctgagggacacaacaggacgtttcagaaggggatgatttcctactgatggggggcagggaggggccggctgtcatggcaacaggcggcgctcccaggcctgcgcccgcagacggcggagggggcctgtgaacggagggtgggaggccgaggagtcttgctcacggagtgagaggcgactctttgaggacacttgctgtagggtccttgtgtcctgccctgtataatgaggccccatttgggcacacagaataaatcatggcctttatctggagcgaggaacagctgcaggagcctcataatggggcgctgtcctgtccgtgaggatgcggctcagctcagaggccgggtgctcgccggtgcagctccccttctgcacggaagcccatgaatctgaccgctggcctggggctcctccctggggtggctccgggctggggtgcctttgaatgctgccggcggccgcctctgagactgagtgaacaaagttcatttctctctgtctttctgaaaatgatacatccagcaacatgggaaaccaaatcacccttcctggtttcaaaagactttacattttgttgtttaaacattgaaaactgtatgtatgtggctagcatttaaggggcagtgtcttaaatttgtctcttcacatcaccctgtgcagctgggattattgccccattttacagacaaggaaactgaggctcaggcaaatgaagaaactcacccatcaacaaacagtaggaagcaacagagccaggatttgaacccaagcacatgtcactccagaacttaggctccgtgtgtgtgtgtgttttgtttttctgctgcattttgaatttagaattcttagatttgatcctaattcaacctgaaaaagaattctgaaggccacctttagatctgatgctgtgatctggtctgttgagaagctgtttcccatctggacttccttcaagagagatgggcttcccagtttgtctggcctgagagccagctgggtgtgaggtgtctgagccggggcgcaggtctctttcctgttgtgcccgcaggcggctgtctggaagaactggcccaggctggttggaaaggtggtggcttgaagctaaccaccctgagcagggcatttctgggctcacagaccttctgttattggggtgatcactgtcgatggcttcaagggcattgaccgtggtgatggagttttgaggcgttgagctgattcctgcatctttgagacagaaataattcctcgtgggttgagtgttgtcctgacgctcaggaggagtcaccagaatgtggagtggggtcatggggcctacatgctgagtctgggacagaggcaccgcagggggcatgggctggccgccataggcgccaggtggggcagctcagccccagacctgctgaggaggtggcctggggttggggctggggcacaggtgtctgggcaagggtgggcttcagggattgtggtgatgaagactgaagccacaggccacaactgcttcccgtcgctggggtgtaagagccagggctctggccagtagtcgaggggagatgatgcccaccgaggctcccttcctctcttgtagagtcattcattcaccgaggcattcggtcagctgaccctgagctgttgccccctgctgggcacatagggtcttggggaggcacagagagccagtcggcagcttagccagtgactgctgggcctttgtttgggccccttgccctgcacacagctgatgatgagacaccccagggcagatggagcacagtgctgtgcaggatggagtccagacacccagcagtagcaggtcctggggtccagggagggatgctgaatgggtggccctggcatctggggtctgcccaccataacctgggtggggatcttgggtctgcgattggatctcttccgtatcctccctgaccagcctgtcagaggggccaacactgggcgtcgggcagccgt

SEQ ID NO: 24464 - DNA, 2300 bp, Homo sapien
tggtcagggaggatacggaagagatccaatcgcagacccaagatccccacccaggttatggtgggcagaccccagatgccagggccacccattcagcatccctccctggaccccaggacctgctactgctgggtgtctggactccatcctgcacagcactgtgctccatctgccctggggtgtctcatcatcagctgtgtgcagggcaaggggcccaaacaaaggcccagcagtcactggctaagctgccgactggctctctgtgcctccccaagaccctatgtgcccagcagggggcaacagctcagggtcagctgaccgaatgcctcggtgaatgaatgactctacaagagaggaagggagcctcggtgggcatcatctcccctcgactactggccagagccctggctcttacaccccagcgacgggaagcagttgtggcctgtggcttcagtcttcatcaccacaatccctgaagcccacccttgcccagacacctgtgccccagccccaaccccaggccacctcctcagcaggtctggggctgagctgccccacctggcgcctatggcggccagcccatgccccctgcggtgcctctgtcccagactcagcatgtaggccccatgaccccactccacattctggtgactcctcctgagcgtcaggacaacactcaacccacgaggaattatttctgtctcaaagatgcaggaatcagctcaacgcctcaaaactccatcaccacggtcaatgcccttgaagccatcgacagtgatcaccccaataacagaaggtctgtgagcccagaaatgccctgctcagggtggttagcttcaagccaccacctttccaaccagcctgggccagttcttccagacagccgcctgcgggcacaacaggaaagagacctgcgccccggctcagacacctcacacccagctggctctcaggccagacaaactgggaagcccatctctcttgaaggaagtccagatgggaaacagcttctcaacagaccagatcacagcatcagatctaaaggtggccttcagaattctttttcaggttgaattaggatcaaatctaagaattctaaattcaaaatgcagcagaaaaacaaaacacacacacacacggagcctaagttctggagtgacatgtgcttgggttcaaatcctggctctgttgcttcctactgtttgttgatgggtgagtttcttcatttgcctgagcctcagtttccttgtctgtaaaatggggcaataatcccagctgcacagggtgatgtgaagagacaaatttaagacactgccccttaaatgctagccacatacatacagttttcaatgtttaaacaacaaaatgtaaagtcttttgaaaccaggaagggtgatttggtttcccatgttgctggatgtatcattttcagaaagacagagagaaatgaactttgttcactcagtctcagaggcggccgccggcagcattcaaaggcaccccagcccggagccaccccagggaggagccccaggccagcggtcagattcatgggcttccgtgcagaaggggagctgcaccggcgagcacccggcctctgagctgagccgcatcctcacggacaggacagcgccccattatgaggctcctgcagctgttcctcgctccagataaaggccatgatttattctgtgtgcccaaatggggcctcattatacagggcaggacacaaggaccctacagcaagtgtcctcaaagagtcgcctctcactccgtgagcaagactcctcggcctcccaccctccgttcacaggccccctccgccgtctgcgggcgcaggcctgggagcgccgcctgttgccatgacagccggcccctccctgccccccatcagtaggaaatcatccccttctgaaacgtcctgttgtgtccctcagctccagcccaagccccccacccagcccccgcctgctctgagtctctgagacagtcacacactcagactatgtggccaagctgggggcggggggcatgggctagggacacactagaatattcacgctccggtggcagcagcagcagcagccagaggagcagcccgacacaacaagggacccctcaggaatgaagcagcctttcagggccagaggggctgtggtctcccttcctctccttaaatagccagcgttccacccacagcggcaaggagccccctgccaccaccgacacccacgggcggagatcacctgctgccccgcagacccctgtcccttcctcccggaccagcagctagaggtaag

SEQ ID NO: 24465 - DNA, 2300 bp, Homo sapien
tcacaggccctgtcaagggctgtgttcctccctccttttacctctcctccacagcccccttcacagccctcagcccttccccagggcttcagccaagcctgtctccctctcccaagcatcactcaccccgccttcttcggccctcagctctccgccctcaccgtggttttagcagtcctagggaaagtgccagccgagaccagccagaccaagtcagagtactgtggaacctggattcctggggaatggggtccccatgaggaactccacattggactaagaacagaccctgttcctggaagcagcaggaaaccatctctggtgttagaacttcaggcatcttgaaacactctgaagccgggggcaatcttttcaggtaggggaacctgcctagagaaatagctaaaaggtaatattattaggtagttgccctcccctttgcttgaggacattgatggccaggtgctcgggccagccctcaccctccatgtgagggccacagcagctggccactcgctctcctgaaggaagggtgcggcccacccttccctagggctagggccaccaccatgcctgcttctcctccatatgaggatggctccagcctcctcctcgaggggctgctgtgtccatgaacagtcaccatgccctctctgccccgtgccaccagcatcctgagacagccctgtggaatcagtaagaggagaggggctgggcgcagtgactcatgcctgtaatcccagcactttgggaggccaaggagcactttgggaggccaaggagagaggatcacttgagcccaggagtttgagaccagcctgggcaacatggcaaaaccgtctctaccaaaaaatacaaaaattagccgggtgtggtggtgtgcgcctgtagtcccagctattcaggaggttgaggtgggaggatcacttgagccctggaggttgaggctgcagtgagctgattgcaccactgcactccagcctgggtgacagagggagaccttgaaaaagagaaagaaaaaaagaaaaaagagagggaggggaggggaggggagggggggaggggagggaggggaggggagggaggggaggggaggaaggggagggagggaggaaagaaagaaaaagaaagaaagagaaaagaagaaaggaaggaaggaaggaaaaagaaaagaaaaaaagaaaaaagaaaagaaaaaaggaaaataaagaaaagcaagcaaacaagcaaagcgaagtgagagagagaggaaggtaggaaggaaggaaggaaggaaggaaggaaggaaggaaggaaggaagggcagggagaaatgtgcagagtgaatttgctgcaggcaggaccccggctgttcggtgcagagccaggctcgcccaggatgaggaccctgccagggctgtggcccgtgcctcctcccctcctgctgccacaatgggcacaggcaggatgccagcttctcttatgcaaacctctctccagcctctgcttcagcctggctgtgcagggtggggatggtggatactgggaagccaggtgcccagaggagccccagaagctgtgccatcatcagcacccacctggccgaagcccgctggtgaccccaattcaaaggcaggccaggtgcgctgtcctgccctggttccgggctgcgggctgctctggccccaccgcctgcccacactgccactcgcaggcctgggttggggaggcagagtgtttgggaccctcactctccttcttcaatcttctgagttgactaaaatcaaaacaagagtgggtttctctgctgagggtggggagcaccctatccagacccagggttcaccagacggacatgacttgttacccaggactgtcacagggctctgcacttggccttcaaacgtgggcaagccacgaggcctccaggcctctctggggctgcagatccgtcctcaacagcgctggccagtgtctctgacgctgggtaaaatgggtcttcccctcctggaagagatgctgccccctggtggtggatctactctgggagagaaaatactcccagctggcctgatacccaggcacaggcttctcctaaacacaggtctccccacctgtcaggatgtccaaacggagttggtgggctggatccagaaagcccccaagagagatgctgaaactctcaggtgggtaaaaagagtagacctctgacgtcccagggtacagcccttgctgccatcctgggggcaccctcctaagtgccaggggcaagccatggtcaggggaagcagaaagcggtgacaccccggccactgcacctg

SEQ ID NO: 24466 - DNA, 2300 bp, Homo sapien
cagtgtgtctccgggattccagctcctcctcagcccaagccttggcaggtgagttctgttcatcctgagtgcctggaccctccctgacccacctgcccacaggtgcagtggccggggtgtcaccgctttctgcttcccctgaccatggcttgcccctggcacttaggagggtgcccccaggatggcagcaagggctgtaccctgggacgtcagaggtctactctttttacccacctgagagtttcagcatctctcttgggggctttctggatccagcccaccaactccgtttggacatcctgacaggtggggagacctgtgtttaggagaagcctgtgcctgggtatcaggccagctgggagtattttctctcccagagtagatccaccaccagggggcagcatctcttccaggaggggaagacccattttacccagcgtcagagacactggccagcgctgttgaggacggatctgcagccccagagaggcctggaggcctcgtggcttgcccacgtttgaaggccaagtgcagagccctgtgacagtcctgggtaacaagtcatgtccgtctggtgaaccctgggtctggatagggtgctccccaccctcagcagagaaacccactcttgttttgattttagtcaactcagaagattgaagaaggagagtgagggtcccaaacactctgcctccccaacccaggcctgcgagtggcagtgtgggcaggcggtggggccagagcagcccgcagcccggaaccagggcaggacagcgcacctggcctgcctttgaattggggtcaccagcgggcttcggccaggtgggtgctgatgatggcacagcttctggggctcctctgggcacctggcttcccagtatccaccatccccaccctgcacagccaggctgaagcagaggctggagagaggtttgcataagagaagctggcatcctgcctgtgcccattgtggcagcaggaggggaggaggcacgggccacagccctggcagggtcctcatcctgggcgagcctggctctgcaccgaacagccggggtcctgcctgcagcaaattcactctgcacatttctccctgcccttccttccttccttccttccttccttccttccttccttccttcctaccttcctctctctctcacttcgctttgcttgtttgcttgcttttctttattttccttttttcttttcttttttctttttttcttttctttttccttccttccttcctttcttcttttctctttctttctttttctttctttcctccctccctccccttcctcccctcccctccctcccctcccctccctcccctccccccctcccctcccctcccctccctctcttttttctttttttctttctctttttcaaggtctccctctgtcacccaggctggagtgcagtggtgcaatcagctcactgcagcctcaacctccagggctcaagtgatcctcccacctcaacctcctgaatagctgggactacaggcgcacaccaccacacccggctaatttttgtattttttggtagagacggttttgccatgttgcccaggctggtctcaaactcctgggctcaagtgatcctctctccttggcctcccaaagtgctccttggcctcccaaagtgctgggattacaggcatgagtcactgcgcccagcccctctcctcttactgattccacagggctgtctcaggatgctggtggcacggggcagagagggcatggtgactgttcatggacacagcagcccctcgaggaggaggctggagccatcctcatatggaggagaagcaggcatggtggtggccctagccctagggaagggtgggccgcacccttccttcaggagagcgagtggccagctgctgtggccctcacatggagggtgagggctggcccgagcacctggccatcaatgtcctcaagcaaaggggagggcaactacctaataatattaccttttagctatttctctaggcaggttcccctacctgaaaagattgcccccggcttcagagtgtttcaagatgcctgaagttctaacaccagagatggtttcctgctgcttccaggaacagggtctgttcttagtccaatgtggagttcctcatggggaccccattccccaggaatccaggttccacagtactctgacttggtctggctggtctcggctggcactttccctaggactgctaaaaccacggtgagggcggagagctgagggccgaagaaggcggggtgagtgatgcttgggagagggagaca

SEQ ID NO: 24467 - DNA, 2300 bp, Homo sapien
gacactacacttcagactggatctcatccctcctggcttaaaaccgcctcgcccccagcctgttctccggaccaacagggtccagatcctcagtagacaccagtggccctttgacaggtggcctcacggacctctccagcttccacgggggcacctccctttgcaccccaccatcccaaaagggccagtgtcctctctggccaggcctgggacccactgctccagcctcagcccggcatgcccctgcctcagtgcctcatcccctgctgtcaggtcctgacccaacaagggcctgggctgctcatggggatgataggtggtttgcttgtcctctctctgcgacccctttgcagtttgaaggccggaagtactgcgaacacgacttccaaatgctgtttgctccgtgctgtggatcctgcggtaaggccggtgacagtacacatcctgggctgcctgggaagtgggcagcagtggcggggggcagggggccgagggggtacacagaactggcccagctctttcctaactccccaccttgcctctctgagcggcagccgtcaggccccctacaggcatcaccatcccacgagggagcccatgggccaggcagagagcaggcggagtgctaggtggacagggcttgggagggtccgaagaggggacaggcacgtgctccccagccagcagggacctgtcttcttccaggtgagttcatcattggccgcgtcatcaaggccatgaacaacaactggcacccgggctgcttccgctgcgagctgtgtgatgtggagctggctgacctgggctttgtgaagaatgccggcaggtgaggtggccgtgttgggccagagaggactgggccacagcccttcctggcacacctgccacctctcctgtgtgctacccacttgctgagggcgcagaagggtcccggtgctgcagcctgcactgatgtagctgccctccctccaggtcaccccggggcggatagtccagctcccagtttacagggccccacgctcagcgagctcctggcagcctctcgggagccatgagaaatcctcacactctgccacccccctggccaccccatctactgaccccacctgtccaccttctcctgcctgtacctgtgcagctcagtgtggctggagggagatgcccacatttactctaaattgagggccacaaacctcatgggtactccagaagttcccaccttctgcgaacccttggtctctcatcctcccttcccaagcactgtccctatagcaggtggccttgtctcccacctcccctggccctagctctgagatcccgtgcagcccggcctctgtctgtgagccctgttcatccccacactttctccagggcttgcttctccacgccactctctcgtcctttctgaaggactgggctggggagctgggttaaaaacactgctgggccttcctccccggcttctcccagcacacccgctgcccctcgcgtgtgctaccctggcctcatctgcccagggacccacacctcctcttgacccctcagcagccctcaccacagctgctgaggtgcagaaacgccccccttctggcacccgggaccctgagttcctgtggttctgcccgcccccacagctgcacctgctcactcccctcctctgagtcacctttctccctgtctctccatggggagtcgtctggggctccgtgcccggccctcatggctgcccttgcagacagaatcctagagccctaaatggcacatgtgtctggagaattccaggctccacttcaggcctctctctcgctgtcctcagctgcccacatgtcacctccacttggtgtccaccaggcatcccaaacgcaatgaggcacaagcagtttgggattctcctccactgaccaccaaggctgcctctgcatgcgtcccctgtatcagtgagaggcagcgccgacccccagaggccccagccatgcttcccctgccacactctctctgtccgggcactctgctccctcccgcagctcctccgagatgcttccccgacactaccgagctcttgtccgtgtgctgcccgtgagagaggcacgtggcctggggcctggcgtccggcccactgtcctcggagctgggcggtgcctggcattgagcagcttgtctaaatgaagggctgaggggcagacggtgcagtgcaggggccgagggacagcaccaggagctcgtgctgaccagcaacgtcgccgacagggtgtgtggagcgagcccaatctccttcctgagccaaggtttgcacagggcca

SEQ ID NO: 24468 - DNA, 2300 bp, Homo sapien
aactcctgggctcaagggatccgcccaccttggcctcccacagtgctctggatgacaggcttgagccattctgcacacgcacccagctaccctcttgcctgctctgtgtttgggtggttatgtgtttattggaggcagtcagtttgaaactaactcatggtgcagaggatggaaccatggaagactgagcagtctggattcaagtgtggaccccgctctgctgtgtgagcttgggcaagttactcaacctctttgaggcttaggtcccttttctggaagaggccataataatagtagctgcagtattgccctggggattaaatgagagtgtgaatacagagccgctcacctgtgctgggtggtgttctgtgtgcgagactctctggtccctgaagaaggggtaataggggcccaagtgggagttgactgggcccctgacaccccaaggggtgggcactacaagcactgagcagcctggaccctgggttagagcgattttcctgatcctgcagagcgtcttcactttttaatacgaggtgtgtctgtcgggcgcaggcccccgcgtgtgccccatctgcacccctgaccagctctgactcactcctcctgtctcctgcccccagcaatatgtcggacgccttggccaacgccgtgtgccagcgctgccaggcccgcttctcccccgccgagcgcattgtcaacagcaatggggagctgtaccatgagcactgcttcgtgtgtgcccagtgcttccggcccttccccgaggggctcttctatgaggtgaggacactactgagggctttctcagacccagctcggagtctgccctctatgagcgggtgggccgggctccatgcagtggtcccgactggtgacagggccaggtctggagccagcccagaaccaggcttgagctcctgcacgggcccatccttcacctgtgagatgtgaacagcaccccaggtgccctgggtgctaacagagagccacctttcaccagcctcctctgggcagatgctgggcaggccctgggggcaggaagagcctgccctggtggtgcttgccctccctggggactagacagtgagcacagcaaccgcatggcccaccagctggtgctgatgccctgggggtcagggttcccggggtggggtgcggtggtgctcagggaaggtgaggtttgggcacacctgaggggagggagacatactgggcagagggcaccgcatatgcacataccctgtggtgggagaacatggggtgtatggagagcagtaggaagactggtgtgatggaagccgagggcatgagagggagaaggccaggagctgaggaaagggaggtggatctcgcttggccccacgggcctctacggagccataggcttcccctctgcaagaggcaggagccacctcggggtgtggagcagaggagtcacactatctgctgacatttgaaaaggtgacctggccgggcgcggcggctcacgcctgtaatcccagcactttgggaggcggaggcagatggatcacctgaggtcaggagttcaagaccagcctggccaacatggtgaaaccctgtctgtactaaaaatacaaaaaatgagcctggcatggtggcaggtgcctgtaatcccagctactcgggaggctgaggcaggagaatcacttgaacctgggaggcagaggttgcagtgagccgagatcgcgccattgcactccagcctgtgggacagagcaagactccatctaaaaaaaaaaaaaaaaagaaagaaaaaaaaaaggaggcttgtggccgctgtgctgaggagaggatgtaaggcggggcaggaacagaggctgggccaggaggctggggggaccaggagctgaattagtgcaatcacccagatgaaagtgaaggggcccccaccagctcacaggagcagtcgttaaatcatcaacaatcttgggagctggttgggcaacagagttattgtttaaaaattaaattatatcagcgtacaatgggatacaattttattaaaaacaaaggtaacaaatactcaaagcataccacttgctaattattttgttccactttactatcgtctatgctgatggggttatttctgtccattgtgctggtgtggccactgcacatctcccctcaagtccacatcgatgtcatgttggcagccaggagttggccatgacgggaatattcacaccatggacactggcaaacgccccacagcagggcctgcctctgcgccccagagagctggctgttgagcatttaccagaacatcacttgtg

SEQ ID NO: 24469 - DNA, 2300 bp, Homo sapien
gaacaaactttccacaccaagcaaaggaaccccaactggttgctgctgtgggttcgagtggcctggttttattcccttatttggcccctcccacatcctgctgattggtccattttacagagtgctaattggtctattttatagagtgctgattggtcagtttttaccaagtgctgattggtgtgtttacaaacctttagctagacacagagcactgattggtgcatttacaatcctttggctagacagaaaagttctccaagtccccaccccaaccagaagcccagccagcttcccctttcagtgggaagcaaggtaactggggagtgctagttgagggtgtgtttatgaaacggcgagggaggaagggtggtgaagcagctgggctagcagggcaggagtgcccataaccacaaggaaagtcacaggtcccagcagcacctggcccgtgggagtagggtcagcacagctggaagccagagggggcaggcgtgtgggtgcaggccctaaacagcagttcctggaggcagagaacaggagcctggaagggggtgcgagggatgtgtgctcactcactggggtctagaggtctggctttaaggcggaatctgaaaggctggggctgggtggaagtccttaatttggcttcgttttctgggtccttggagtgaggaattccaggcccagagccatgggatttcctgttgatttccgacttctctaagactcccaaggtctcgctcatgggcaggcactggaatgtcctccctgccaccttgggtgtgtgtttcagaagaggaggttcacagtgttctcccggaaggaaaccaagcctgtcctagtgaagccctgcccagccctcgagggtggcttggggcggccaggctccaccttggtggcctgcctggctcgccccgtggagaccagcagggagctgggagcactgaggaccagccgctgggtgccgaggcctcctttcttcttggtttcttcccaactcctgttgccaccatctttgcttccttgcccctctggcctaaatgtgggctcgcatggtggctttggtctcctaagcaccccagagggcaggccaaggtggacagaagcccagcatgcccagaaagcctggttgaatggccttccagacagcctctgccacatgggtccctaagcagagaagaaaggacagcctgggtgcccctttcaagtttccagtccatctccatttcgcagcagcctcctgtgagaccctccgcccacagcccatgcccagaccctaagcgcagccctgtcgtccacccctggactcatcctaaggcccctcttctctgtggttgacactcttcagactggccctgcccagattgcaggccgcagaacagcccgacaggagcctcactcaccaagcatttccctcatgatgtcgcggcagtgactgctgggtgggattcatcctgggaggcagagcaggcggagaggtattcccaaaggcactgcactcgagtcctgccaccacccggctgcaaccaggcagacgttaccagctggttgcgtcactccccagcgagcctgatgctccctctctgcccagtcttccaggaatccactggagttgacacttgagacagaacccacgttctcccttcctagcaaaaggtgtggggtatccggttctttgaaggtcgtagaggcagttggggtgtttaggactacatcctgaccctgtttttgagtctaaaaggcccctcctggctgtgccgaagggccctggggctggactgattgcgggcctggctcactgtgggcttttcccctgtagttcgcatttcacccctcccagaaggaaacccaccactgactctggggacaggcagtgcccagtatggatgagatttgctccccctcaccacactcccgtctcgtctcaaagattcatactcttgtcttttttatttattttttattttgagacagggtcttgctctgttgcccaggcctgagtgcagtggcactcagcctcggcctcccaggctcaagccatcctcccacttcagcctccagagtagctgagactacaggcttgcaccaccacacctggctaatttttttgttttcttgtatttttattagagatggattcttgccatattgcccaggctggtctcgaactcctgggctcaagggatccgcccaccttggcctcccacagtgctctggatgacaggcttgagccattctgcacacgcacccagctaccctcttgcctgctctgtgtttgggtggttatgtgtttattggag

SEQ ID NO: 24470 - DNA, 2300 bp, Homo sapien
aaatttagactgatacatttggattttctatttcttcttgagttcgttttggtagtgtccttctaggaatctctccatttcagtaggttatttcatttattggcatacagttgttcataatattccattctgctacctccttactgggaccacgagctattattattcaaggaagccatggagttagggagcaggaataagggactaggataagttaaaacaacacaaacctcactggtttgtgtttgtttgtttgtttaccaagattcatctgtttttcttgaccaaatgttcctagggttactgaaaacctttggtggatttgcagagttctgaaagagtagattctgataatttttgctaggtttttcattgcttttatggagggatgaacttctggaggtccttactccaccactttctgctgacatcactctcggtgtttttgcaaatatctagagccagagcactgaaccaaatcccatttggtcatggtgtataatactttgtatagagttctagattcagtttacagtatctgtggctcccaatcccatccctgcagcaggacaggctgcagaatgggtggtaaggttgtgcagagatttgggatttgggctcaatcagactctaagcctctctcaatttctagccttcgatgtccgcttttatagtaaatatttgttgaattgattagtacttggtaaacttgtgcttgaacttcatttacagattatgttgcacaaaacacttgtggctgtagcctcctttccagtgctatatgtgacccttggagccctaaataaatgtttcctccttacagaaaactgcgggtctgcatgagagtcctggattctagtgttgaggatttccacatggatgggctgagtcgggagtggtgagagggtctaggccctatggcattgacttgtagctgctgttaagaacattttcggtgtaagttttcttaagcattcggctacctacatcagagagtcagcggtattccctattcattttggctcctctgggctcagcttctccatgccctttagcccctggggccacctttaaaaactatttgttgaactgatcagtgttgggcaactttggaattggactacatttacaaattatactgtacccaatgcttgtcgtcacttgactgccagggtgcttaatgagtacctcctcctgttgggacttgctgggtgagtgtgttcctcagtggcgtgtgggcctggtatctgaatgccagtgagcccctccaaggctttctcccaccctagtttgggaggatcagtgccctgctgtctttagtgacggctgccagctcttgctttcagaaggcagaagaagatactgctcaagctttctgacctttctagaaaggtctttcagggaaatgggatcaatgctaaagatttccatgagtgctctggatctttattgtactgctgaccaggcttaccttggtcacagtttggatgcctaccgcgggtgtttatgaatcacaagtaactttgccagtctctctgggtaaaaatgcggggtacatggtgccttcctggtggttgccaccaggtccctctgcgtctgctcccctggaagctggaggattgccttttctctaaaataaggacctcttttggggtgcctgaccatttgttggccagatccagaggatcggctctgccctggtctgggtgccccacggtgatgtttgtggcagagggtctcagagaagggagcaaagcagaatgtgggcctgtgtggctccggtcctcggtttcctaactgttggcagggatcctaaaggcgccaggtcctccctgtcctcctcagctgactctgccctcctcagtgtgtccacgggcacaggctttcctcctggcaggtggcagccggagacctcctgggtgtcctgccgccactgtggacctcacctcagtgctgtctggggccttcccagaccagtcccctcccagcgggacccaacccccgccagcctcagctttcaggagctgcccccgcggcgcgaacaatatcctttctatttggagttgactctgctgccctttggagatcccagcgcgtaacgtgagctcgcgaccagcgcgggggaggcgcccacacgcccgtcccgtcttggtgtctggccccaggcggccgcgcctcccctccgaggtggtcccatagcccctgcaccaggcggcccgcgcccgcgacctcaaggcggctgccccgcgccatggcggcccggctgggtgcgctggccgcgtcggggctgtaccggcggc

SEQ ID NO: 24471 - DNA, 2300 bp, Homo sapien
aagtaacaactgcaaaggcactccacaataccagccacttaggaacaggtgtcttttcccagcttatttctgcaggtggaactgcaggatactatcaactcatctttctgaacggcaccagtttatttgtgggttgctaattcacaccgtcatttctagatcatctttctctgctgccaagaccggagtagcaccacatttacacatcaggccgcccagctcccaaacctcagtgtgacatctgggctgcttccaaagatgagctgcacgccactgtccagctggaaatatctgcctttaggcagggcgggggttttttgttttgtttgtttgaaaatttcctccgaagagattccctaaatagtttatattacccctccatcttaacgcctctaatggtagcttctcagcgcttcattatacagaggcgtgcctggttcccctggaaacctgggagctgggcatttggttttgtcgtttaagaaatatctttcgccaagttagggcgatggcccgcaacgggggatgaaatcggaatttcccggggaaagcagctttgcgactgaagagggacgcctctcggctttagcctccctgggggcgggactgcgtggactcggcggtcccgggtgcctcgggagggagtcagtgcccagatccgcggtgggaactccgggctaggaaagcccgggagggaggtggtctcagcatcgcccccacgcctaccatctcctgcacgcgtttgcggttggggcggcccagggactgcagagggggcgccgggcggggcgtcccggcggggctgtgggggtgggggtgcttgttcgcgtttattataactttactccctttaaaaggaaagctatgcccggaatccaggaggtggcgagcagagcccgggttgggaaggacttgacccgcgcccgccgctggccgcgctccgtgtccctggagctggggctgtgcgggagcggggcccaccctctacctttacccctacttttacccccactcccacccccgcctcactctcacccctccaaccccaccgtcagccccacctttaacccccacccctccaaccctacccgccgccacccccacctgccacccccacccccacctatactcccgcaacctcccaccgtcacctccccaacacccccaccaccctcagccttgacctccccatcccaccccgccccgcgggccccaccctgccacccccgcccacccctctcgcgggcggagcggctcttggccttttttgggcgtctccctgctccgcggcccgggctggcgggcgggcgctcggctggcggctgcagcagcagagggagacccgcggcaaccccggcaacccagggctcggcgtcgctgccaccatgacgggaaggtaacggcccccacccacgcccccgggccggggaggcgggactgcgggacccctggccgaggcgcagctcgccctcgtacagccccgcggcgccacgatccccgctccgccctggcgcgtcggattctcgcagctgccggggcggcagcgcccgtcggggcaggggtcccccagcccccgcgcctcttcctctgggcgagcgcctgcagcggaaggtggagctcctgcccacccgcccgctgcaagatgggacagccgtctgctcacaaccgacgcccagggctgcgggagggggtcttgtccaaggtcagacaccaaccacgggcaaaaggttcaaaggttgcgtgcctcccccaacttccccgagcccgcgctgtgcgatccccgatcccggtgagtgtcatctctggagccttccgtttcctcctctgtaaacctggggtggtaaaaatgttaaaaatgttgaagggtatgttggaacttggccagagctgcgcccaagcaccagctgtgcaggggttggttggggacagggcgctcccctgggcctggcccaccctctgctctcaggcccctcgttgccatttcacagatgaggtcaccagaggccacagaggctgagccactcaggaggccagtcacaggtccaccagtgtccggccagtgtttgtccctgcagccctttctggaacctagctgggtacaagtgcatgactcaggactgggtgggagggggctgtccctgaggccctggtctcccccagccaagtcctggcagggggatgctgttcttcaggatcccatgacctggggctcttggggagccccagcccggagagtgacctgtggctttgctggggaaaggggcttggagggtacagggcagtgtccaggattgcagtct

SEQ ID NO: 24472 - DNA, 2300 bp, Homo sapien
agtgtgtgaatgtgtgattgccagctctttcctgcaactctgccctcttggctgaactgtgggaggctggccctggctccttgaagcctctgcatctccagcagggctaagccatgcccacaacccctaccagctgttactgagcttgccctggcccagggatgaggcacactgggagctgcatagggtcctggtttggccacatacagatccgtgtgtgctcagctatcatatgcagggaggcttttgggctaaaaggcaggaatgtggtctcctctgtggagagcatgggcctctggtgtaatgctttcaacttttcatcctctttggttcccacaagaccctgatattcaattaaccgtccagcagtggatttctggtgcacggccccagcatgcctacacctctgtgtcagtaatggtggaaagcctttctccctgtatgagcaggtgagccaagaaattatccatacttaagcttaatcaaccatcaaattacagttaagccgaatcagctgagacacgctcgcaacaagaagtaataactcgagacagtcggatcacctgaggccaggagtttgcaaccagcctgaccaacatggtgaaacccatctctatcaaaaatacaaaattagctgggtgtggtggcatatgcttgtaatcccagctacttgggaggctgaggcaggagaatcgcttgaacctgggaggcggaggttgcagtgagcggagattgcaccattgcactccagcctgggcaataagagcgaaactccgtctcaaaaaaaaaaaaaaaaaaaaagtaacaactgcaaaggcactccacaataccagccacttaggaacaggtgtcttttcccagcttatttctgcaggtggaactgcaggatactatcaactcatctttctgaacggcaccagtttatttgtgggttgctaattcacaccgtcatttctagatcatctttctctgctgccaagaccggagtagcaccacatttacacatcaggccgcccagctcccaaacctcagtgtgacatctgggctgcttccaaagatgagctgcacgccactgtccagctggaaatatctgcctttaggcagggcgggggttttttgttttgtttgtttgaaaatttcctccgaagagattccctaaatagtttatattacccctccatcttaacgcctctaatggtagcttctcagcgcttcattatacagaggcgtgcctggttcccctggaaacctgggagctgggcatttggttttgtcgtttaagaaatatctttcgccaagttagggcgatggcccgcaacgggggatgaaatcggaatttcccggggaaagcagctttgcgactgaagagggacgcctctcggctttagcctccctgggggcgggactgcgtggactcggcggtcccgggtgcctcgggagggagtcagtgcccagatccgcggtgggaactccgggctaggaaagcccgggagggaggtggtctcagcatcgcccccacgcctaccatctcctgcacgcgtttgcggttggggcggcccagggactgcagagggggcgccgggcggggcgtcccggcggggctgtgggggtgggggtgcttgttcgcgtttattataactttactccctttaaaaggaaagctatgcccggaatccaggaggtggcgagcagagcccgggttgggaaggacttgacccgcgcccgccgctggccgcgctccgtgtccctggagctggggctgtgcgggagcggggcccaccctctacctttacccctacttttacccccactcccacccccgcctcactctcacccctccaaccccaccgtcagccccacctttaacccccacccctccaaccctacccgccgccacccccacctgccacccccacccccacctatactcccgcaacctcccaccgtcacctccccaacacccccaccaccctcagccttgacctccccatcccaccccgccccgcgggccccaccctgccacccccgcccacccctctcgcgggcggagcggctcttggccttttttgggcgtctccctgctccgcggcccgggctggcgggcgggcgctcggctggcggctgcagcagcagagggagacccgcggcaaccccggcaacccagggctcggcgtcgctgccaccatgacgggaaggtaacggcccccacccacgcccccgggccggggaggcgggactgcgggacccctggccgaggcgcagctcgccctcgtacagccccgcggcgccacgatccccgc

SEQ ID NO: 24473 - DNA, 2300 bp, Homo sapien
gtacatataatgaaatgtgcaaatcctggccatatattccatgagttttaacaaaggcatatacacttgtgtgacccaaactcctactaaaacattgcctgttaccccagaaactccctcacattccttcctagtcaacccctgtcctgccacctcagggcagtccggggtgtaatagaccagcctgaggcagccaccgttctgattttttctaccacagacaaatgttgcctattctagaacttgatatagatggaaaaggtgctcttttttcattcagtcagtatttctgagattcacccctgctgatgctagagtgttgtgtctgtctttgcttagaactctccatctaagggtggaatcctacttctgctgtggccctgctgctctgccctgggccctctcctttatttcccgtgcccctccacctgccacctcccctttttccagacccactggtcttctttctgaccttgcgtaccccaagctcatgtcacctcagggctgttgcacttgctgttctgccggaatgcttttcctgcagatggctgagggctggctctttcccttattctggtttagcttgaatgtcacctgctcagaaactttccctcacccttcactctaaagcagccaccaccattgtccttttctttgcagcacttacccttgtctaaaatctagtttgcgtatttatttatttgtttattgcccatcctccacctcctgctaaactccatgagagcctggtccatggcttctttctccccctagtacttccagtgcccatgcggtataaatactcttgaaggaacaagtggataagtgtgtgaatgtgtgattgccagctctttcctgcaactctgccctcttggctgaactgtgggaggctggccctggctccttgaagcctctgcatctccagcagggctaagccatgcccacaacccctaccagctgttactgagcttgccctggcccagggatgaggcacactgggagctgcatagggtcctggtttggccacatacagatccgtgtgtgctcagctatcatatgcagggaggcttttgggctaaaaggcaggaatgtggtctcctctgtggagagcatgggcctctggtgtaatgctttcaacttttcatcctctttggttcccacaagaccctgatattcaattaaccgtccagcagtggatttctggtgcacggccccagcatgcctacacctctgtgtcagtaatggtggaaagcctttctccctgtatgagcaggtgagccaagaaattatccatacttaagcttaatcaaccatcaaattacagttaagccgaatcagctgagacacgctcgcaacaagaagtaataactcgagacagtcggatcacctgaggccaggagtttgcaaccagcctgaccaacatggtgaaacccatctctatcaaaaatacaaaattagctgggtgtggtggcatatgcttgtaatcccagctacttgggaggctgaggcaggagaatcgcttgaacctgggaggcggaggttgcagtgagcggagattgcaccattgcactccagcctgggcaataagagcgaaactccgtctcaaaaaaaaaaaaaaaaaaaaagtaacaactgcaaaggcactccacaataccagccacttaggaacaggtgtcttttcccagcttatttctgcaggtggaactgcaggatactatcaactcatctttctgaacggcaccagtttatttgtgggttgctaattcacaccgtcatttctagatcatctttctctgctgccaagaccggagtagcaccacatttacacatcaggccgcccagctcccaaacctcagtgtgacatctgggctgcttccaaagatgagctgcacgccactgtccagctggaaatatctgcctttaggcagggcgggggttttttgttttgtttgtttgaaaatttcctccgaagagattccctaaatagtttatattacccctccatcttaacgcctctaatggtagcttctcagcgcttcattatacagaggcgtgcctggttcccctggaaacctgggagctgggcatttggttttgtcgtttaagaaatatctttcgccaagttagggcgatggcccgcaacgggggatgaaatcggaatttcccggggaaagcagctttgcgactgaagagggacgcctctcggctttagcctccctgggggcgggactgcgtggactcggcggtcccgggtgcctcgggagggagtcagtgcccagatccgcggtgggaactccggg

SEQ ID NO: 24474 - DNA, 2300 bp, Homo sapien
gtcgtctagctatttatcttacttctgtttctttccaactttttgctttctcccttttctcctgtcttataaactagggaaaaggggaggttggggagaaactgagaaggccaacaagagaagtggtggcctcataccatactgtaacatctggaatatgaaaaatgagtttgagagtgaattggttttcaaacagagtctgttattatttttctttcttttaaaaaaatatttgtatgagagacagggtgtcactctgacactcaggctggagtgcagtggtgcaatcatagctcactgcaggctagatctcctgggctcaagcaatccttctgcctgggcctgccaagtagttagagctacaggtactggtcaaactgttttttatttatacaaatccagttcaggaatagatatgttgggtaaagtgatatttgagattctttgagcaaaacaggatgatatacactctacatttaggcagctcctcatacaagtgtgaaacttaccaagaatgtttacaacaacacactgtaaatatttactgagcagtttacactctggcatatagcatatttataacatgcgggtaggttatttttaaaaatgtaacaatacatgggactgggcattgtggctcacacctgtggtccaaactacccagaaggctgaggcaggaggattgcttgagcccaggagtttgaggctgcagtgagctataatcactccagtttactccagaataggaaacagagtgagactctgtctctaaaaatccaaagtggctatagagtaatacatcactggtttcaacacatcttctagtgcctgctttatctctagctggctctctgttgggctccgtgttgtgtaaaagcaaatagtcccccgctggaggggtataaaatttgactgaaaatgcaaaccagttgtgctcataaaagttggacacagaaatcatgtacacagtttacataaatcccagcactccttcttccaaatagcacaagaccagggagatcctggggcacagcacattgtgagtggtgcctctcagctacaagacccagggcagccctgatgcgcactgatacgatgcagaggcagacagctgccatttatttatgaagaaactgatatgaaattgcaaacagaggccagtgctgcccagtggctctcacccatcaccccagcactttgggaagccaaggcgagaagatggcttgagcctgggaggtcaaggctgcagtaagctgtgatcctgccactgcattccagcctgggtgacagagtaagactctgtctcaaaaaaaaaaaaaaagaaagaaagaaagagagggagagcgagagggagaaagaaaaggaaagagagagagagagaaagaaagagaaagagaaagaaagaaaggaagaaagaaagaaagaaagaaggaaagaaaagaaaggaaggaagaaaggaaggaaaggaaagattgcaaaccacaaaatgatcacaatcaggcaaaaaataaatgtacatggttaaaagtgaacaaagtgttgcagtacccatcttctggaggtgatttttcttctttctacttctgggcatttctaatacaatgaaagttttatagcagaaaattataaaataattcatttatgttattttaatataaatagtcctgagatattcctcttttcagggaaaatagtacttggcaagacagcatcctagtagctgttcttgggttgttcacgtaattagttgccaggattcttttcactgtggggcttcttttgcagtctgtccgtggatactgtgaacatcaggctactcggccgggctcctgcgctcagggcttcgagaaatgctcattttggggctgcccctctgccggcctctctggattcagagggcagccgctgctccttttgttttgtgggcctggctctgggcccggagcagcacctccctggggaggccgcctttccttccgcggcttcttccgtctcctcctgaccccaaggtgcctccggcctctgcctccagctaaggacctctggccaagcctcctgcccagggagaggtgaagctgccgtgcctgggtgccccgtggtggccggacactcctggcggctgctcagtcttgcacgtggctgtgccaagcgggccaggcagctgctatttccctcagagaagttgctggcggcgctcagggaaggaagcacccgaggaggcggagcggcatctcagccacagaggtaaagactctgtgatgggcacagggccccgggaggtcctttccacctgccaatcg

SEQ ID NO: 24475 - DNA, 2300 bp, Homo sapien
agttttggtcaggggttaataatattattattattttagccagcagggccaggtggtggtgccaaggtcgtctagctatttatcttacttctgtttctttccaactttttgctttctcccttttctcctgtcttataaactagggaaaaggggaggttggggagaaactgagaaggccaacaagagaagtggtggcctcataccatactgtaacatctggaatatgaaaaatgagtttgagagtgaattggttttcaaacagagtctgttattatttttctttcttttaaaaaaatatttgtatgagagacagggtgtcactctgacactcaggctggagtgcagtggtgcaatcatagctcactgcaggctagatctcctgggctcaagcaatccttctgcctgggcctgccaagtagttagagctacaggtactggtcaaactgttttttatttatacaaatccagttcaggaatagatatgttgggtaaagtgatatttgagattctttgagcaaaacaggatgatatacactctacatttaggcagctcctcatacaagtgtgaaacttaccaagaatgtttacaacaacacactgtaaatatttactgagcagtttacactctggcatatagcatatttataacatgcgggtaggttatttttaaaaatgtaacaatacatgggactgggcattgtggctcacacctgtggtccaaactacccagaaggctgaggcaggaggattgcttgagcccaggagtttgaggctgcagtgagctataatcactccagtttactccagaataggaaacagagtgagactctgtctctaaaaatccaaagtggctatagagtaatacatcactggtttcaacacatcttctagtgcctgctttatctctagctggctctctgttgggctccgtgttgtgtaaaagcaaatagtcccccgctggaggggtataaaatttgactgaaaatgcaaaccagttgtgctcataaaagttggacacagaaatcatgtacacagtttacataaatcccagcactccttcttccaaatagcacaagaccagggagatcctggggcacagcacattgtgagtggtgcctctcagctacaagacccagggcagccctgatgcgcactgatacgatgcagaggcagacagctgccatttatttatgaagaaactgatatgaaattgcaaacagaggccagtgctgcccagtggctctcacccatcaccccagcactttgggaagccaaggcgagaagatggcttgagcctgggaggtcaaggctgcagtaagctgtgatcctgccactgcattccagcctgggtgacagagtaagactctgtctcaaaaaaaaaaaaaaagaaagaaagaaagagagggagagcgagagggagaaagaaaaggaaagagagagagagagaaagaaagagaaagagaaagaaagaaaggaagaaagaaagaaagaaagaaggaaagaaaagaaaggaaggaagaaaggaaggaaaggaaagattgcaaaccacaaaatgatcacaatcaggcaaaaaataaatgtacatggttaaaagtgaacaaagtgttgcagtacccatcttctggaggtgatttttcttctttctacttctgggcatttctaatacaatgaaagttttatagcagaaaattataaaataattcatttatgttattttaatataaatagtcctgagatattcctcttttcagggaaaatagtacttggcaagacagcatcctagtagctgttcttgggttgttcacgtaattagttgccaggattcttttcactgtggggcttcttttgcagtctgtccgtggatactgtgaacatcaggctactcggccgggctcctgcgctcagggcttcgagaaatgctcattttggggctgcccctctgccggcctctctggattcagagggcagccgctgctccttttgttttgtgggcctggctctgggcccggagcagcacctccctggggaggccgcctttccttccgcggcttcttccgtctcctcctgaccccaaggtgcctccggcctctgcctccagctaaggacctctggccaagcctcctgcccagggagaggtgaagctgccgtgcctgggtgccccgtggtggccggacactcctggcggctgctcagtcttgcacgtggctgtgccaagcgggccaggcagctgctatttccctcagagaagttgctggcggcgctcagggaaggaagcacccgaggaggcggagcggcatctc

SEQ ID NO: 24476 - DNA, 2300 bp, Homo sapien
ctggtgggacttgctgatggggtgcgatttcttgaggtgcggaaggaggggttagctacaggttttgggggatgaggaggggaagtcaggagtgaagtgtttggttctgcatgtcacctccagggtgtctattagatgcccggtggagaagtgggggacgctctgcacgcagagggttttaacaacacgggctgggccagagggtgccgagagagaaaagaggggatatcccaggcgcaacaacgctgaggtctcaggaggaggaacagtcaagagaggagcccacggtgccgtcctggggctgagggccgaaactcaccgcactagccgacagcgtctggcgattttgtaatgaacaattttgctggcacggtggaacgaaggcctggttgaagggcttcaagggagacagggaagcaagtgaagatgattgttaggatgagttttgctgcagtgctagaggagagtgggttttgttaatgaccttccctccctgcaaccaaaccacagcagaaagcgcatccagggctcacacagagggaccctcagtgaaggcctctttctgcaatgggaagcccacaaggttagaaaccaggaatcacaacctaacgctgccctatcgtcagttttgtaggtgaccttgagtaggttacctcacttcttggtatttctcagcttccctcacctataaaatgagcagcacactcctgccttttctatacggtagctgcataaatgattaggtaacatcactgatgggcatttatgcacccagtccactttctagctctgtgtatttgactactctaagtacctcacagaagtggaatcatgcagtattggtcctttttgtgactggcttatttccctcagcctaatgtcctcaaggttcatccatgtcgtagcatgtgtcagaatctccttcctttttaaggctgcgtaacagtccgttgtatgcatatatcacattttattgatctgctggtggacacttgggttgcttccatctcttgactgacatgaatagttctgctgtgaagagttatacaaatctctgagaccctgctttcaattctttggggtatatatccagagtggaactgctggattggattgtaattatatacacacatacacacataactgtatacaaatatgtgtgtatatacgtttatatgtgtctgtgtgtgtgtgtgtgtatatatatatatatatattttttttttatagtaacttccatactgttttccacagcggatatagcattttacattcccaccaacggtgcacaaggcttctagtttctccacatccttgacagcacttgtaactttctggtgtgtttttgtttttttgttttgattgtagccatcctaatggtttagcccatgctaagtgatcaggctggtcactattattatcaagtgagataacaaatcagaatatattttgaaaaagaattgcatctgccaggatccaaccaagaaaacagaaagcattaaaaggaacttaatgggggagattagttacacacaggggatggaaaggctgagaagccaaacagcaggaagccgttaaccttacatccacctagggcagaggacaaaggacacagggccacccaggggaagccaaggtggtgaggggagctgtggaggcagctggaagaatctggaggaatctgacctgtgagaggaaccacaagcaaacaccctctaggaggctctgagaaacagcagggcacgtgggtgcggcctgggaacagatcaggattgacctgcgtgcgagccagcttgtcacagtgatgtgacgatgagtcaggacacctgggcgtggcgctgtccagagcacgagagtgacaccaaacacatgggacagcagcaccgagtcttggacaaggggcgcgaaggagtcaaggatgttgccaggcctgtggccgaaactgagaacagaatagagaagcaggttgagggtgctgggtgtcaacccttcctttatcaaccccatggtaaatgatcaggatggtcactattactacaagtgaggtaactaatcagaacgcaactttccccaaaaaacccacctgagttacacaggtctgaacttttttaaaaattaaatttttattttgagatcactgtttgtgttcagttgtaagaaacaagagagattctgtgtaccctttacccattcctccatgttgcaaaactagcacaatatcaccgccacggtagacgcagtgaggccataagacatttccgtcagcaaaagggtcacttcttgtgcccctttagaaccac

SEQ ID NO: 24477 - DNA, 2300 bp, Homo sapien
tgaggtgctgaatgacagaaaagaagacattaaattggaagagaagaaaaaaacacaagcagaaattgagcaagaaatggctacattacaatatactaacccacaacttctggaggtgtgtgaagctctgtaggggggaattcaagatgatctaagagggtagtggtgacatttttattgataggctcttaaggaaaagggaaggggctctcccatggtctgacaaacaccgccatttcctgttgctatgctagaagactagtttccaaaagaatcctgtttcttaaaattttttaaaatgtgttatttatgtattttgttttatttattttattttagagacagagtcatgccctgtcacccaggctggaatgcagtggtgcgatcacggcttgctacaacctctgcctcccaggctcaagtgatcttcccacattaagcctcttgagtggcagagaccacaggcatgcaccatcacgtctgactaatttttttttaagtgacttccttgagtcatatcttggacttttaaaacccaattagggtcaggcgtggtggcttacacctgtaatcccagcactttgggaggccgaggcagacagatcacctgagatcaggagtttgagaccagcatggtcaacatggtgaaaccccacctctactgaaaatacaaaaattagctgggcatggtggtgcatgcctgtggtcccagtgacatgggcggctgaggcaggaaaatggcttgaactccagaggcagaagtttcagtgagccgagatcgtaccactgcactccagcctgtgccacaaagtgagactctgtctcaaaaacaacaacaacaacataaaaaaactgaattagtggggcagtgagtagatctaagttaaatatacatttttaatagaaaagataaagccaacatagttttaatttgaattcacctgtttatgaaagagtttttcctttttgtctgctcatatagcaggtagcttgttcttatttttcttatctatgttagctaccaagaatgatgaattagtggtgaattattgggctttccctgatcaagatggacaaaaataatcctgactaggccaggcacagtggctcacgcctgtaatcccagcactttgggaggcgaggcgggaggatcagctgaacccaggagtttgagatcagcctgggcaatatagcaagaccctgtctctacaaataataattagctgggtgtggtggcatgtgcctgtagtcccagctactccggaggccgaggtgggaggatcacttgagcccaggagggtgaggctgtagtgaaccacgatcgtaccactgcattccagcttgggggacagaaaaaaaaaataaggaaaaaaaaatccttactactgtgtcccaggacttaaaaagaatgagaaagaacctaaaactccttacagtgcttgagtgttgcatggactctaattaccactggagcgtgaagagtttgagcagtttttatgtttgagagtcccctaacagaatacatgatagcaatattgtcatcttcaagggctctggcctgtttattcaacatgcttttttctttctttctttccagcaacttaaaattgaaagacttgcacagaaacaagttgagcaaattcagcctcctccctcatctggcacccctctcctcggaccccagccttttccaggacaaggtccaatgtctcagattcctcaaggttttcaacagccccatccatctcagcagatgccaatgaacatggctcaaatggggcctccaggtccacagggacagtttaggcctcctggaccccagggacaaatgggaccacaaggtcctccactgcatcagggaggtggggggccacaaggattcatgggaccacaggggccccagggcccgccccaggggttgccacggcctcaggacatgcatgggccccaaggaatgcagaggcatcctggacctcatggccctttgggacctcaagggccacctggaccacaaggtagttctggtcctcaaggtcatatgggtcctcagggtccacctggcccacagggtcacataggcccccaaggcccgcctggccctcagggtcacttgggcccacaggggcctccgggtactcaaggtatgcagggaccacctggtcccagaggaatgcaagggcctcctcatcctcatgggatccaaggcggaccagggtctcaagggatccaaggtcctgtgtctcagggacctctgatgggattgaatccaagaggaatgcaggggcctccaggcccccggg

SEQ ID NO: 24478 - DNA, 2300 bp, Homo sapien
tcacacagaactggaattgtctggcctccttacatatttctagacacatatcaaaataagattataggggctgggcgtggtggcgcatggcctgtaatcccagcactttgggaggctgaggcaggaggattgcttgaacccaggagtttgagaccgccctgggcaacataatcagatcttgtctctgtctcacgtgtccgtgtgaagagaccaccaaacaggctttgtgtgagcaacaaggctgtttatttcacctgggtgcaggtgggctgagtccgaaaagagagtcagcaaagggtggtgggattatcattagttcttacaggttttgggataggcattggagtttggagcaatgttttgtgggcagggggtggatctcacaaagtacattctcaagggtgggagaattataaagaaccttcttaagggtcggggaaattacaaagtacattgatcagttagggtggggcagaaacaaattacaatggtggaatgtcatcagttaaggctattttcacttttgtggatcttcagttgcttcaggccatctggatgtatacgtgcaagtcactggggatatgatggcttagcttgggctctgaggcctgacagtctctactaaaattagctgggtatgggtgtcctggtacaggtcattagtctgagctactagggaggctgaggtgagaggatcacttgagcccgggaggttgaggctgcagtgagttatgatcaccctgggtgagagaccttgtctctaaaaaaagaaaaaatatagaagtttataaacatttctgatgttatcataaaaactttagatactgtgtaatgtctgcatgatagtctacgtatggatgtgccattatttaatcactgtctgctactgtttccttttttttttgctatcattaatacctcaaagattagtacacaaatcttactcacatctctgaggctatccttagaatagatttttggaaggggattatggagtcaaaagtaagacttctttgagacagggtcttactctgcttccaagacttaagtgcactggcacgatcttggctcactgcgccctccaactcctgggctcaagtgatcctcccaccccagtctcccaagtacccatcacaggaacgatcacaggaaggcggtcacaggaacgcaccccgacgcgcaaagatgggatctcgccatgttccccaggctggtacgattcctgattcatactggagaacaacttgctgtgcagttatattttgaacctcatcaaaatggaatcatacagcgtcctcttctttgtgcctaagttaacagtagctgctattcgttcaggctgttgcgtttatccgtaacttcctatttctctgtagaaatccactgtatgatacaccacaatttagccactcaactgctgatggacatttaggttaccagttttttactactacgaataaacgtgctatggacattcttgcacatgcctttggtggacgtatgcactcattcctcttgaagtgaaatttctggggtcacaaggtaagcgtacatttagctttggcagaaactgcagcggttttccaaaatggttgcatcgtggggctgtttttctatcttggtcgctggactttaagcgaggcgtaatctagaggcacaactggctcgggtaaggcgtggagcctgactgtgtgccgggatctgccagggctgccaccagctagctgcacgggtgaacagactcagcaaggtgccacagtggcttcccacagatccactctcggtgggctcggtccaacgacccgctatgtctgccgtactggccccgtacaaatatactcattcacatactggaaaacggggtgtttttcagagcatacacgttagctcacactgtaaaaaaaagtcagcactgcgaaacgcagtcgcttctttcctccaggaggtagcgcgtcctactcgctccggaacaaaggaagcgctctgcagggtctcgcggctcggcacctcacctaggcacatgcgcagatcgaacctcacagaggcccgcggtccaggcgcgcgtgacgtagcgccgtcccgccagtgcgtgatgaccccagagcgtgcgttcggtggcccataggggaagatggcggctgctcctttggaggagcgggattgagaggatcggggtggggagaccaaacaagagagacatttctggctctgaaggcgaacgcttcgctggccatttaggagctctgctcaaagccagacggtgagtgcggcggcgacacgggactgctcgcctgcagcag

SEQ ID NO: 24479 - DNA, 2300 bp, Homo sapien
agaccccctcccccagtatggctattctgtgatcacatcgtggctcccaaccaaagaaataacccagggcgggtgacagctagaatcttttctggctggcagtcccacaggcctaagcgcaaatcttggtcctgccatttataaggcatttcctactttgtgacaggactgtgaatctccaaagtaacctgaccttagagaagtcataggtaaaaagtaaaaatagtaaatgttttgcccagaccccagcacatggtgcagtggctgggcagctgtggttatctggcctgtcactcagtgctgggtgtacaagggaacaccggcaagcatcaaaccctccggaaccttcagcttctctgagcacgtgaaagggggcgtggccagcccttcaggtctgggcaggttccttagagaagcagtgctgaagcaaagagcatgccctggaggagggaacttctcaggtggtgggagaccacattgccggcactgcaagacagcaagacgctgtggacgagccctcgcaggagatcaggctgcacaggccagacaggattcccaggactgccttctaaaggttttctttttctttagttttaaaatttttactttttaattttttaagtctttttaaaaattattatttgagacagagtctcactctgtcgctgtcgcccaggctggaatgcagtggcgcgatctcggctcactgcaacctccgcctcagcctcccgagtagctgggattaaaggcgcccgccaccacgccccggctttttttttttttttttttttctgtagagacgtgatttcaccatgttggccaggctgctttcgaactcctgacctcaggtgatctgccccccccacccccaccggcctcccaaagtactgggattacaggcgtgagcccccgcgcctggactttgccttttttttttttttggcagggtctctgttgcccaggctggagtgcagtgaggcaatcatagttcactgcatccctcaagcgatccacccgcctcggcctccccgatccctgtgactacaggcacgcgccacaacgcccggctaatttttgtattttttagagacgaggtctcactatgttgtctaggctggtcttcaactccggagctaaagcgatcctccagcctcggcctcccaaagtgctgggattacaggcgtgagccaccgtgcccggcacaattcattttttattaaatcaacagagtttacaatatgaccatctaaacattgttgactaatgagctaagatattgttgactaataagctatgattatttaccttattgtacaaccttttgttttctccagtgtcgaaaacagcatcattttttatttgctttttttttttttttaatatattttttgagacggagtcttactctgtcgtccaggctggtgtgcagtggcgcgatctcagctccctgcaacttccgcctcccgggttcaagcgattctcctgcctcagcctccccagtagctgggatcacaagcgcccaccaccatgcccggctaatttttgtatttttagtagagatagggtttcactatgttgcccaggctggtttcaaactcctgacctcaggtgatcccctcgcctcggcctcccaaagtgctgggattacaggcgtgagccactgcgcccggccgtcatttgcttaattttctacgcatcacccaaatgttccaacagacgtgtggtaaaagcctctgaatatcattgtccgcgtactcagaagtatcagataatccaccacaaatcaataaaattttagaagtttaagtcggtgaaggaaattggacccggtactttcggagccggctgccctgctctccatcagcaggcgttcctgcatctcatctgacctcctccgtccagaaaggcgtagggacctgccccaggacgtctgcgcggcgaggagcatgggagaagagagggagtgcagggcgcccctcggtggcggggagcctccaggacctcaccaaccggtcccctcgctgcgccccgtccggctcgcactcccggccccgcccacccctcggggcccctcccgagaccacgccccttccgcggccgttgctccgcgcttctgcttccggcggcgctggtggtggcgcgcggcgcggcgcggcgatggcggcgggtggcagcgatccgcgggctggcgacgtagaggaggacgcctcacagctcatctttcctaaaggttgggctcggggctgccagactcccccgcgccacttcgcgtggtcgccgcaggcctggcgttatgcgcg

SEQ ID NO: 24480 - DNA, 2300 bp, Homo sapien
tgaattaaagctgtcagcatggaacatgggaaccactacacggagcctttccttatgctgccttgtaggtttcccgtttccagccaggggctgtgccgttttcagaaaggcagagagtccttcgggtagctggcaagtccaaaaacagggatttttggcaataacagaaatgaatagggacaaagccaaaaggttttgttcttatccatgattaatttggggctggagaatgttttgtgttttgctttttttagtccgctctttgtgacgtggaagacagggcgggacaagcggcttcgtggctgcattgggaccttctcagccatgaatcttcattcaggactcagggaatacacgttaaccaggtaatgacaccagacattaagaactgtagataaattggctagaatcagaaatagctgcctgactttatttcttctaagtgatgtacgttgagctttctctttttggtaatcaggaaatgtaaggggcttaatctggtgagtcagttatcagttcaagtacagacagttaatagcatcgagttgtttttaacatgttagtgttgatgaacaatagatactctctgcatagctcaagattcataaatatgtgggctctatggcacctgatattggctcctgactccagagcagccttacctatgttttctgtccccctccagtgcacttaaggacagccgatttccccccctgacccgagaggagctgcctaaacttttctgctctgtctccctccttactaactttgaggatgccagtgattacctggactgggaggtgagaacagccgcatttggaactctgcatctctcgttgcatttgggttcgggttagtacatggcaatgtatctccttcattgagagaaagggtataagaatgtgaaggctgagtttggaaccaattgtgggcaacataggtgacagaagaggtgctgctataccaggagtaggcagaagtgtcagtggaaaggctcgcttctcctgattctccctagtctgcttggtttacatccttctcccatgtctaataagagataatggggtaaaagaaaatattccagatccttcttggcaagccctggagtaaaagtttttgtttgcttgtttttttttttgagatggaatttcgttcttgttccccaggctggagtgcagtgacgtgatctcggcttactgcaacctctgcctcccgagttcaagggattctcctgcctcagtgtcccaagtagctgggattacaggtgcccaccaccatgcccagctattttttttttttttgagacagagtctcgctctgtcgccaggctggagtgcagtggtgcaatctcagctcactgcaacctccacccctgggttcaagtgattcttctgcctcagcttcctgagtagctgggactacagtcgcgtgccaccacacccagctaatttttgtatttttagtagagatggggtttcaccgtgttagccaggatggtctcaatctcttgacctcgtgatccacctgccttggactcccaaagtgctgggattataggcgtgagccaccatgcccagccatttgtatttttttagtagagacagggtttcaccatgttggccagcctggtctcaaactcctgacggccttggcctcccaaattgttgggattacaggcatgagccaccgcgcctggccaaataaaagtttttattaggaatcagatgtgaaggatcatgaccccagataaaaaccttgtggcatgtttatttaatggaatagggtcaaggaacatattcacaattcctggatgaattacttaaagaatgcatttctcctaccttcatattctcagagttggctgcacatactctcgacccttccctaaaagcagaactttctttggcctctatacctcctgagatagaattagtcatgaaatgcgagaaggtctcccttttccaggcctgtgttaagctggtcagggaacaatgttgatttatatgtggggactgaagttccattagagtaagtaaatgccatttacttggttgtacttttttctataggtaggggtccatgggattcgaattgaattcattaatgaaaaaggtgtcaaacgcacagccacatatttacctgaggttgctaaggaacaaggtgagttggatgaatgggattttaatgacaagtatcattcacagtggtgccagttaaagggcaagaaagtgaagtgtgtcatcttgcagcccaactgcagctgagaatgagggcctttctgcctcttaatacctgtcaaa

SEQ ID NO: 24481 - DNA, 2300 bp, Homo sapien
aaaaaatttgtaatgttctttttcagtgaagcctttgcactgctagagctgaagaatgtgatcaatcggcttgttgaataatcctgcacagtaggtattccgctgaagccaactctagctgggggctcgagagcgaaagacacagatggggccctgccgcccctcgaagagtcggatgggcgcgcccgtccccggtgcatcaagaggctggcccggccaggggcgagcggctggcaccgaaccccgcgcacttcgccgcgggcggggctgggccgtagtcggctcgatttaaggctggtatccaaggctgcggccggtcaggcgaggcgaggcgaggcgacgtgagcgagggtgcttagggagaacagccgctggcagctcaatgctgggtggctaacgctcgacggtgcctggcagcaacccggccgacaacccgacgcggatcccgagctgcgtcgcggacaatgctgcgggcccgtcccggactacgactcccgacgggctctgcgaccgctccggggcggcccagcgtgcactgcgccggccagttttgacagccgggcgccctactcggctagctctgctcccagccagggacgctggccttctcgcggctttcccccgatgtctctctttattccagctgcctgaaactcggtcccacgaatggcaggcagcgtccaaaattcaaccccgtaaagccagcaccagccaataaagcgcacggatggaggccacgtgacagcagtgggccggccctccggctgagccctgatctctatggtttccgcggctcgctagaaggagtgtggtccactggaggactccctacattcttcctccattacctcactgcctccggtggctgctgggataccggaggactcgggtcccggctcgactcagtcctccagccgcccggggaatacctctagttcttcccggccgccgccgccgccgccgccccgccgcttcctcctccgcccgccggcctccttcgccccgccccgtccgcgcagcgcgtccggcccgcccgcaggccagcttctctcgggagcccccacccaggcgcatggctccatgaagcaagaggaggaggcagagcgcgagaggtcccgtccgccccagccgcgtctgggccaggagaaaaggtgggaaactcgggctgcgccgcacccttctccccgctgccgggccaggcctccctcggtccgccgccgccttgcccgccgggcctgttctcgccggggcgggcggcggggccgggaagagaccccgcggtcctggggcgagggtccgggggcagcgggggggaggagtcccgggcggcgggcggggcctcaggccatgtcccagcggagggcagggggtcgggaggcactgccggggaggggcgggcggcgccgtgccccgggccgcgaggctcggctcccgctcctggtccttgtctgcactccctccaggaagcaggctcgctcgctgtaaagtttggtggtctccggcgccgcctggtggcccccacccaccgtcccgccgccccgccgccccctcccccgcccggcgtctggattccacccccgcggctcggcccaagctgctctacccgtcgctccatcgtctccccaactccccagcgccccggaccctctttcctcataccctcgtttctcacctttcaccctgtccctcggcccgcttttcccctccccgctctgtcctgtcgttttcttaacactcttcacacgcgcactttctcctcctcctcttctctttttcgcacccctactcttgggccctccttccttaacctccgctggccccccattccatgatccgtccacctgacacgctgggtttcatgcctctctttcccaggctgtgggttgtgcccttcactccttgccctcctacattccctgtcctgatctgaactcctctccttgccatgctccctcacccttatccctctgggccttatcctctttcactgccctctcctaggatagagtgggtggggcctctcccacccacaggagatgtaaacagtctcctgtttacttacatctttgggagtagctcaattctctagtagtggggagagttggtgaagagatcaggaagagatttcttcgagactaaggatggatgacccttagcaacagtgaccgtctcctcccggcatagcaagatggcctgccctcaggtccctgcctctggcgtgctgtccagtaattcttcagttctgtctttgcagaggattgggaaatttatttgtgttctgaaaccggcggagagctttt

SEQ ID NO: 24482 - DNA, 2300 bp, Homo sapien
taagaacagcaatagcatctggatcttctcagtaaaatgccttttcaacagctcaaagcaaggcttgtttttgttttaatttgggaatgtttcaagtgaaacttagttccatcatttaattcctggcagcccaataacgagggggcaataactcccttatctgtgggctatttaatgactatatagtaccatcctgggagcaatagactaaggccttcttccagatgccatgttttaaggttttcagctggaaagaccgtcactccgtaaaatttattttgattattttaagtcaggatttggccttcttattcagaaacaaaaagaaaaaaactggcccctggctttctgcctcctgcacttctggctctaggccatatgatcatctaatttctagtttttcaggcagacagagaaggttagaaactggcaaccgtgtcctcaacagcagataagcgtatcaagtctgtaacaggaattaagaagactgctatagaattttttttttaagtcacctcctgtttcacaaagcatagctgtctcttccttttcgtcctccttgcccattctcttggagaagtccaggtccaagaggcaccagacactcaattgactagggttttgctgcctataggtaattatgctaaaagtctagagtagtagatcttatgctcgcataattatgcattctagagcagaaggtttttgctggaaagcttcactgttagatatgatttgcattttttactagatacttgtctttggtctttgaggacaaacatatcaaggattcctttgtgcatcaacagaaaagcaaaacacaaaacagcctatatgtgagcatggggccgtattttaatacaagaaagacattgctctagaacatggctcgcctttgcttcagggcctagcagtttattttagccataagggtaagggagcaggtcagaaatgacttttagtgtaatcctatctgtaattaaaaatacaaatgctgtcataagatcaaatgttatcaaaaatcagtatttaaaattaaatttacccccaaatttctttcaaaaaaaatttgtaatgttctttttcagtgaagcctttgcactgctagagctgaagaatgtgatcaatcggcttgttgaataatcctgcacagtaggtattccgctgaagccaactctagctgggggctcgagagcgaaagacacagatggggccctgccgcccctcgaagagtcggatgggcgcgcccgtccccggtgcatcaagaggctggcccggccaggggcgagcggctggcaccgaaccccgcgcacttcgccgcgggcggggctgggccgtagtcggctcgatttaaggctggtatccaaggctgcggccggtcaggcgaggcgaggcgaggcgacgtgagcgagggtgcttagggagaacagccgctggcagctcaatgctgggtggctaacgctcgacggtgcctggcagcaacccggccgacaacccgacgcggatcccgagctgcgtcgcggacaatgctgcgggcccgtcccggactacgactcccgacgggctctgcgaccgctccggggcggcccagcgtgcactgcgccggccagttttgacagccgggcgccctactcggctagctctgctcccagccagggacgctggccttctcgcggctttcccccgatgtctctctttattccagctgcctgaaactcggtcccacgaatggcaggcagcgtccaaaattcaaccccgtaaagccagcaccagccaataaagcgcacggatggaggccacgtgacagcagtgggccggccctccggctgagccctgatctctatggtttccgcggctcgctagaaggagtgtggtccactggaggactccctacattcttcctccattacctcactgcctccggtggctgctgggataccggaggactcgggtcccggctcgactcagtcctccagccgcccggggaatacctctagttcttcccggccgccgccgccgccgccgccccgccgcttcctcctccgcccgccggcctccttcgccccgccccgtccgcgcagcgcgtccggcccgcccgcaggccagcttctctcgggagcccccacccaggcgcatggctccatgaagcaagaggaggaggcagagcgcgagaggtcccgtccgccccagccgcgtctgggccaggagaaaaggtgggaaactcgggctgcgccgcacccttctccccgctgccgggccaggcctccctcggtccgccgccgccttgcccgccgggcctg

SEQ ID NO: 24483 - DNA, 2300 bp, Homo sapien
gagaagggaaacctgatataaccctagaccactgattttcaagttgggaagtaaaacatacatattaaaatcacctaagtgactttttccaagtgagcttgccctctccaggtgatattaaatcgaattcagctattcttattaggaatatgttggctcagaaaaaaagcctaataaatcacaagtataaggtttttgcctctattccaatggaataccattcttattttcttcatgttctggtcaacatatgatcatgttctcagaattatggaaagcaaaatctggtgatcacatcattcagaaaatagggataagttttggagataacattatggcagacttaatgttttctgtgctatatagttccttggtttttatttaactattgagaatgtatggttttttttctttttttttttttgagatggagtctcactctattatgcaggctggagtgcagtggcatgctctcagctcactgcaatctcccaggttcaagtaattctcctgcctcagccttccgagtagctgggatcacaggcacataccaccacgcctggctgatttttgtctttttagtagaaacagggtttcaccatgttggccaggctggtctcgaactcctgacctcagttgatctgctcgcctcggcctcccaaagtgttgggattataggcatgagccactgcatccagcctttatggctttttaaattagaaaacaaagatttaaattaatggctgagtggtggggtatgtctggttaccaaccgctggttagctactctgtcacatggcagcttcattcctactggaagcatcattttcttctacctttcatggggctcagtgaaaaaaacaaggcttagttgccccctgctcaccatccccactgcttacctccctgatggaaaaccctatcatgccaacttctctttgcattggccaatagatgcgatcttcagtggtcagatgggcattcctgttatcaccctgcgaaaacttctccagctgcctcccacaggagctggctgggcatcacagtgggtctgtgcagcttacctttggtgttaaatgttctgcatttagggtaatatgttggcatcctcctagtctagtctctttgttaatgtgcctctcactggtgtaacgggtttttacaaagatggaagctgtctgtctatatttctgatatagatcatggcttttctttctgaattcccaggcatactgttaatagatagatctataaaaaatagtgtcaagtgtattctagttcagctataccttccaaacaaaattggattgcaagttttaaaggagtacacatttggagcctcagattgaatttgaaaactctatggtcattgattttaattttgctctaaagtattatataaaatcgtaggacattcaaaggaccttagaaattattaagtgatctagagaaggtgtccttataggtaaagaaacagacttgggaattaaagtcgttttctcattgctaattagctacattttataattatggacctggagtagaatccaaggttttttgtttgtttgttttttccgttttttaatccaaaattgtgtgtttatttatttattttgagacagggtcccagtctgtgagtgaggctggagtatagtggtgcagtcatggctcactgtagccttgaactcctgaactcaagtgatcctcccgcctcagcctcccacagtgctgagatgacagatgtgagccaccgcatctgtcattaaaaagccaggttgggagaaaagagcctggtcacttctatctttgtttcagtattaatgttgaaccctgctttaataacagtaggagtatatcagtgaatgataggattgaaataattctgttgaactttgtacttatttttcattttttattttgattaaaaatccaggcttattttaattgtttgctttcctaagattgctgctagccaagaatgttttggcatgccaaaaaaaagtgtagaatggtcatggaattggcatttactgtttgcagccaaggtggtgccccagcagatcacgcacacttctcctcggatccagccagactaccctgccgagaggagtagcctgattcccatctccggacatcgggcctctcccaatcctgtggccatggaaacccgaagtgacaacaggtaggaggctgtgtgtcagttattctgcctcactgtgtcattaatcgttctgctttatcagcataaaacaaagtgtcccacaaatatggcctatatttattactcatgttttcagatt

SEQ ID NO: 24484 - DNA, 2300 bp, Homo sapien
tcctccctcagcctctggagtagttgggactacaggcacgtaccaccgcacccggttaattttgtatttttagtagagatggggttttaccatgttggccaggctggtcttgaacttgatccacttgcctcagcctcccaaaatgctaggattacagacgtgagccaccacctgttttaaaatcttatgttattttaaatcttatgttaattaaaaagttttggccgggcacattggctcatgcctataatcccagcactttgggaggccagggcgggcggatcaagagatcaagaccatcttggccaacattgtgaaaccacgtctctactaaaaatacaaaaattagccaggcattgtggcacgcgcctgtagtcccagctactcaggaggctaaggcaggagaattgcctctgcctgggaggtggaggttgcagtcagctgagatcatgccattgcactccagcctagtgacagagtgagactccatctcaaaaaaaaaaaaagtttttttcactccttctctggtaatggacgcatattggtatttacagatgaaatttaacattacagttttgttttggtttttttttgctttctgaggttttacactcattcattacttaatgatggggatacagtctgagaaatgaatagttaggcagtcttgacatgcaaacatcataagagtatacttacacaaacctagatggtgttacctactacacaccgaggctatgatgctataactattgctcctagtttgtagacctatacagcctgttactgtactgaatactgtaggcagttgtaacactatggtatttgtatatctaaatacagaaaaggtacagtaaaaatacagtgtaaaagattaaaaaagaggcacctgtatcatttgtccatctgacacaaattaacctcttgctatttgtagattactactaacaataagaataccgagtaactaacttcacagttctttttgtcctccagctagatcccactaaccagagtggcaatgtgtttgaatgtcacctgaagtgattctttgcattttattttattggagacagggtctcactctgtcgcccaggctggagagctcactttagccttggcctcccaggcttaagcggtcctcctgctgggattactggtgtgagctgccgcctgtggcctcccctctgatttgaatagccaactttgttatactgtcaaattttcttgccagtgttgccatttcagtagcttgctaccaattaatttggcatcctctgttgatttcccttccaatcctgaggcagccataactaactttttatcattttaggagtgttcttacatttgctaaggaatgatgtaaaattgggaggaaggtccatgcttcaagggtcatagtttaagctgctgttaatccaaattgtctctgatctttcttcaggaaatttgtcaaaaacttacagcatgtaaatttatagtatattttcagatttatccacagagttcagtgcaattattttatttttattttttatgtagacaaggtcttactctgtcccccaggctggagtgcagtggcagtcatcgctcactgtaaccctgacttcctgggcacaagctatccttcagcctttgcgccccccaaaagcactgtgtctacaggtgtgagccaccgcacctgacctgaagtgcaattattataatgatattaactcaagtttgttacggagtgttgattaactacatcaaggattctgagaacaagtaagggttaatttcttcagtttgtggtacaaattgatgccttttaaaacaagacaaactcagtgcaccttttgccacattggtgtgattaaagaccaagtattggtttaactccgaacttcatagacctatgaaaaagtataacttgcatgactaacctaggagaagattgtaaatgaccttgcccatctgcattgtgtctttgttatcttttcagtaggccaaccttgtctatccagcatcctccatctgcagcaatcagtattcagcgtcctgcccagtcacgagatgtcacaacaagaatcacactaccatctcaccctgcattagggacgccaaaacagcagcttcatacaatggctcaggtaaaaccaaaagtggagaaccacctgtgtactttgttgggtaaaaccaaaagtgggcaaaatgtgctgagggcctggtgataccgaaggcattgattgtgtttaccctggacgcagtggataatgttcttataactgtgttgtggggtttccctcacagaaaacaat

SEQ ID NO: 24485 - DNA, 2300 bp, Homo sapien
gtgggcctgcagcagttgtggggtcctcatacttctcacatgcctgttagcacagttcattgtacggtatggcatgtaaaagtagctcaagctgaatgtccttagccctttctcttgggatactcactatctaaaaaacaacctgacccacatttggaggcaggtgacttcctagaggcaatggctaagagcaaacatgtaaaaataacgttctatcctctttctttcagggccatcccagtaacctgcatcacatcatgactacaaatgtgcaaatgtctatcatccgcagcaatgctcctgggccccctcttcacattggagcttctcatttacctcgaggtaacgacttgcaagttttgttcaaactctcaaaatgtagtagtagatatacatttggtaaaatacgtaacacagaatgtatctagaatcagcttgttaaagttgcagaacaacagtctgcagaaccgtgaaccaaataaacctcttttatttaaaaagaaaaaaaggccaggtgctgcggttcatgtctataaacccaacactttgggaggctgaggtggtaggttcacttgagtccaggaatttgagaccagcctgggcaacatggcgaaaccctgtctctacaaaaatacaaaaaattagccaggtgtggtggcatgcgtctgtagtcccatctactcaggaggctgagatgggaggatggcactcaggaggctgagatgggaggatggcactcaggaggctgagataggaggatggcactcaggaggctgagatgggaggatggcactcaggaggctgagatgggaggatggcttgagctcgggaggcagaggttgaaatgagttgagattgcgccgctgcactccagcctgggtgacagagcgagaacctgtctcaagaaaaagaaaaaaaatcgcaagacagtagaaataaacttagagcaatccatgtttttagcatggtttaatatgtgcttattatagttgtattacaagtgtgtatatttatgcaattaaagtgtttaatatggtctaaaattgtcctatatattgaggaactgcccaagctttgataatctcaacatggtctttattattagactgcttatctgcaacatggtctttatttttaatacataagtcacaaatattaatactgaatatttttaaagttcagtgatgatctttactcagttttttaacttatgtaacaataaaatgatgatgataattattttttgagatggggcctcactgggttacccaggctggtttcagatttctggggcacaagcgatcttcccactttagcctcctgagtggctgggactacaggtgtgagccaccacatggctaagattaatttatttttacccttaagttctaataggttgtgaggtaataaatgaattttgactagaaatttttaccttttattggagactttacaacaattggagattgttggcaaaatcaagttagcaaacgcaagaccaggtttgcttggttatagcataactcagcagttctccaaatgtggttcacaggcccttatgggggtctgcagggtgaaaagtgcagggttaggtttaaggttaaggttcataatgtgtccctttggcaatgtcgacgtctgctctaatggaacaaagactggaaggcaaagtgtccgagcctcgtcagagctgaggcagtggcatcacactgctgttccctgtgtgctttaccactgtgcacacttgcagttaacagaaacaaaaaacagcagctagtttcacttaaggttgtctgtgaagaggcaatataaattattattaaatctcttgaatacacattttctttgttttctctgtgatgaaatgggaagtatacataccatacttcagctcgatattgacatgctatctgagttttgggaaacatactgattattttcccagggaatataactagaataaatataataaacactttttttttttcaggtgcagctgctgctgctgtgatgtccagttctaaagtaaccacagtcctgaggccgacctcacagctgccaaatgctgctactgctcagccagcagtacagcacatcattcaccaaccaatccaggcacgtcggagcctggggtgcattaagggcctcattggagttattcattctgccaggcactaggcacatccttgacctcagggactttccatctagttgccaagacatagggaagtttgaaagatgcacagtgtcatgtggcaagctgtaagaatgcagaggagagatggtgggaagccttcctg

SEQ ID NO: 24486 - DNA, 2300 bp, Homo sapien
acaaaaaggatgacatttgaaactgtggaaatacattaaaccatttaggaaggcagtatagcattagcgtgttggagccctgaagaatgctgtatttatgagaaagaggaggtataatggagcttgacataggagtagaagcaggagacagcctggttctagaggccaagggaagacatgaggaggaattactactggtcagtaagctaaacaagatgagatctaagtgaggaccgatgggtttgaagttgagtaggtgttggcaacttttggggagcagtctgagaagagtggcaactccaaaagggataaggactgcctaggcagagaggaggctgaagtctatcacaggagtcactctttagaagtttgagaatgaaggcatgaaggtggaaaaggaaagtggcttgaagaggaggagtatctgagactcatccctgggctatagccaggagctactctcttctaaccaagcagttgtcttacacagctgtgcatgataggaagaggggggtttgagccccatttatttcctaactaatcacaaaactccaggcctaaattaccatctggtaagggaagagggagacttaatctcttatcagacacaaatgtggcctcaaaagatatggctaagtcttctacaggtgcataaactccaaccctgaaccccaagcaaaatgacaaaataaaactgcccccttcagctcctttataatccggaaagcgcgcgcaggtgcgccccggccgcccagagccctgcgccctgccggcctgctttcacagagccgcgcccgcgctgcgcctggcggctcccgccgcgcgtaggctgtgccgaccgcggttcccggtggggacaccgagtcccactcgcggcatagggaggcgggcaccgtcacgacactggcccggcccgcggatcccttggccgccgcagttggcctccattaccctttcccgcgccgcgcctccccgcggggaaaatgaaacccagtgccctcaggttaaggcatagggtgggatccactgtcttctcacttagccaagagaaaaggcagaaccgacttcagacagcaaaggggtgtgttgccctggccgggtcgcctgcggccccgccccggcgctctccacctccttcgcggcccgccctcctgactccggcgactacatttcccacaggacgccgcggctcagaggggcgggcccgtccgctctcccgctcacgaccaccggcgactggctgactcggcagggggcggggcctgcgccagccaatagacgggaggctcgttacggcggcggaagcagcggcgctggagtgaggggtggggggcagagtgctagctccccggcggtggctgcgggtccggagcctggggacgtcggccccacagacggagagcgcgcgggagcgagctcaaggcggcgcggcggccactgggcgcagcacccaggtaatggcgggacgggcgcccgggagggaaggggaggagacgagggggcggggcggctgagccgggctgcagcgtccgtcccgttgcgcgtccccggggaagggcagaggatcctcgtctcctgcggctcggaccgcggctctttcgcgagctggtcacggcggttgggccggcgacaggggctgggtgtcctgtggcgaggaagggagaggcaccgggaggggtgggctgacccgggcgtgggggcgtggcggacgtgggccttggcggggaagcagagcggccgggggagcgcgggcgggcgggcgggcgggcggccggcccagggagtttggctcctggagcagtttaaagtgactctccacatccgggccctgcgcccgccgctttcagaccctggctgaggcggggcctccccgctccccgcccccttcgccgggggcgcctgtcttcctctgccattggctcagcctcgaggggtttgggctgccccggccaggctcgcgcctgattggctggcagtcggcgggagggtggggcgggctctgaacgtgcaggtcgctgtggattggtcctgggcctccactgacgcgtcgggcgtggggccaatgggcgggcgggggaggcaggggcaggttcgggggaagaggactgcgagcacagcggcggccgggtggcgggggtgagtggggccagcggggctggacagcagcgggccccgggcgccgccgccgcgatccctccccgcgcccgccgagcacatcgccgccgccgagatgggccctccgcggcacccccaggccggcgagatagaagcgggcggtgcgggcggcgggcggcggctac

SEQ ID NO: 24487 - DNA, 2300 bp, Homo sapien
ctatgcataggtaacattttcaaagatatttgaggctgggtgtagtggctcatgcctataatgccagcacattgggaggctgaggtgggcagatcgcttaagcccaggagttcaagaccagcctgggcatatggtggaaccctgtctctattcaaaaaaaaaaaaatatatatatacacacacacacacacacacacacacacacgtatatatacatatatatacatatatacatatatatacatacaactccatctcaaaaatatatattatatatataaaatatatgtattcatatataaatatatatttttgagacagagtttcgctcttgttgcccaggctggagtgcaatggcttgatctgggctcacagcaacttctgcctcccgggttcaagcaattttcctgccttagcctcctgagtagctgggattacaggaatttgccaccattcccggctaattttgtatctttagtagagatggggtctttcccatgttggtcaggctggtctcgaactcctgacctcaggtgattcgcctgcctcggcctcccaaagtgctgggattacaggcatgagccacgtgcctggcatatatatatgtttagtggggtgtggtggcatgcgcctgcagtcctggctactcaggaggctgaggcaataagttagttgagacaaggaagtcgaggctgcaatgagctgtgatcacgccactggacttcagcttgggctgaactgagaacctgtctcaaaaaaacaaaaaacaaaaaggatgacatttgaaactgtggaaatacattaaaccatttaggaaggcagtatagcattagcgtgttggagccctgaagaatgctgtatttatgagaaagaggaggtataatggagcttgacataggagtagaagcaggagacagcctggttctagaggccaagggaagacatgaggaggaattactactggtcagtaagctaaacaagatgagatctaagtgaggaccgatgggtttgaagttgagtaggtgttggcaacttttggggagcagtctgagaagagtggcaactccaaaagggataaggactgcctaggcagagaggaggctgaagtctatcacaggagtcactctttagaagtttgagaatgaaggcatgaaggtggaaaaggaaagtggcttgaagaggaggagtatctgagactcatccctgggctatagccaggagctactctcttctaaccaagcagttgtcttacacagctgtgcatgataggaagaggggggtttgagccccatttatttcctaactaatcacaaaactccaggcctaaattaccatctggtaagggaagagggagacttaatctcttatcagacacaaatgtggcctcaaaagatatggctaagtcttctacaggtgcataaactccaaccctgaaccccaagcaaaatgacaaaataaaactgcccccttcagctcctttataatccggaaagcgcgcgcaggtgcgccccggccgcccagagccctgcgccctgccggcctgctttcacagagccgcgcccgcgctgcgcctggcggctcccgccgcgcgtaggctgtgccgaccgcggttcccggtggggacaccgagtcccactcgcggcatagggaggcgggcaccgtcacgacactggcccggcccgcggatcccttggccgccgcagttggcctccattaccctttcccgcgccgcgcctccccgcggggaaaatgaaacccagtgccctcaggttaaggcatagggtgggatccactgtcttctcacttagccaagagaaaaggcagaaccgacttcagacagcaaaggggtgtgttgccctggccgggtcgcctgcggccccgccccggcgctctccacctccttcgcggcccgccctcctgactccggcgactacatttcccacaggacgccgcggctcagaggggcgggcccgtccgctctcccgctcacgaccaccggcgactggctgactcggcagggggcggggcctgcgccagccaatagacgggaggctcgttacggcggcggaagcagcggcgctggagtgaggggtggggggcagagtgctagctccccggcggtggctgcgggtccggagcctggggacgtcggccccacagacggagagcgcgcgggagcgagctcaaggcggcgcggcggccactgggcgcagcacccaggtaatggcgggacgggcgcccgggagggaaggggaggagacgagggggcggggcggctgagccgggctgcagcgtccgtc

SEQ ID NO: 24488 - DNA, 2300 bp, Homo sapien
gtacacatttagttttattgtaacaaagcaacttgtacacttttaacatttaaaactgagcatgatctttcctttccagtgaaacaaaatttaaaaataaacaggaacaaaattacaatagagaatgtcaattccaaataagatcctagaggttctgctgattctcccactgagtggcagggctcaagtcatcattaggagagaatttattttaaaagcgtcatcttaaactgcaaggatgtgtgtcaaacatcgcaattaaacatgccaaaggagaagccatgttgtcaaaatgtccgcttaacccacccaaacatctcagacccaccctttgctgacttctagaatcccattttttaaagtttttttctttttttaaacaagagaaagtagacagaaagatgttggtaaatgctaactgtccatattcacatagagacccagtgtactctccgagcccaatatacagagaaagcaggaagaaagctagaattgaatgctctgctacacatgggcctagagccctccagcttccagcagggcgaagggagcaggtttttcttttttcccacagagctggggtgatgttgattctatacagtttttgctcagacaggaagggataaaaatgaatttcgaacagaaaggggtagagactcttttcccattgtattctgctgaagttatttcccccaaaataagttgagaactatagtgtagagaaaagaaacctcaagaacagggcgactgagcacaagagagaaaaaacaaaaaacaaaaaaacaaaaaaactgcaacttgctcccagggactggagaaaatgtaaaaaaaggaaggttggaatccatcagtgtttttttgctgttgttgttgctgttttttttttttttgagatggagtctccctctctcgcccaggctggagtgcagtgatgcgatctctgctcactgcaagcaacctccgcctcccgggttcacgccattctcctgcctcagcctccatcctcagcgtgagccaccgcgcccggcctccatcagtgttccattagtcatctccttcatcctcctctccttcctccccttcatcatgttggctcatgtttatttattaaaattattttgggccgggcgcagtgggtcacgcctgtaatcccagcacttgggaggccgaggcgggtggatcatctgaggtcagcagttcgagaccagcctggccaacagggtgaaaccctgtctctactaaaaatacaaaaattagccaggcgcggtggcgcacgcctgtaatcccagctactggggaggctgaggtgggagaatcgcttgaatgcgggtcggggggttggggggtggggggcgcgggcgggggcgcggaggttgcagtgagccgagatcgcgccactgcattccagcctgggagacagagcgagactccaactccaaaaaaatatttttggcttttcattcactttgacttaatatacttaaaaatataccctccaaagaggtattcatttttgggtgggttaaatgctacctattccaaaacaattttaaactggtttatattagttaaaaaaaaaatactaaaaggacaaagtagtccctgtagactaagctgccgctgtccgaataagaaagctcaagcggctcataaaatttaaaaagtcttcctttcatcatgcctcctggaaggtagctatcaaaattttagggtttagtataaagtctaagatgctcagaaacattaagacaattgtccttactgtgccaccgaaaggctaaagggagtaagcttttaacaaaggtttaagggagtaagtcccagagtccaaactggatttcaccgactgactgttgaagctttcgggtctcagctgttggcccaacgaaccttcccaagaccttgaagaccggcagcctacccgccaccctgaaaggcggaagtgaggagagaggcaggactcccccctccccaaccctcggagatgagagggcgaccgcgcgacgctctgggctgctaggtctcgactcggtatccggaagtcctccagcgttcgcctgcaggaagcggaagtaaaagggcggccggcagctgggcaattgctttgcgaggctgggtgttgagtcgagccgcgggaaaggcgcgtgtcggcctctcactggcgcagcctgcactgccgctgccgcctcgccccgccctgccctggcgttgtctctggcactgtggcggactgaccacggcccgggcatgggctgcaagggagacgcgagcggtgcgtgtgccgcgggtgcgctgccggt

SEQ ID NO: 24489 - DNA, 2300 bp, Homo sapien
cagcactttgggaggccaagggagggagatcacctgaggtcaggagtttgagaccagcctggccaacatggtgaaaccccgtttctactaaaaatacaaaaattggccatgtgtggtggctcatgcctgtaattccagcactttgggtggccgaggtgggtggatcatttgaggtcaggaattcgagaccagcctggccaacatggggaaacctcatctctactaaaaatacaaaaattgggccgggcacggtggctcatgcctgcaatcctagtactttggggaggccgaggcaggtggatcacgagatcaggagatcaagagatcaagaccatcctggctttaacacagtgaaacctgtctctattaaaaattaaaaaaaattaaatgggcgtggtggcaggcgcctgtggtcccagctactcgggaggctgaggcaggagaatggcatgaacctggcaggcagagcttgcaatgagccaagatcgagccactgcactccagcctgggtgacgaagcgagactccatctcaaaaaacaaaacaaaaattaaccagacatagtggcaggcaccatgtctcagcctccagaatagctgggattagacgcctgccaccacgcccagctaattgggaggctgaggctggagagtctcttgaacccaggaggcggaggtagcagtgagccaagatggtgccattgcactccagcctgggtgatgagtggaaactccatctcaaaaaaaaaaaaaaatcaaataaataatactggagtcaatttagatttctctatctctcccctctccctttcctcatccctcctaaacatcgtggatgtagtttttatttcaaggactacttataagtgttgagatttttctcttttttttgagacagtctcactccatcatccaagctagagtgcagttgtgtgatcttggcccacagcaacctctgcctcctgggtttaagggattcgcctgctgcagcctcctgagtagctggaattacaggtgtgcactaccacggcaggctaatttttgtgtttttagtagggtttcagcatgttggccaggctgttctcgaactcctgacctcaagtgatccacccgcctcaccctcccaaagtgctgggattacaggtgtgagccaccatgcctgcctggcctatttagatttttcttaactaatatattttttcatttgacacttaacaagactgagctgattccggccaggtgtggtggctcatgcctgtaatcccagcactttgggaggccgaggcgggcgaatcacgaggtcaggagttcaagaccagcctagccagtatggtgaaaccccgtctctactaaaaaatacaaaaattagctgggcgtggaggcgtgtgcctgtagtcccagctactcaggaggctgaggcaggagaagcgcttgaacctgggaggtagaggttgtagtgagccaagattgtgccactgcactccaacctgggtgacagagtgagactccatctcaaaaaaaaaaaaaaaaagaatatttaatttccaacctaggaagccatcttagtaaggtatatggaaaaggaagaattgctaacatgtcccaatttgacctttcaagaaaagtaattggccaggcgcagtggctcatgcctgtaatcccagcactttgggagactgaggcgggtggatcacctgaggtcagggtttcaagaccagcctggccaacatggtgaaacctgtctctactaaaaatacaaaaaattagctgggcgtggtggcaggtgtctaatcccagctattctggaggctgagacaggagattcacacgaatccggaaggcggaggttcagtgagccgagattgtgccattgcactccaacctgggtgacagcaaaactccgtctcaaaaaaaaaaaaagaaaaataagtatattttcctctaaattcagaaaaatgtggaataaacactttgaaatttgaacttaaaagtgtagttaaccaactgttttttctttcttcagatctataacaaggtgaggactggagaaaaagtgaaagttgaacatgtggtcagtgtcctggagaagaaatatccgtatgtagaagtgaatagcattttggggattgattctgcttatgatcggaatcggaaggtaaaaaatttctttgtgtttcttatttgattgcaacattgtactgtccttaaccccgtgtttgggggctttggttaataatggcgatggtggttaaagtgtttcagtacttagcatttaaaagtttagaaaccagatcacttttca

SEQ ID NO: 24490 - DNA, 2300 bp, Homo sapien
aatggtttttttaatgaaaaaaaccccacaaagtttgtgcagtcatcaccactgtctaatgatacatcattatcatcaccccccaaaaattccccagaattccatgtacctattagtagtcactctctgttcctcccttcccctatcctctggcaacaactaatctactttctgtgtctatggatttgcctattctagacatttcatataattggaagccttttgtgcctggcttgtttaatttagcatattgttaaggcttatgcatgttgttgtgtatgtcagcatttcattcctttttatagtccactttatggatagtccacatatatctgttcctcagttggtggacagttggcagttttctgctagaataccttataagagccaaatatgttaagcccaggtgcaatttgttccttgtgccttcctcgagattctgaggcctcttcagcaaacacctggaaataagatggaactgtcatcactagcccatgaaatctcactggggaaggaaagatgtgtgtaatgaagtcataaccagctatttattgttatagttgagtataatgaacatatcaatctatttatggttgttaacgtaatgcactatctctaatagacttgaaactgaaagtttgttttaggtagaggaaaaatacatgtatatatacacacacacacacacacacacacactcctatacataagcacacacacactgaggaaaaagtgtaaatataggcttatatttgagaaagaaactacccagaaagtgagctttttcttcacagccgggttttcctttcttccctgaagtttcagtagagcaaggtgagcgtgttgtggctcttcatcctaagtgtttattgttttcatcatttttatttaaatttgaagggttgtctctggaatacacatgaataaggaacataatagcggttttgtttttgaatttccttttccattgagtgttgcagcaatgagctatgaaacagtgctagtccacagtggcaaagtgccacctgtcagctgaacatagtgcagacatcaattaggaggctctggcatcctcttgacctggtggtggtggcattgtcactcaggtttctttggctttggctgtcctggaacctttttagtaggatactaatttttaccagcatggtaaaatttttaattttatactaatttttatcggcatggtgtgctctcccttcccccacgtgatatcatggaccgtgtgtgacttattttctacggttttcctggatagtattctatggatagtaggtgttcagtgtgcattgtcaagtgacagtgtagatggatgagcatgtgcacagatgaataaatgagtgggtaggcaggcaagctgtgtctgacagactgtgatgagaagactgacatttgtatagggtgcaataatgtttaagattggggagattgttagagacagagagtttacagtactaggctgtaagaaattactgggtagtttagagcaagagaatgacttgatgaaactggaattctaggaataataatttgagggaaaatgagtaatgaggattgccctttgacactaattggagaagggacatatgcaaaaagagtgaaaatgaccttttatttctgttaagggtttaaaaggtgatattttgttagacctgaaaaataaaaatcagttttcttacgtattttctcttttacccctgcttcctctgtaggaacaggaagagcttactccactggttggactagggaagggagaaatgagttaaggggatctctttgagattgtcctccagttgacaagtgacaggaatgggaataggatgaattcagccattaaactgacacatacttatatgatagctgtgtgagatatgtatgtttccatcaaccttgtgtctttgatgtgtgacttcagtagggataggggccatgttgtgaagttgttcagtaaacatggaacttaatatacttcactcacgcatttctataaatcttatattatgatcaagtcaggttatcagttgaatattaagaatagattgaactggaactaatatatacgtatttcattttttctcccagataacttctttgtggatgattatgctagatttactatcttggattcccaaggcaagactgctgctgtagccaatagtatgaactatctgacaaagaaaggtaatccatttgaggcttattatcttgcattcaacatttttttgaaagtatttgcatattcatcttaatgtgcaaattaagagagaaaagggaaagagact

SEQ ID NO: 24491 - DNA, 2300 bp, Homo sapien
caacacagatacaaagctattctcatggttatttccaaagcagtgaagatgtgaagtaacctccatgagcatgtaaattgtttccagttttcttcgttatgctgttttgtggtattcttttgtattcatcccacttaggtaaatgttgtttggtaaaaaaaaagtaaaagtagtggttagtattgtaaccacattatagtattgttcagagcaaacaaagtataatggtttaaacagttaatggttttcaaaaattgggtataattttaaatcctttcaagttgagtccttttaaaagttcattagaggttcctgctccttttaagtcaccagtctgtgtgacttcacagggagtccatgcaacaggaagttaccattcagttaagaacagacaagggggctgggcatgatggctcatgcctgtaatcccagtgctttgggaggccaaggcaggcagatcacttgaggccaggagttcaagaccagcctggccaacatggcaaaacaccgtctctactaacaatacacaaattagctgggcatggtggcatgtgcctgtaatcccagctactttggtggctggggcgcgaggattgcttgagccggggaggtggaggttgcagtgaaccgagatcacgccactatactcccagcctgggtgaatgagcgagactctgtctttaaaaaaaaaaaaaaaaaaaaaaaaaaaaaaaaaaaaaaaaaaagacaaggaccaggtgtggtggcttatgccattgctttgagaagccaaggcaggaggatcacttgaggccaggagtttgagactagtctggtcaatatggtgagacccgtatctctacaaaaaaatataaattagcccggcatggtggcatgtgtctgtagtcctagctacttaggaggctaagttgagaggatcatttcaacccagaagttagaggcttcagtgaaccatgatcacgccactgcactccagcctgggccacagagtgagaccttgtctctaaaaaagtaaataaggaaaagaacaggcaaaatatctatctataacttaatgctgacgaaggatgtggtgaaatttattttttggccttgtaaatttgtttagttcttcaggaaatgtggttgacaatacttattagccgcaaagtatttgtatcctttgtctccataatctcatgtctagcacttccttgactctaaagaaatttccaaatgtggagaaagttggttgtacaaattgtttacaggttgaaagccatctctatgtccagcagtaaagaaaagctggagtaaactctgacagcttcatttggtgaatagcatattatttcttatagaggatgcttgttgtgtaacagcatgtggaaatctttatgctacagtagtgagagacggaaggaaattgttttgaaattgctaatctgtatctacaactaatgtttatacaggcatctagaaaggattacgtagagatgcagctaagtgggctgggatagtgaatattttgtgattatatttttcctttttctttgttttgcaggttttctggaatgttctttcattattttttaaaaattgatttattccttttctttttgtactcttcttgccaagaagtaaaaactggcataatgttatcagaagctaacttcagtagcttttctcagtttttggttaaatacagtttcaagctgcttttcctctctttacatggacctttcagtccatttcagatccattattaaggttttgcaatctttgggatagacagaatcatatagttggccactgtcatagtctagtctttctagatctaaagttctttgaaatgctaagaaggttgaaggttatattgtacaaaaaaaacttttgtttcctgtgtcctccaggttaatgttttatccttgtgatctttcagtgcaatcaaactgaggccgaaggaaggggagacatactttgatgttgtggctgtcgttgaccctgtcaccagagaagcacagagacttgctcctttgctcttggtaggaacgctgtgcaggaagtgtacatcacctttgtttgaagttgtcacatgctctgaaattcactgagagcttcgttttccttgagttgccttcaacaggcactggacaatgctatggggttctagggcagagcaatctttacaaagattgacagtggctgtgaaacagcctcacagccctagaaagttggtgcaagtgtggttggctgcctcatgtaatttaaaaaagtgattaacatcctcatttagagtaaaacatcctggaattaaggta

SEQ ID NO: 24492 - DNA, 2300 bp, Homo sapien
ttaagcatgtatccataaacactagtttaatttgctcattttcttctcctctatctcaatggaataataaaaggtaaacttttttgtttgtttgtttgttttgagacagaatctcactctgtttcccaggctggagtgcagtggcatgctctgggttgcactcactgcaacctccacctcccgggttcaagtgatcctcctgcctcagcctcctgagtaactaggattacaggcacgcaccaccactcctggctaatttttgtattttcagtagagacagggtttcaccatgttggccaggctggtctcaaactcctgacctcaagtgatccacccgctttggcctcccaaagtgccgggattacaatcacgagccacagtgcccggctctacttactttaaaatttgtgtgatacctggtatcttctaatttatggagctactatggatctgattctgttgtattatttctgttattcttttgttcatactgtctatcacatatttgtttatcttctgtagtgtgtcaggcgttgtttttgcagaattattttggggaataatttgagttcaaaaatggtatcacccaacagtatttgtttctctcttttttttttttttttggagatggagctttgttcttgtagcccaggctggagtgcagtggcgtaatctcagctcactgcaacctcagcctcccgagcaggtgggattacagaggcgtgccaccacacccagctaatttttctgtatttttagttgagacagggtttcaccatgttggccaggctggtcttgaactcctgacctcaggtgatccacccaccttggcctcccaaagtgctgggattgcaggtgtgagccaccgtgcccggcctttttttttttttttttttttttagacaaggtctcactctgtcacccaggctggagtgcagtgatgcgatcatggctcactgcagcctcgaactcccaggctcaggcgatcctcccacctcagcctcctgagcagctgggacgacaggctcacaccaccaggcccagctaattttttgtattttttatagagatggggttttgccatgttgccctggccagtcttggaactcccgggctcaagcgatctacccacttcagcagctatttttaaattttagtctgttggcagggttttgtagagaagtatcatctatttatttttgtaccatcatggaacattctttacaagtatcgcagtcaatcatttctgtacatttccttgttccatgtaagtcttaggacaatggaacattttattgtggcaaagtcagaaggactccacaggaaaaaggtttaaagcatagggtagcattggctagaaaaaatgtcgtctatttgggagcaagtctcaatagacaaggtagattcagaacttccttgacagaagcctgcaaaatttacgaaccaccactctatttagttgactttcagaagtcagtaggagtatttttctcaggattgccctaatgaagggagggttaggtgcaggctgtttgtaagttttaagccaaagcttttcagttgcttattatgggcagatgttttatggatcctctaaaatttgtagttttgaataacttctctaaggcattggtaaggaccttttccattttaaacatttgtgattggcatgtgatctgtaacgagcagctgtacatcactgatgttctatacgtttgtctccacacgaactggctgggtgcagtggctcatgcctataatctcagcactttgtgaggctaaggtgggtggatcgcctaagctcagcagtttgagaccaacctggggcaacatggcaaaacgcatctctagtaaaaatacaaaaattggccaggcatggtggcgggcccctgtagtcccagctactcaggaggctgaggcaggagaatctcttgaacctgggaggtggaggctgcagtgagccgagatcgtactactgcactccaacctgggtgacagagtgggaccccatctctcaataaataaataaataaatatcgccagaactttagatacatgtattttatttttatttttttttaaccaaacaggatctgcccaataacatgattcatcaggtgccaattaaatccctccctcaagaatggctttggtgtgaaacgtggtgtgatgacgcctctaagaaaagggcaaaaaccattgatttggtaagccgtatgtggtgtgcttctgcatgttcatccactggatgtgtgagtgaatcacgattaatgatttttatttagattcttaaatttaag

SEQ ID NO: 24493 - DNA, 2300 bp, Homo sapien
taggagggcccacacaggcaccctggatcccccagagagtagattggtgtgctcaggccgcaggctgactcagaggtagggcagtgggctctgcaggccacctggctggggttggtgggggtcctctctcctgccccagcttccactcagccaccacagttgccacaccatggggtggagacgtgggtcaccacgggcttgggagcaagcgccttctgcagcacaggaagccgaagctggggtcaggtgaggtcgctacccctggaggtctggcataagggccccaccctcaggtctcctacactggccccattttactttggggtccaaggacaggatggtcaacagggcagggtggacagcgtgccagcgccgcgcagggccacctccctgggtggatgcatcacactaaggaagtgagtgccaaggggatttagtggtgtggttctttcaaagggaggtcagggtcaatgggaatctgctcggacactcaacatgggggtgggtgcactccttggaggaggaggaacacgttcaggggattgtgaggtcttgcacaagccacgtggggcaccttggcttcccggcaggaggtggacacccagccagaggcctggctcaaggtgacctcaccttcaccatgggcttcctgggtgcgcgggcctgagcgcaggttgttttgtacatattggaatatgtgttaacttatgccccgcatcccaactcacacggaagcacgggtcttgtctcagtctcttcgctgcatttggaaagcagtctcctctcgggccagcgccgggctgaggtgtccagaggcggcggcagctggcagtgccctcagcccccaagtgtccagcctggcacttcccattcaggccacctgctttgggtcaacagttcctttgccagcagcatctcctaaattgtaaggactctgtccaccggggccctcccagggctgtgaggacggaaacaggcagggagtggagctaacagcttagtcaccaggacccccagacctgcaaacgtcccctcctggaaggggaagccaggaacagcagaactgcccacaaaacaaggctgtgaacttttcgggaactggaactgtttaacttgaacccaggattgtttaaagctttatttatttatagcttcttcttaaaaaaaagtgttgaagaaattttttggttattcatacaaaaaaatgagttgatgatggaaaagcaagtcataatcatctaattgtttttgtctaggtcgagaatgaatgttagctgatgaaataaaccctgacaaggagtggcgggtgtgctgtggtctctgcgggcatagctgcccctcccagtggggtctcacaccacgtcccaagggcggggtgctttgcacaggtgcaggaggctcagtgaggaaagtcccattaagtaaggcattctgaaagaaaaaatgggactttgtcatcaccataaagagtaaccgtttattaatcattagtgatagtatttgggaagatgacaccagttgagagggaggcaggtgccactgagttacattctcattaacctcttccctccctgtctttggaaattttgaaagatttcaaatgacaaagagagtggaggaatagttcatggacacccacatgctcttggcctaaatttttcaccttctcttatcctgtgcccacactttctcatacacgcacacacgcgcgcttttctgaaacatctgaaagtaggttgtgatcatcagaatactgcactcctaaatccatcagctcgtgtctcctaaggacgttctgccacaaaactcaaccctgttatcccagccccccccccagattttataacaatacagtattttccaatatccagatcttctggttgtcctagagatgtcttcagagcattttgtagccccaggaccacacggtgccccatgtgcctctcctgtctccttgaatggaggagagggtcccagctaccccttcttttttccgtctttcttaggattgacatatttgactagtagagaccagttgtcttaaaaggtctgctgatgttggccgggcgtggtggctcacacctgtaatcccagcacttggggaggctgaggcgggcggatcacgaggtcaggagatcgagaccatcctggctaacgcggtgaaaccccgtctctactaaaaatacaaaaaattagccgggcttggtggcgggcacctgtagcctcagctactcaggaggctgaggcaggagaatggcatgaacccgggaggcagagcttgcagtgagctgagattgcgc

SEQ ID NO: 24494 - DNA, 2300 bp, Homo sapien
tggggtgagagtggttgaccttggaaccagggtcttaacccctttgaacctcagttttctcttctgtaaatggatatcacagcctacccccgcagatttgctgatggaattggaaatgacacctctacaatgcctggcacccagcaggtctccaaaagagcagccttaattatgatgtagcacgaggatccttatctgggtaaggacatctggggggtggacccggggcagctgtgctcccctaggccacacaggaaggctccccagggctcaggcacagactgcgtcaaggggctgcaggcaggtccaagcacactgcagggcggccccacctgtgtcccatggggactgcacccccactcctataggaatgagtcacttctggagaagcttgtccaagctgcccccaggaccctcgggccagggacagttttaaagcagcctacaagatgagcaggggctttggggccctaggtcccactgaggaccccacaccatggactccagggtgcgctgggctgtgttgagggttctgcacccgcctgtccacagcggatattcttgcggtccctttggaaaatgcatgccgcccgctcagctgggtttggggtgttggtttttccagctctctgggtttgcttccaggagggctttctggtgtgatgttgtctacgtttaacagctttactgaggcataattgacaccccatgatcgcttccggtccctaacagaacggaaggcagggcaccaccccgcctccccccccaccccgtccccggcagggcttgacgtggacactgggagcccacgcctggcagccagactcgctcccagagccctcgctggcctgaaccaacacactagggcccaccgcggccggccctgcagctgtgagatcctggcaggtcccagccccactcctgcgcttccgacgggctgcagcctccgagtactgccagagcccaagcagtgtgagtgggcacctggcgggaccccccgccccacgaatgccgcgcgtgcttgccaggctgggcggcggcgagtgaggagcccgcaccacccggcccacacacgagccaacgtggagcgagccctccgcagccaggttgggcccgggccgctggactctccaaccaacccacgaaagacagaatatttggtgggcactcacgattcttaagaattggctcaatgttttataactctttcattggagtataataaacatggatgggggaaaatgcacctcgtctgatattcttttcaaacaaggaggaagccataaagccgctccgcaggcctctgcagacagcccaacatctcttcaatgcggggctgcggggcactgtcccaaagccagccgcaggggtgagggggtcgagcaggaaaggaaagcctcgctttccctctcggtcctggtggtgggcggcccccgccgccctggtccctggaagtgcagcccagtaggctagcgtctaacttcagcgccccagcgtgcaaggtcaaggcctttcctcccgcgcgggctgcggggacgtgggcggctgggacttggggaggagggggtacggacccaggctccagaagcgccagccgccgcgccccctcaccgcggcccccgccaggagagcctcccacgcctcggctccgcactgccggttggtcccccactcccctgagggcggaatcacttcccagtcgctggctgcccgcctgctagcggcctcgccaccgcagcagacccaggtcccgcgcccagcacccgcggcgaaccccggcactccggaggcggggccgaggatcggcgcgggcggcgacggcaagagacgccacgggggcgggccaggggcggaccggggcggggcggcggcggcggactgcggagacgcggcggcgcgcggggcggcgcagagcgttctcggcgcggagtggagcggagcgggctggtgctgggggcgcggagagcgctgtgctggccggggccgggagcggggccgagcgggagcggagtcgggcgtcgggcccggggagccggggccgggcggggagcagccatggcaccgcggagggtcggggcccgcgccgctgcgggcggcctgggcgccgagtagccgggccgggccggagcgcgggcggcggcggaggcagctgcgcccgcgcctcctgccctcccaggccccgcgccccgcgcccgggccccggcgatggtgacacatgcggcggcggcgcgccggcggcaggaccatggttgagcgcgccagcaagttcgtgctggtggtggcgggctcggtgtgcttca

SEQ ID NO: 24495 - DNA, 2300 bp, Homo sapien
tgtgttggcggttcacactgtgtgggctggagttggctcatactgactcataagagctgattgctagcctttcttcccaactctgagtgcaggggcatcacattgacagcttgaaatcatccatagtgggagtatttaaaccacattacatttagaccatacattgacaaaacactgcacataagctcctttttctcagagagctagttgttaaatacttactggcacatcacttgttaagcaattgagcagctcatgcaatgagcacaatcatgtttctcagaacaaaaccaaaatgacaaggaatatgaacaaaattatgccaggctggcctagggtttggagaagacctcaggtgtgaactcaaaactgctcatcttgcctcctgttatgcacacagtcgtgtcttgtttttgtcagcatcctaaagttctgggtaatgctgctggtgggcaactggcctcagtttctttaatcagcatttgtctattttttgcttagtacacctgttattgttaatcagaaatccaacgacaggtggttacatctattataagttccttaatgctttggggcaagtttaaatactatcaagtttctggaggcaaacttacgaactcacttcacattgcacattggaactctgctctcccattcattatccctctgatgaaatgaccgttcacaggtaatcaatagctaaactgataaatggtaaggcttcttaaaaatccattgcttgattgctgagacggaatgttttattcattgacaggtgtgatttatcattcagtggcaaggaagagaacatttgttccagctgttctcacccgcattgcacagcagtgggggctttcagtctgcttccatagagcagaccgagcttttggttagggaactgcaactatatttagcatattaggccattagctatctgtaaacagtctgcatgcattattcttcccattgttcataattaaactcctcatcatgggaattgcaatgcagatcgtctttgatctcctattcagattccaaaaactatgaagcctttttgcccatgtggaactgctactagagcttgacccagctttgtaatgaagcaattagtgatagctactcttgttgaagacctactctgtgctaggcattcagttaggcccttatataaatgatacatacatgtatgtgtgtgtataatctttacagtaactatgaaatattcttattcctgatgtcctctggtcatctacagagatgcacagtgaaaacagaacttctcagatgaaatccaagaagcaaaaccactaggagtgatacaaaataagggacttattatggaggcttgttcttatcccattgtggaagctggttaaggtttatctgcagctgatgttgcacctgcagtcatcagggtttcagcaggcagtatggaaagacaaacagaaaccacaaggaccatcaggaacccatgcaatgaactggaagccacattgctctgtcaccacctccaaccctggataataggggtgttctactcttattcctgaaactaaacatggatgtggcccaggagcctaagaagctgaatgagaagacttggtagaggctggaggacttgaaggcccagctgtcaaccaggaaaaggagcagaggacagggcagatggtgtgaaccaaggagctggctgctgccttatgccaacaaggcacatgtgagctgcagcagcctgtgttggggaaggctaattctaggctggcgctcctgtgggtcatctgcctgtgtgttggtgttctcattcctgtggtggcaggtaggagcctacctagctcccattgtccagtccctcttggtaggctcttccttcataaagtcgcagaaccatcctggcaggccagcaagcacaggggacttcaggagcactgttgcaagggcacagactttagagcccaagcagggtttggatctcactcagtcttcgtgatgaactaggggctctgagcccagttacatcaagtgcaaactatgttgtaagtaatactctctggcttgtgtgaggattccttgggaaaagatttgcaggcagactggtgcagtatcaggaatgtgatatgcgacatacacttagcacatgctggttcctttctcttccttctgtaagtcagcactgaccttcagtccctgtgctgacatccctacccctgcctcactgcctatttgaggaactttcctactcagtggtgccttattgaaatggagcatattcctgccacccataggttggagcacccacccctgct

SEQ ID NO: 24496 - DNA, 2300 bp, Homo sapien
tatttctagaattgctgcatgaaactttccagtattcaacagcaataaaatatatgagacatgcaaagaaaaagagagtataaaccagagctaaggaaaaaaacaaggaatagaaatggtctctgaggaatcccagacactgtttttcttagacaaagactttaaattagctatttaaaatatgttcaaagtgctaagtaaaaccatgtctaaagaactataggaaagtatgagagttatgtcttaccaaatagggaatatcaataaagagatagacgtcatgcaatgtaggttctggaattgaaagtgtaatagcaggccttctttatgagaaatactacaaggagtctttcaggctcagataaaagatacaagagagtatcttaaattcacattaagaaataaaggtgcagagtaaagataactacatagataaatataaaagacagtattaatacagttttagatcagatgattcgaaagataatgacacaaagtaataataattggtttctgttgatggacccacaatatataaaatgtaatttgtaacaataacagcatatagagaaggagctatgtaggagcaaagttttgtatactactgaaattcatttgtaactaatctaaattagatttttataaattaataattaattatacaaatggccaatgaacacatgaaaagattatgaacttcattagtcattagagaaatgaaaataaaaaccataatgagattgcacttcattactactaggatagctatatttagttatagtatagctattatatagttactctataactcttttctttgggcttataatcaagagaacttaaaaaaatctgttcacataaaaacttgtacatggtagcattatttattatagccaaaatgaaaatagctcaaatgtccatcaattgatgaatgacaaacaaaatatgatatatccatacaatggaatattattcagtcatcgaacaatggagtgctgatgcatgtgacaacacagattaactttgaaaatgttatactaactttaaaaagccagccacagtggctgcataatgtataatttcatttacatgaaatttccatagtaggtaagtttatagagacagaatatggatgagtggtgccaaaccatctataatggcagaactcaggcaggtttcatggagaatacacaactgtgtggagataagataatggtgtcttttgatgctgccaaaagacccagaaatcactatcaaatgtccccataggaaggagaggagcctactttgagtagatacttctctaagagcaaccagcataaactttaatttataagtgagttttttttaaaggccgtcctaactcccagaaacttcaaaaatgtgttctaagaattcaaaactccttggtaagaaaaatagatataaaatgcaaatgtagccagatacaaattatagagtaagtaaaaaagaaggttctgattcagggttaaaaagtccgtgggactcagatctcagagctatggaggtgaccccacagagaggcaactttgataatagcagcagagagaattcttaagtgtcaagctaggaaaaccacacctctgatctatgctggaacttccatctaaaggcacagaacaccacctcattttccataagccaccatgaggtgaatgaactccatacaatgatactagctgatattaggagacaaatgatgaaaaaacataaaaattaatagctgaattatatactcacagatattaaaggcatataataaaattatggcttagaatatatatatacactatagtttaatattaaaaatacaaaattaaggaaatataaagtctatgaaaaatatcaaaggtaaaaaatagaaaatctcagaatttaaatcataaaaaagtggataatatgaaaaagagaagacagtgcctaaaatgtgaaaaaaaatcatttcagaaatgaataaattatatggaaaaataaataggtaacacagaaagtacagtaaaggaaaacagaaataaaagacggacaacaaaaagtaaagaaatttaaaaatgagagaaataggggaggagccaagatggccgaataggaacagctccggtctacagctcccagcgtgagcgacgcagaagacgggtgatttctgcatttccatctgaggtaccgggttcatctcactagggagtgccagacagtgggcgcaggccagtgtgtgtgcgcaccgtgcgcgagccaagcagggcgaggcattgcctcacctgggaagcgcaaggggtcaggga

SEQ ID NO: 24497 - DNA, 2300 bp, Homo sapien
caggctgaagtgcagtggcaagatctcagctcactgtaacttccgccttttgggttcaagtgattctcttgcctccgcctcccaagtagctgggactacaaacatgcaccagcatgcctggctatttttgtatttctagtagatacaggttttgccatgttgtccaggttggactcgaactcctgacctcaagtaatccgcctgcttctgcctctctgggattacgggttgtgagccatcacgcccggtcctttctccagactttagacactgattttgcaacaactgtaacactttaaaatttgagtgggttaaacatgacatcaagaactgctaagcattattttagtttccacagaatgtccttagttttcctaatcaactttctcagggaataatatgccctatttgtctgctagcgttccatatcaaagtgctgcagacttggtggcctgaggaactgaaactttctgatagtctgggggctggaatggatcagccaaccagcagggttgcttccttctgaggactgagggaaggttgtgcttggccctcttctgggcttgtagatggctctcttctccctgtgtcctcaccttaattctgtctgcactatctctttctcttcacgcggtgttctttttatcataacattggcgataggggcccacccaactccagtatgacctcatctaaactaactgtatatgtaatggccctgtttccaaattaggtcatattctgaggtcctggggattaagacttcagcatatgagtttcagggagatgcaattaaatctataatatatgcatactgtaaaatttacatttttatatgttcatatgtatgatttttgtaatacatacatgtccatgtacttgtcaccacaattaacatattaagcatttcctctcatttccaactcctctgaaagttcccttgtgcccatctttggtcatccttcagcccctatctccaaacaacctctgatctgtccccacagcttagctttggcttttcttgaatttcgggtaagtggcatcaaacactatggacttgttggagtctggcttttttcacccagcgaaatgtctgtgagattaatcaatgttattaggtgtatcagtagtttgttctctttttattgctgagtagtattctatcctatgcacatctcaatttatttgaccattcatctgttgatagtcatttaggttcttctgagtttttggctatatgaatgaagctgtgatgaacactcgaatgtaagtctttgtgtgaacgctcatgcctccagatctcttgagtaaatactgaagagtggcttttccccatcttgggggtgtaagtgtgtagacctttataaggggcttcccatcagcttgtacctccacaagtgctgtaaaagtgttcccccagtctgtgtcttcccttttagttttcttcactgtcttttgaaggccaggttttaattttgatgaagactaaatttatcaatattattattttatggttcgtgctttttgtgtcatatataatacatcttttttatttaatttaaaaaattttttaatgtaattaatttatgtattttgagatggagtcttgttctgtcacccaggctggagtgcagtggcacaatttcggctcactgccacctctgtctcctgggttcaagtgattctcctgcctcagcctcctgagtagctggaattacaggtgcacaccaacacgtccggctaatttttttcatttttagtagagatggagtttcaccatgttggccaggctggtctcaaactcctgaacttgtgatctgcccaccttggcctctcaaagtgtagggattacaggtgtaagccaccatgtctggccttaaattttatttttatttttaatttttgtggatacatagtaggtgtatgtatttatgggttacatgaaatgtcttgatacaggtatgtaacgtgaaataagcacatcatggagaatagggtgtctcatctcaaactgtaatccccacatgttgagggaggaacctggtgggaggtgattgcatcatggaggtggttccccccaagctcttctcatgatactgtgttctcacaagatctgatggtttaaaagtgtgtgggtgtggtggctcccctctcgctcctgctgccatgtaagatgtgccttgcttccccttcgccttctgcaatgattgtaagattcctgaggcctcctcagccatgtggaactgtgagtgaattaaacctctttctttctaagttaccaagtctcaggtggttgttta

SEQ ID NO: 24498 - DNA, 2300 bp, Homo sapien
ttttttaaataacatgtttttgagactctgtttgttgaatttcggatcattatgtctttctagcagattgattctacttgtgattatgtaatctttctctgtgtcttccttaagtttctttgctctcaactgtaccttatcagatattaatatagctacatttgcctgttaaaataaatgtttttatggtacaattttccattcttttgctttgaactcatgtatgtcattgaatttgaagtgagtttcctataatcagcatataattgggtcatggttctatatctactctgccaatctctgtctcttgataggtgtatttagatcatttgcatttaatgtaatttctgtgttaccgcgtaagtctaccattttattatttgtgttatgtttatttcttctggtttttatcctcctgcttcttctgtcttcccttcttgcagattatttgaatattttttaaagaattccatcctgcttgatttgtaatgtttttgagcatatcttttaaactagtttttatagctgttgctcttattattacagtatacatttgtggcctataacattccactggtttcaacattttaccactttgagtgaaatgttgaaagttggcttccatttaagtccttaggtattcaccagtttttattgtcctgaatatttaatggaattatgatttttattcaattatcaaatataatttataaaattaaagagtaaaagaatagtctaatatttttacccacatttatggttgttctatgttcctttttttccctgatgctttaagattcttccatttgtcattttctttctatctgaaggactccctttaatcaatcttcaagagcatgtaagcaaactacaaattcttaagcttttctttatctgaggatgttttaattttcttcttgttcctaaaggagagttttgctggatatgaaatttttagttgacatatattttttttaagacttaaagaatgttgtgttcttctggccaccaaggttagatgagaaatctgtcattcacattgttattcttttgtaggtaatgtgttgtttttctctggctgctttcaagatttatcagtgtgtttagttttcaaaagttctattttgatgtagcttggcatggatgtgttgggatttatcctgttttgggttcagcttattggagctgcaggcttgagccttttgctaaatttgggaagttttcagccatattttctcaatcactaattcagtctatctgagttcactcagcttcttggagccgtaggattgaggcttttactaaattttggaagttttcgaccattatttcttcaaacatgaattcattctcattctctttatcctctctttctggaacttcagcgatatgaatgttagatttttgttgctgcactgattcaacaaatatttattgagctcatgtgtgtcaggcactaggctagtgcttggggatataaaattaaataaaataagcatagtctctcctatacaaggagagtctctcacattgcaaacaaaaatgtgaccagataaatattgtcagtgcaaaaggaggtacaaatctaaagaagcatacatttgtttggaaagattgtctccctctctgactaccatagtagttttcttcttttataatttactcaacacataattgttgaacatcccctgctagatatcaggcagggtatttgctgttgaggatgtagtcatgaaaataggtacagcctgtaacctaaatagaatttgtgaaattactagagcattagatagcattagacaaatagttgtagaaataattataaccatcctgctaaagctatgaagcagaagtatcaggtactataagaggactattgcactctattatacacaggagtctttagatctatacttgtttcatctttgtatcatccacagagcttggaaaagaacattgaaaaaattgattcttaaataaatatatgttgagtgattgagtcctgaatctgaggatggggtaaaaaatgtcattctttctaaataaaaatattaatccaaaaaaaaaaagatttttgatggccgaatagggacagctccggtctacagctcccagcgtgagcgacgcagaagacgggtgatttctgcatttccatctgaggtaccgggttcatctcactagggagtgccagacagtgggcgcaggccagtgtgtgtgcgcaccgtgcgcgagccgaagcagggcgaggcattgcctcacctgggaagcgcaaggggtcagggagttccctttccgagtca

SEQ ID NO: 24499 - DNA, 2300 bp, Homo sapien
agctactcgggaggctgaggcaggataatcgcctgaacccaggaggcagaggttgcaatgagccaagatcatgccactgcactccagcatgggtgacagagtgagattctgtctaaaaaaaaaaatagaatgtggtatattcatactatgaaacattattcatccataagaaggaatgaagtactgatacatgctagaatacagatggcccttgaaaacattatgctctgaggaaaaagccagatacagctaggctacatattgtatgattctatttactgtggtacctccttaccttcaggagatagatttcaacaccactagtggatgcctgaaactacaatagtatctacttctatgatactatgttttttcctatgcatgcatacctatgaagtttaatttataaattagtcaccataagagattagtaacaatagctaagaataaaatagaaaaactagaacaatatgccagcttctgtgaagggagagttacgtgaaaaacaaccacgtatgccagcaacactgctcttgaactttgggtcttgattaagtgaatgaagtgttgctggaacacaagcactgtgatactgtggccgttaacctggtaacggagaaggctcctaagtgactaacaggctggaagtgtagacagcgtggaccatgctggacaaagggagcgttcatgtcccgggtgggacaaagtgggatggcgagggatttcatcacgccacttagaatgatgtgcaattgaaaactcatatattgtttatttctggagtttaatcttttaggactgtggttgacttcaggtaactgaaaccatggaaggtgaaaccacagataaagcaggactactgtatttaaaatgtccagaggaggcaagttcatggagacagagatcagtggtttccagggggggtggggggcagcaggaatgggatgtgactgcttgatagatacagagtttctttctagagtgagaacaatgttctggaactggcggtgatgactgcacaacttctgaatgtactggacgccactgcatttgtacaatttatttattttattatcattatttttttgagacaaggtctcactctgtcacccaggctggagtgcagtggcacaatcatggctcaccgcagccttggtctccagggctcaggtgatcctcctaccccagcctcctgagtagctgggattacaggcatgcaccaccatgccaccatgccaggctaatttttgtattttttgtagggatggggtttcaccatgttgtccaggctggtctcaaactcctgggctcaagtgatcctcctaccttggcctcccaaaatgctaggattataggcgtaagccactgcccccagccttacacaatttaaaatggttagaatgatgaattttacattgaattccacttcataggaaattttttttaaaacaacaacaaacctctttaatggacacataaattccctgggggtctgattgcaatgcagatttggattaaggagtccgggtgggtcctgagaccgtgctccccttgcttctcacctatggccacattttgagacgcaaggccactcgaagggcccccacctctgtgaatcaacccctgctccatctgcccctataaataagggaatgctaaagcacagatggcgggagtgggcgtgtccccaggtctgagcctggagggggtggccggcctcccccaggcatggaagtggagggagagggggctgtaaacgggttactctgtcagcagacacagaggagaccaaaaacagtagcttttatttcacacgaagctgaggaaggaaggcgagaggacagcgctggctatcagagggtgctgcctggcaggtgcaccacctccagctgctgggctccagctccggggctcagaagccatctgaaagaaagcagcggcctccactgagcaagctggggtgctgcagggtacccgcccccgtggtgctcagcagtgccttccctcccctccccagcccccgggaactcctcctgcgccagggacacagggatcaaggagagaacagagtgcaaccccatccctgcctgatcagtgggggtgcccgtcttccctgcgacggttttggggtggaacaggagtggctcctcagggggaaatgaaaggaactgaggagctccagtcgtgagaaggccaatgaagcaggtagcttctctgcgccggggttgtgctgagatgtcatctagggccggctcttccagaacctcatttgacgctgggaggcagcgaccgggtgtggg

SEQ ID NO: 24500 - DNA, 2300 bp, Homo sapien
tgggaccgcacgtgcatgccaccatgcccagccactttttaaaattgtatatagcgatggggtctcactacgttgcccaggatggtctccaactccagggctcaagcaattctcccaccttagcttcccaaagtgctgggattacagcatgagccactgcgctgggatgacttctattttctaaaagcaactctactgggagatttatgctgaggaaagtatgtggttatcagactcagtgcccatggtggatgacttcttttttttttttctttgtagagaagggatcttgctttgtcacccaggctcgagtgcagtggcatgaccacggctcactgtagcctcgacttcccgggctcaagtgatccccccaactcagctcccccaagtagctgagaatacaggcatgggctaccacaattgtctaatttttttttttttttgagacagggttttgctctgtcgctcaggctggagtgcagaggcatgatcttggctcactgtaacttctgcctcccagattcaagcatctctcgcctcagccttgggagtagctggggactacaggtgtgtgtgggtgagtctgggtgtgtgtgggtgagtgcaggtgtatctgggtgtaggtgggtgagtatgggtgtgtgtctgcgtgtaggtgggtgagtatgggtgtgcaggtgcgtgtgagtatgtgtttacattgtggtatgtgtctgttgggtgccgccattagggatttggaagagtgaggaccataaacttgtaaacatttctacatgcctggtccataagaagtgtaccaagcatgatcaaaagtaactaaaccaagtaaacaaattagacattaattaaacttaatgctgggcaggaaagaagtattcaaggccaggtaaaatgaagaaatataaccaaataaatgaaattttaaaattagtagaatgagacagaaatactttttaaagtttttaatttctgatgaatatcagtatataaaactaacaattatatggccgttaattgactaaaaacagtactttagatttcagctagtgaaacagccatatatgatcttctaattccatttttatgtctcaagaatgacttgtttaaataattttttttgaattgttacattttcatcttgaaagagcttcacaaaacttacatgagaatctggattgtcataagaggtctgagtttttaatggtatgttcgtatttctgttatgtacatcgatgtcaaacattcatttcctgagctgttctccagaacacaatttgacttgtaatgaacactcaataaatggttgcttggataatcaaatcaacaccttagtttcatcaattttcatttcatataaaagtgactgatcttccatactcaccaatgaaacagagagagatgagggagggatagcagtggagactaagaggatgacaagcagacctcattttgcagtggatatcctacactctccacttctgaatgcttggaaacacttgccatactcaaaaaacattgctatttcctaggcagaaaatgggagttaaagaaaatccatatttctatattacaataacttacactataatacatggacgacatacatttctaagctcttcagttcatagaaaatgtagatacatttaggtgagcaagatgcaggagaagggttaataatcaggctgagtgtgattgtgagattcagtctaatacaagtcttgggtaattgtatcagttgacatttctgttcaaatgcaaggtgggagagttttgcaggagctactgaaacttcctgcctgatgttaggagagatgttggtccatgtgattaggccagatgtgtttgcttaattgtggcttagaaaagttaggtttctgacctctcacagagacggggagatagggacgttaaattttataacatttctatttaatatatatttaataatacataataaagtttttaaaatgtcaattttgtcctttttctagtttgcattattttgttttcaccgcaccattgtttttagtacatatgttttgtgtatttaaaaaactgtgttgaggcgccctggctcgccctgcgccagaggctcgcgcactcagcaggttgggctgcggcggcggcggctggggaagccgaagcgccgcgcgtgagagatcccggatacatctgcggtttgggctccgccaccctccgtctctctcccgcaggtctctgagccgggtgcggaaggagggaacggccctagccttgggaagccaaagcacacccctggctcctgccgacaccgccct

SEQ ID NO: 24501 - DNA, 2300 bp, Homo sapien
gtggaggaggaagaggaaagagaggggactaaggttctcccagtttaaggttttgttgcaatgaggggatgaggaagtatgaagatacttttgttgtcttttcatctttatactgtgttaagtaacgtttacaacataaattcagcaggcttttcctgacctgtaactcgaagttttcttcctgcaaacaatgtatttacaaatgtgtttattagcttacacagcaatctcacaataactagtaaagattaaaagggcacactcctagtatatttgtttgcagtgttttaagggaaatacatattgccatggtgaagctctaaatagattcaacgaaacatctaaaaatggaaagttgttaaaaaaaaaaaaagcaaagaaatatcgccaaagaaaaaatattaatcgtagcttaaatataaaactaaatcactagttaaactatacagatctaatacaaaccaaaaccagcctgaaagacccaaccttaaaaaatgctaaaaaataaggcataaatctgcataatattcagttttatttccattctctcctttccctctactatgtatgctttacctgatctgcctctaggggcttacaagaaaacggtttccggtttccgtcttccgtcttccgtcttcaatttgacctcaaatgtcctgagcaaagtttttgctattctgctgagggttcttttgctggtaagctttagatatcgttatttctgctaattcagtagttttgatcgtagtgccaaatttaaattcttccactggttcttctgtaaggaattaaacttttatggtgtcttgcctgcatagtattatttttttaagaaagaaaacccaagcaaaatctattgcttacagaggtttcttactttttaaacaaacagaataactcttgacaattttaaaaccttgggagaaatagttcattagaacttcattatcttaccatgaagaagtaaatactaaaaacctgttctgaagcacttggttacttttctctcccagagtctaataaagcacatgtgaaaggaccatttgtgttagtcagaaatacattttatgttctgctacttataagtactcagtatgttctttaggactcattttgaagatgcaccaggaggcttttctcattcaagcactgcctaccgtgatcgctgaattctgacctcaaagaagatctaagtaatttacatcagtgctcaagaataattctggacatcttggtccacagcctacagcaagtggtatctgtaaaattaaaggataattccagtgggcttggtcggactgctgctttgccatctcttgtttgttttgaggaagtggggggaggctaggtaagaacacggaaatagggaacggggtaagggagaggtgagaagagcaaggagagataaagcaggctgtgaacatactgctcgttaaccaagccatactcatactgttgagatttccatcattttgaagtacattatcataacattaaaaaagaaaaaaatgttaagaaaatgtatctaatttttaaagttatcaccggaatatgctgaaataatttggctttttgtaaaatataaataatgaagacgctgactttttttgtgcttgtgaagctaatagatcacctccacgagacaggcagcaatgatgaattgcaaaacgttattaatgaagggaaaaggttcaagccaatattcacactgcagtcaatgaaagagtaagggggcttctgaggaagggttgaagatgacatgggagagtagcaggaacaacccccttcgctgactgtttgctcctgaggcttttccagttttatgtcactcatgtcttctctgcttccgtcctgtgtgctttccattcccggcaaagctgctgctacacgtcgaaagagctgctttacattgtatccagcttttgccctagtttcaataaacgtaacattcagccctttggctttcctctctccctcctcaactgacacttgcctcttgtcagcaagatctgttctatttcctactagcgtgatgataacatcacttcctctttctgttctgacatcatcaatccactttgtagtttgctggaatgagttaacatttgtgatatcgtaaactactacagctgcagcagaatcacggatgtacctgggaatgaggctacggagacgttcctgacccgccgtatcccacagccgaagcccgattgttccatcctccaagtacatagtttttgataaaaagtcaatgccaattattgcctgataggtgttgtcaaaactgtcatacctga

SEQ ID NO: 24502 - DNA, 2300 bp, Homo sapien
tctcagtgataaaatactgaaatactcctccctgctggggcagtgggtcctatacacaccccttcccttgttgatatgtcactgagaatgcgacgtgatcaatgaccaatgagatttagaaaagtcgggtgatattattccttccttattgagtgtgtaatagtgatcactaatttatgcaacttgtttctcttgggtgtgcattaactactctactagtgatttgtaaaagtgaataggaatcactatgggagaataaaaacaacagccagattccttggaccctgtgaccaaggtcttgggtgatgctgagaaaactatatttttaataagcatctagatgtttcttgatgcttgtggaaatggtctttgagaaaccctgtactatacaaatgattaatttgtctgaatgtaagggatttaatctgatcaatgtacaaaaaccatggaaatcaatttgagtacaacttaaacatctaatgatggtagaagataaaagtagggagttttgctattctgtagaatttcttagtacctactaactaacgcaccccttctatccctgttacataggtaccactagctcttcatattccaatggtaagccatggtaccacactgaaagttctattgcagggcagctggacactgtggctcatttatatattgtgggtttgaattgaaaaatgcttttccacaatgaaaaatacctggcctgcatgtttcctctacctctctcacacctatagcaaacactgcgggctgatacgacattggttatccctgtgccaaggctctgttctagattcccttctaacacagcatttctggaagctattactattaatttgatgttgcattcaaattaaactcatttgtgtttcctattggggactcttcagagggataaaaatgcttcctactaggagcagtagccatgttaacaggaggttgagcatatatagtctcaggtgatattacaaggagtgatagacagctgggtgggtgaacatgggctatctctccattgaattgtctcctttagtgtcccttaagaagagtttttaatctcctgcatatagatcttaagcatcttttatcagatttatacctagggcctaggtaattgatgctttttttttttaactaatttaaatgtcttttgtaaaaatacattttctaattgtttgtggatgatgtcaaatgcaattgatttttgtatattgaccttatattcagctatcttgctaaacttattattgctagcaattgtataaaatttcctcataatttcctaacataatcataatctgcaaaaatagcagtattatccccattttttcaagctttaggtctttatttttcttgttgatagcaccatctcagctcactgcaagctctgtctcctgggttcacgccattctcctgcctcagcctcccgagtagctgggactacaggcacccaccaccacgcctggctaaattttgtatttttagtagagacagggtttcaccgtgttagccaggatggtctcgatctcctgatctcatgatccgcttgccttcgcctctcaaagtgctgggattacaggagtgagccactgcacccagccttcttgttgaacttctactataatggtgaataaaaatggcaatagtaggtattattgtcttgctgctcattttaagcggaagacttcaaatattaaactcacctgccatttttaggataaacccaacttggtcataccatgttatctttttttatattttgtttaattcagtttgctaatcatatagttcccttgtttttctattatctgaaagtgcttttgtaatagtggagtaatgtattcctcgaaaacttgggaaaagcacctttaaattatcttgatttataattttttgtgagaagattttttattgcttcagtgtctttaatagttaaagaattttgcaggcttcattttctgttggaatcagttttagtaaattatatttgtctctttttctaagattttgtttgttctaaaatgtatttacattcttttttatattaatatttttgtcctaaactgtatctgtaattatgcttcttttttaattcataatatttgtgtgtcttctcttttcttctcagctagtctccaaagggtttattttatttctttttttgaaagaaccaacttcttcaggctttattgacttttttctttgttctttctttctttttttttttttttttgagatggagtctcgctcttgttgcccaggctggagtacaatggcattttcttggc

SEQ ID NO: 24503 - DNA, 2300 bp, Homo sapien
agtgaggccttgtcagtaatgacctagtcagtgaggccttgtcagtaaggacctggtccttgaggccttgccagtgaggccttgtcagtaaggtcctggtcactgaggccttgtcaataaggaccttgtcagtgaggccttgtcagtggggccttgtcagtaaggacctggtcagtgaggccttgtcaataaggtcctggtcagtgaggtcttctcagttaggacctggtccatgaggccttgtcagtggggccttgtcagtaaggacctggtccgtgaggccttgtcaataaggtcctggtccgtgaggccttgtcaataaggtcctggtctgtgaggccttgtcagtaaggacctggtccgtgaggccttgtcagtaaggacctggtccgtgaggccttgtcagtaaggacctggtcagtgaggaattgtcagtaaggagctcatccatgaggccttgtcagtgaggccttgtcaataaggtcctggtcagtgaggccttgttagtaaggactttgtcagtgaggcctggtcagtaaggacctggtcagtgaggccttgtcagggaggcctggtcagtaaggtcctgttcagtgaggccttgtccgtgaggctttgtcagtaaggtcctggtcagtggagtcatggtcattgttggcctggcagcgggggtcttgttagtgggtcctggtgatgggggtctaatcagtgagggtgtggtcagggaagacctgatgtgtggggtctggtcagcaggaacctggtcagtggggactgctgagcgctgcttggagaagccaggtgcattgcacgttatcgagggccctctggacagctgggatggcccagtgatgcccaatggcccggtcaaaagtagacaaagcagttgtttggatggacctgggagatgttgctcagagattctgacaggacaaaggtgaagaaagggtcagagtggctggagagatggtcacagtctatgggctgcacaggatggagaaagccagggaacagggagggtgggcagtgcggtgcagggagaggcaggtgcatggtgggacgtcagaccctgtgaaggctgtgagggtgtcaggtgggttgggctccaggtgcaccctcagtgcactgggtgggtatcaccccaagctccctggaccccagccaggtgatgtggtcactccctgggggactgctctcaggtcccggctacctaccctgggcagcgctgtcccatctcaggactggactttctcagatcctgtagagggcacagactccacccaggaggggcaaccgcatggtgcagcctgagctctccatgggcctggagcatcccctgccagccttgtgctccccattctcccaggtcccacttttccagtgtcagccagcagggatgccccatcctcccttccccatgtgtctcctaggctgaaacttgtggcagattgggacagggatggtgcttccctcaggcccatttggggaggggactggctcccagactggtgcaggtcctcagctctgcctcgactggcttagagtgagatggatcagtcagttccctgaaggtgaagataagagactgtccctgctgttgggaggctagtctagggatggaggacttaacaggtcctcccaggctgtgaggcctggcagcactgtcttgtcttaggactcagaaagtccagtcctgagatgagacagtgctgcccagggcgggtggctgggacctgacaacattcccccagtgattgaccacatcacacgtccagggtccagtgagcctggcctcagacgtgcccagtacactgaaggtgcacctggagcccactccacctgatgcctccacagccctcgcagggtctgacctcccagcatgcacctgcctctccctgcaccccagctgtccaccatgcctgttccctgacttcctccatcctgtccagcgggatgggatggacatggggacagcctgtgtgcacatttcgtggcgagtgggaatgacacaccatctctgggaggcaccatggttcctggcaaacccgatcccaagactctgtccttgaggtggttttaccaaatcccaaacccagaactgcggttgtggctcaggggtcagctcctgctagtgccaggacactactgggaggctgggacccgaccaaagcccatggtgtttctggcctgagaacaaggtgtcttgggaccataaggccaggccaccaatggccattgggtcataggggctcagccccaatctttgtctttccctggctccttctgattcagtcccatca

SEQ ID NO: 24504 - DNA, 2300 bp, Homo sapien
atcaattgaaaaaattaatattgtcaaaatttcaatgctactcaaagcattctacagattaaatgcaaccgctgtcaaattccaatgtcattcttcacagaaatagaaaaattagtcctaaaatctgaatggaaccacaaaagatgctgaaaaacgaaagcaatctttagcaaaaagaacaaacctggaggcatcagactacctaatctttgacaaagcaaacaagaaaatgggaaaggacaccctattcaacatatgctgctggtataattggcaagccacatgcagaaaaatgaagccgttcttcaaaggttaaatacagaattaccacatgactcagtaaattcactcctatgtatacaccaaaaataaattaaaacaaatgccttacacataaaagtatttatagcaacaaaaagtaggaaacaacagaaatgtccatgaattttggagtggattaataaaatgtggtctgtccataaaataaaatattacttggcaatgaaaaagaaaaacatattaatacatgctccaaaaaggatgaacattgaaaacatgataaatgaaagtagtaagtcacacgtaactatattattatgattccacttacatgaaatgtccagaataggcaaatccttccagaataggcaaattcttaggtaatagatggatgattgcctagggctgggagaggtttaaaggaagaatggggaaaatagggaaagattgctaatgggtgcaaagtttcttttaaggagcataaaaatgttctaaaatcatggtgattgtttaactagttaatacacttaaaaaactgaattttatactttaaatgagtgaattaaataatatataaattgtatctcaatgaacctgtgaaaaaagttaaaaaatatgtggtatgcataaacaaaaagttcttcattttatttcctagggttttggggaaaaggtggtgtttgattatatgagtaagttctttagaggtgattcaggagattttggtgcacccaacacctgtgcagtatacactgtatacactgcaccggggcaggagctggctgcaatcctgtggccccaaatgcccccttgctgatggcctcgtgttctgggtgcggagcaaagaggagcaggtgttgaaggcacctcaggcaggccctgggctcggtgggcgtcttgtgctccgcgattttgaggccatttgcagccagctccgtcagcccgagctcccagctgcagctgctgccatgcacaacagcaccgccaggagtgtcctgggggcttttttcaaaggaggctgtcagcatcctcaagttccagacgcttagccccagtcctcctttaagaggctttttttttttcaccagaggcttctcagtggcttgaaagctcagctgactcccacgaagtttgccggaactcaaggctgtcagtgacattcgtggcgccaagacttaagcaggcgcgttgcatgcatcggccagtgtctgtgccacgtgccctgacgccacctgagataagcacgccgcacgcgcacgcgcacgccgcgcgcacacgcccggcagcagcttggctggcttgtaacggcttgcacgcgcacgccgcacgcgcataacggtttggccggcctgtaacggcttgcacgcgcacgccgcacgcgcgtaacggcttggctggcctgtaatggcttgcacgcgcatgctgcacgcgctttaacggcttggctggcctgtagcggcttggcttggctttgcgttcttggcttggcttggcgttggtagcttggattgacgtttcctgcttggattgacgttttctctctcgtgttcctttgctgggcttgaccttttctctgctgggtttggcattcccttgggtgggctgggtgttttcttgggggcgggggttggccctttctggggtgggcgtggggtcgcccagggggggcgtgggctttcctcgggtgggtgtgggttttccctgggtggggtgggctgggctggaatcccctgctggggttggcaggttttggctgggattgacttttctcttcaaacagattggaaacccggagttacctgctagttggtgaaactggttggtagacgcgatctgttggctactactggcttctcctggctgttaaaagcagatggtggttgaggttgattccatgccggctgcctcttctgtgaagaagccatttggtctcaggagcaagatgggcaagtggtgctgccgttgcttcccctgctgcagggagagcggcaagagcaacgtgggcacttctggagaccacg

SEQ ID NO: 24505 - DNA, 2300 bp, Homo sapien
caccagcaggttcgtccccaccccaggtcggactgggccctgcagtgctcctactcccccttcccagtccccagactttctgccactaccaccactagcaccaatgccaatacaattgctgtcgccatcaatgcagcagcccaccctacaaggttcctaccaccttgcccccgcgggcaccctcctaccactcctgtcgagctgcagtctccgtggctgccatcagtcacacgaggcgagctgcagagtcacgccacatgcaggctccagcgtaccacaggtgattccttctcctcctcctccagcctggcttggagcagctagacgggcaaagccagaaaagcctagaatgggatgcagggagtggtaacgttagagcctcaccttgtcatgctggccactgggtggcagggaccagcttcagctaaggcactcagacccacccaccgaagtccagcctctctttctggcaaaaggtggccaggaactggggcgggtgtgagtgcctatgctgaaaccacccccatccaggtgcaactggccagaaattgctgggcccaccagggctgcactccttggggagcaggagtaggagaaactcagacccagccagccctccccactcaactgctggttcccattcctgacacctccacccacagtgccctgttcccacagtcccccgcgatgcccactaatccccacccggtagtcccaggtggtctccccaacacagagcatggggtgtgggcgggaggtgcaggccggagaaccgcagtgggtgtgggggccctgccctgctcaagattgcaccaggaggaactctggagtctggaaaagagaagagtcacccgaaggagcaaggagaccatggctgttgctgtccccaccacctctgcagccgaccaacaccactggcagtatagcccccatagcaaccctaacctgacccctgccgccggcagtgtagcccccggacagcacacccaccacaccctgtgccagttgcaggcagtgtaaccccaataccccccccaaccaccccctccacaggcagtgtagcacccgatagtgcccacaacctgacccagccacaggtgttgctgcacaagacaatgcctcaaaatcgccgcccccaccccaccacaggtagcgcagctcctgatagcgcaccctgagtaagggcagtgcagcacccgacaacactcctaaaccaccccccgctgccagcattgtagctccaaataaccaccaaaaccactccctgccccgggcagtgcagcagaaaatagtgcccctaacccctcccccgccaccggcagtacacgttagtgcacacaacctgcctcccccccatcacccccgccaccacgggcagtgtagccccggacagccagccaaaaccgcccccctccaccgccagcaatgcaacctcggagagtgcccccaaccagccccctgacacaggcagtgcagcctcgggtagtgagccccaataggacacccaacccctgcccccacaggcgggcagtacatccccggataactcacctacaccaggacatttctaccactctggccgagctgcagtgtcccacgtcaccaccaaacacagcaaggcgagccccaggggctcaggctccagcctccagcatgccgctcccttctactcgtcttcctgcctggcaggagaagctcccgctactggttgccctcctaccactgtcgacaccaccaactgcagtgagccagtgtccgaggctccagccagaaacaggtagcagccatgccggataccaaacgcccacacttaagagcctgaaatgacctgacgccacctccgcatgctttacctactgaggttacgcacatgtggttcccagactacatgttctgattggatgagagaaaaacctctaggcctactctgattggactttattttcatgctgtgattggttgtcttaagactggctctcatccaatcagaacatgataataaagtccaatccaagtaaccctggagggtttttctcatccaatcagaacatgcagtcaggaatcctcctgtatataatctcggtatatgactgctgctgaagggaagtcaggctcttccacgttcccgtattttcctgtggagctgctcagtgcccggcttagaggaccaggaatgggtaatcaccagccgtacgctggaggctggagccgctacaccgtggctcgcctcgctgcgactggtggtaaccgcgaccgagacggcagtgcggcggaagcggtaagaggaggaaaagagtttt

SEQ ID NO: 24506 - DNA, 2300 bp, Homo sapien
cctcccgggttcacgccattcttctacctcagcttcccgagtagctgggaccacaggcgcccaccaccatgcctggctaattttttgtattttagtagagatggggttttaccgtgttagccaggatggtctcgatctcctgacctcatgatccgcccgcctcggcctcccaataatttttgtatttttagtagagatgggttttcaccatgttgcccaggctggtcttgaactcctgacctcaagtgattcacccacctcggcctcccaaagtgttgggattagcggtgtaagccactgtgcctggccaacttctcacattttcttttcttttcttcttcttttttttttttttgagatggagtcttactctgttgcccaggcttgagggcagtggcatgatctcggctcactgcaacctccacctcctggattcaagcaatcctcccaccttagcttcccaagtagctggaattacaggtgcatgccaccacactagctaatttttgtattttttagtagagatggggtatcaccatgttggccaggctggtcttgagctcctgacctcaaatgatctgcccaactcagcctcccaaagtgctgggattacagacatgagccaccctgcctggccttcacattttctttagattatttcttagaacgtctacctctctgttcccattatcagtctgtaatctcatgttgtccactttttccattagagcccttagcatattaatcatagtcgtattccatttcttggtctgataattccaacatctctgccatatttaagtgtggctctgatgcttgctgtgtcttcgaactgtgttgttttttattatgccttgcaagtttttgttgagggctggtcatgctcaaccagtaaatggactttctgtgtgaagttttatgttggtctggttaggggttgtgccatgtgtgctgtttgttaactggaggtgtcagaggcttaaacctcctctagtgtcttagtttttgtctccctgttgtctttacggtttcctagagatttctcgaataagctctgagatgagcagttctttcacttgtatcccctgttattatacaggagccccgctgatgtggcagtaagatgtggggaaggagagccagagcaggctggggttagctatgttcccttcctccaggtttgttggtgtctggcaaaattatgattggcctggctgtgattttttttttttttgagggcaggccttgtaaaaaaaaaaaagactttttatttttattatttttaaatttatttatttatttattattttttttttttttgagacagaatcccaccctgtcgcccaggctggagtgcaatggcgcgatcttggctcactgcaacctccacctcctgggttcaagtgattctcctgcctcagcctccggagtagctgggattacaggtgtgaaccactgcgcccggcctcttatttttaggcagcatctcactctgtcacttaggctggagttcagtggtgccatcatagctcactgcagcctcgacctccggggttccagcaatcctcccacctcagcctcccgagcagttgggactacaggcgcaagccaccatgcccgggttttttttcttttaatttttatagagacaggggctcactttccatccaggctggaaaggatgccttttattattattattattattattattattattattattattttagatagagtctctgtcgcccaggttggagtgcagcggtgcgatctcggctcactgcaacctctgcctcccggttcaagctattctcctgccttagcctccggagtagctgggattactggctcccgccactacgcccggctaaattttgtatttttagtagagtcggggtttcgccatgttggtcaggctggtcaggaactcctgacctcaagtgatccgtccgcctcggcctcccaaagttcggggattacaggcgtgagccccggcgcccagccctggatgccttgtaaatcactactcacccaggaagagccagcgacaggccccgcccccgccaaacgcctggcgccctccgtcgcccggtttccatggtgacggggcgccaggctagggcggcctggccactgagccggggtgcagtggcagcgggagagtacctggcgatggcgatatgagcggtgcgggggtggcggctgggacgcggccccccagctcgccgaccccgggctctcggcgccggcgccagcgcccctctgtgggcgtccagtccttgaggccgcagagcccg

SEQ ID NO: 24507 - DNA, 2300 bp, Homo sapien
ccactcccacgccaccagccccctggaggagttcaaacggtgggtggcccttgcggcttcccaccactgccgtctcccccactttcccctcctaaggtgtcgcccacagcgacctctccccagggcatggagggcagggtgaggggagtccctttctgttcacagagcacgtgaggcctctccaggcctaggcaggtgtcctctcaccccgcccagttggctcccagagcctctctctccagactggccagagaggccccattgtgctgccatctcttgcatctcatattcttcaaccctgtcagaagagttggggtggccctgactgccaggcccaccagggccagcagagtgggctgtttgtatgggacggagggtgaggtgtgtgcaggagttgtgctgactcggccgcctgcgtgctgtgtgtccttgggatgttccctaacctctctgaaccttgatttcttcctctgaagaatggggctgaacctcccggaggtgcccagtgctctcccccggcggagccaaccctcactgatgggagccctggggtcatctgtgagcagggcctccttactgggcaagcagcaggtgaccctccccatcccctgcagggctgctgtcccgaggttcgtccagcagaaactctacctcttcttgcagcattgctttggccactggcccctggacgcatcgttcagagctgtgagtgttggccccgtcacacgtgtgcctgtgtcctctgtgtgccttgaggtgggaggtcctttggggcagataaaggaggagagcaagtgttatcacagaggccttggcaaggagggggtcttggagggccacattgttctttctgtttgagtttccaaagccagccctcaggaaagccctgccctgtcccacctgtctggtgcagggcaggttcctacccttacctgaccagggagtactctgccccctgggctgggaaaagcccaccctggcttctggagggccagcaagagccaaacctcacagggctgtgcatgtctctcctgcgccctctggaggaagtgagaagagtcagtcccacccagctgccgcctggtatctgggctccaggccaccgagtatttggcccccagccacggagcccttagcacacacctcccccacaggtcctggagatgtggctgagctacctgcagccgtggcggtacgcgcctgacaagcaggctccgggcagcgactcccagccccggtgtgtgtcggagaaatggtgagcctcagctcctctcacagacatgccactggctcccccaggtggatattgttccagtgggtggaggccaagccagcggcctgtgctggggtcagcctggccctggcccccgtggcctcctgaagtcctctcccagcccctgccgagcggaacacagaccagccttttcctaggctcaactttgccaggccctagaattggtttcttatggaagctgtgggtgacccatcctgccctgtcccctctcccttctgtcccagatgagtgtttagccacccccaaactatcccttgaccttcatcagcacagaacagagcagcggtgatcaagcaggggatgagggaggctgtcttcccctcatcccctgcttgatcctcacagcggacccccaggcttccgtggcacctggcatggccactgatccctcccctccttgcccaaggcattcccctttggaccctctgggggatcctccctgagccccctcaggctctgggctggcctctgccatggtggcctccatccacttggaaaggggcctcagccttgctaaggatgtggcatcctcagagggcctgggtcttacctgcctctgtcctgtcctccctgcctgcccgtggccccctgagctgtcatctgtgacagcttgtcaccttggctaaggagagtctgaaagcccaagggtgagcaagggcattaggggcacggaccgggcattaggggcatgcttccagttggaaggctggccccaacctgccacctcggtccccagggcaccctttgtccaggagaacctgctgatgtacaccaagttgtttgtgggctttctgaaccgcgcgctccgcacagacctggtcagccccaagcacgcgctcatggtgttccgagtggccaaagtctttgcccagcccaacctggctgagatgattcagaaaggtaagtcctcagcctgggccagcccggtatacgtcaacccagccagaccagggccaggcccttagctgggggtggctggtctttaagagggacccacacgcccaga

SEQ ID NO: 24508 - DNA, 2300 bp, Homo sapien
agggactccatgtgggaacatggcccaggaggggtgcagagctgagggagaagtttggctcagcaaacctatgggaaaatagcctgagagggttccatgtgactgccggcggcaggggcggacagtgggccctccagacccttcggaaggaccaggtgaggtgggtcaagtgcaccagcaggggaaagcagttttccagttcacatgtggaggtcttcccctccccttagctgcaggaaggatgttacggctcaggatcccaggccaggattggagggagggcctgggctgagactggaggaggagaaagaccctggtctaacttcccaccccactggtgcccttctagttgggcagtataggtacaggtattatgtctcatacttttctccttctgtctttttttttttttttttgagatggagtctcactccgttgcccaggctggaatgcattgacatggtctcggctcactgcaatctccacctcccagattgaagtgattcttctgcctcagcctcttgagtagctgggattacaggcatgtgccacccacccggctaatttttgtatttttagtagagatgtagtttcaccatattggccaggctggtctcaaactcctgacctcaagtgatctgcctgccttggcctcccaaagtgttgggattataggcgtgagccaccgcacctggccctttcttccaaaacaatgcaaattcattgcccaaagacttaacaatacagatagagaaaaatagccagccacgatggctcatgcttgtaatcccagcactttgggaggttgaggcaggcggattgcctgagctcaggagtttgagaccagcctgggcaacatggcgaaacccctgtctctacaaatacaaaaattagcctggtgtggtggtgtgtgcgcctgtgttcccagctacccgggaggctgagatgggaggatcccttaagccctggaggcagaggctgcagtgagccgagaccacgacactacagcgcgggtgacagagtgagaccctgtctcaaaaaaaagaaaatgcctcccaccccatagctccatcttcagactcagccacttatctctggggtgtgtcacttggacctgtggggacagtttcctgacggggagacttgagtgggtagcgatatgggcagtggcccgtgcggggtctacagcataccaggatatacctggaggctgggccctgcaccagcctcagcagcacagatgtgttacggcccaaagggctaggggacaagtgtggagaggcgagcatgtccactcagactcagggtcctgccctcagcacccctacttccctgccctcgtctactctcgatgcgcccacctgccctcccaatgctaaacaaccagaggaagcccatggccaccaaaaaggctttcctctccggctagatctccaggatcctgcttgtatgttacaaatcaaaagtttggcctaggctggacacagtggctcacgcctgtattccctctctttgggagacctgaggtcaggccaacatggtgaaaccccatctctatgaaaaataaaaattagctgggcatggtggcacacacttgtcgtcccagctactcaggaggctgagtcaggagaattgcttgaacctggaggcggaggttgcagtgagccgagattgcgccactgtgctccagcctgggcgacagagggagacgttgtctcaagaaaaaaaaaaaaagtttggcctaatatgcttgactgtgcttttgtcttggggttttcctgaccacaggtccctgggcaacagaggaagtgacgcccggggcttctactgggccgagttctcatctggctgtgtccaggatgaggagcaggtgggaggaattggggaggaaagtgaagccatggggttcttatttttgaaccaggtcttactctcacccacgctggagtgcagtggcacgatcctagctcactgcagcctcaaactcctgggctgaagtgatcctcccaccctagcctcctgagtcattaggactataggtgtgcaccaccacacccagctaacttttaaaaattttttgtagagacagggtgtccctatgttgtctaggctaatctcgaacttcttcttagcgatctttccaccttggcctcccaaagtgctggaattacaggtctgaggcaccacacctgggttccatgtgctttctgcacacacttgggaggcaggtgggagaccctggatccagagcttgtgggtgatgctggctttctcctgccctggggatcaagacaggcacc

SEQ ID NO: 24509 - DNA, 2300 bp, Homo sapien
gttaaagtcattgaggactttccagcaaaggtatagctctgctaacgtctctctttggagcatgtcttatacattcgttgaagaactttattataattcctaatttccctccccgccccaaccccgagcactgcctggcacagaggcctggccattaccatgaccattatgtttacggacacatttaaacatgtgaacttgtagatcaggggttctcagccacagatgctctgttcctcagggacacttggcaatgtcagagacatttttggttgtcacatctggaggtagatggggagtgtgtgctactagcttctaagaagtagaggccagggttgctggaaacattctgcaaagcacaggacagctccctgcgacaaagaagtatctagcccaaaatgtcaacagcaccaagattgagaaaccctgatgtaaatactaaaaatatgtatttaaatcacacctggaattgtcaagcccaggaagctggcctagacaaggagttaataccaaatggcaataggtcagttaggtttcaggggcttcactctggaaaggatgttgctttcctttctgatagagcatccttcaagtcagaagtttccatcactgtttaaagaatcttttttttgtggtggctcatgcctgtaatctcaacactttgggaggccgaggtgggaggatcacttaagcccaggagctcaaaaccagcctaggcaacatactgagaacctatctctacaagaaatttaaaaattagctgagtgtagtggtgtgtgcctatagtcccatttactcaggaagctgaggtggggggattgctcgagcccaggaagtcgaggctgcagtgagccataattgcgccactgcactccagccagggcaacagagtgagaccttgtctcaataaatatgtattttgtttatttttttattttatatttttttattttcattgtttgtttttttttaaatttatttatttttcttaatttaatcttctatcacacacaaaaaatgtattttgatcggaggctgacttacttaactggcccaagtctaaagcaacactgcttggtatgccatgtaccccactggaagaacgtaaagctgctcttgtcgttggcaccatggcaccaggcttcctttgggtgcagggctgatcccataggtcttagccagggagtggcttcctcagagggagctgggcagcaggtggtgcaggactagagccggggcaggagtgggtgctggtcctgcacgcggcttcaccacacattgtttcaggagctgcacaccatcttcccatggctggtagaaagcatttttggcagcctagatggtgtcctcgttggctggaacctccgctgcttacaggggcgcgtgaatcctgtggagtacagcatcgtgatggaatttctcgaccctgggtaggtaggttggtcaccggagagaggctgggtgattcctcatggtgattccacctttaaagcactctctgaatttctcaagattaagaaacaatcaaagcaagataattcgcagttcatttgccctgtttttgtttgtttgttcaatttcgtgttcagtggcccaatgatgaagttggtttataagcttcaagctgaagactataagttcgactttcctgtctcctacttgcctgtaagtaaaccacagtggcgagagtggtgctcggggcagtgggccttgcacagccctgtggtgatgggcaatctcctccagtcctctgagggcaaattgaggagcgattcgttccaggggtgtgagaggcaaaggaaatgggtattgcatgactgctacccttgctgtctgcagctctttatgagatgatggtaggagaagttctaagcaaagactcttgttcaggcactgctcagaggcagggcactgtccccacaggtgggttctgtgtgtgggtctcttccccagcagccttcccaaagtgctgctgtgcatgtggggtactgcgtatcgggcactacgcaccagcacctgcccacaagcctcactgcctctctctgcagggtcctgtgaaggcgtccatccaggagtgcatcctccctgacagtcctctgtaccacaacaaggtccagttcacccctactgggggccttggtctgaacttggccctgagtatcctttggtggccctgaggtagggaggctgtgggtggcccagcacttgacactgagcggggggtggctcatcaaccctgcatgtttgcccctgacgctgctctcagatccgttcgagtattacatattcttctttgcctt

SEQ ID NO: 24510 - DNA, 2300 bp, Homo sapien
tatttttagtagagatggggtttcactatgttggccagactggtctcaaactcctgacctcgtgatcagccctcctcggcctcccaaagtgcagagattacagacgtgagtcaccatgcccggccgctttttcttttttctcctttttttttttttgagatggtctcgctctgtcgcccagagtggagtgcagtggcgcgatctgggctcactgcaagctccgcctcccgggttcacgccattctcctgcctcagcctccctagtagctgggattacaggcgcccgccaccacgcccggctaattgttttttgtatttttagtagacagggtttcacgtgttagccaggatggtctcgatctcctgacctcgtgatccgcccgcctcagcctcccaaagtgctaggattacaagcgtgagccactgcgcccggccagctttctctttttcttttttcagacggagtctcgctctgggctctgtcgcacaggctggagtgcagtggcgcgatctcagctcactgcaacctccgcctcgcgggtgcaagcaattctcttactcagcctcccaagtggctgggattacaggcgcccgctaccacgcccggctaatttttgtattttttactagagacgaggtttcaccatcttggccaggctggtcttgaactcctgacctcgtgatccacccgcctgggcctcccaaagtgctgggattacaggcgtgagtcaccgctcccggcctcaattcttaacctagctatcaactgcagtgttaaagaaaaacgcctcagtcctaaggcacttggtcaagaaaacgctgcactactacaaaatgatcaaagcagcattaaactgtggactgttcggtaagtgcggagctctagagacgatgaaggggagagcatctctgctcagaagaagctttcatgggcagcgactgaaagaatgaggcccagaggaatttctaggaaatttccaagaaaggaaattcaaacccgagaattcccaagaggtgtctcccacacccctgttatctgactctgccatggccaccctcccccgtcacaggtctctgcgtgccatgcacctagagtccacttcatggcgactctccaacacctattttctccaggagctgcttcggaccccgtttgttttttgttttgttttgtttttctgacagcgacagcccttgggcaacgctaatcattccaagcaaattctgtcatgccaagacctcccttaacagcacgcgcccacttgttcccaactctcctgccaattgggcttcgggagcctccaaaaccaaggctcggagatgtggagcacacaggggaagggtcgagctgggacccacacccggctcttacacccacaccgcctgttgagcccaaggctcaacttcaacacaaagctctccttccctcaattccttcaacgaaggttaaccttcagcgaacacctaccggaccgggacagagtgtacgagccgcgcgggaaggtggcacaaaggcatggcccagaggggtggcagaagactcaaccggggccctccactccccagcctgccctgcctgggcagagccggctggccggcccgagtcctggggctcgcggaggaacggagatggcctccgcaggggctcggggaagcccccagggcgccggaccgtctcaggcgcgcatcccgcgccactcacctgtgggatccatagcgtcgctcgcctcagagatggaagccgccattccgccacggcgccgaaagtcgtcatcaagctgcgcgcagagccacgccccgcggccgggcgggaaaagcgcttccacctctttgggccgttacctcaaaaggcgcgtgcgcaaagcgaaggccggccgggcggggaagagaaatggcgaggcaggagtgcgggggagggagtggtccttagctgaatgcgcctgcgttgtggcggcctccggcgccccaaggtactttctccccagcaaggaatccgcgtgcgcgtaagcagtattgttgattagtgccccccccttccccccgcccgccccgaaaagcgacccctagtggtgcaccggtgcggaccagaaaattgcacgctttcttgaaagaggcatttaccgagcgcccaatgtatgcctggcactgggctgggtgctgccacctaagcgagcacgaccaatgcagtctatcagggaggcccagatcgccaagcagcggacccctgcggtccgccatgccactcccggctcctagagcgccgctcagcacaccgtgagcgcccaataactgttgggctt

SEQ ID NO: 24511 - DNA, 2300 bp, Homo sapien
attgggcttcgggagcctccaaaaccaaggctcggagatgtggagcacacaggggaagggtcgagctgggacccacacccggctcttacacccacaccgcctgttgagcccaaggctcaacttcaacacaaagctctccttccctcaattccttcaacgaaggttaaccttcagcgaacacctaccggaccgggacagagtgtacgagccgcgcgggaaggtggcacaaaggcatggcccagaggggtggcagaagactcaaccggggccctccactccccagcctgccctgcctgggcagagccggctggccggcccgagtcctggggctcgcggaggaacggagatggcctccgcaggggctcggggaagcccccagggcgccggaccgtctcaggcgcgcatcccgcgccactcacctgtgggatccatagcgtcgctcgcctcagagatggaagccgccattccgccacggcgccgaaagtcgtcatcaagctgcgcgcagagccacgccccgcggccgggcgggaaaagcgcttccacctctttgggccgttacctcaaaaggcgcgtgcgcaaagcgaaggccggccgggcggggaagagaaatggcgaggcaggagtgcgggggagggagtggtccttagctgaatgcgcctgcgttgtggcggcctccggcgccccaaggtactttctccccagcaaggaatccgcgtgcgcgtaagcagtattgttgattagtgccccccccttccccccgcccgccccgaaaagcgacccctagtggtgcaccggtgcggaccagaaaattgcacgctttcttgaaagaggcatttaccgagcgcccaatgtatgcctggcactgggctgggtgctgccacctaagcgagcacgaccaatgcagtctatcagggaggcccagatcgccaagcagcggacccctgcggtccgccatgccactcccggctcctagagcgccgctcagcacaccgtgagcgcccaataactgttgggcttcaatgacgccgcggaggcggccccgtccccgcgctcccgcccctcccgccagggcagcccgggaggccagacgttgacgctgcagggagagggtggtgggcgcagccgctagggggcgcggcggggcggagcgcacctttccgcgggccgcggggatggcggcgcagggcgtagggcctgggccggggtcggcggcgcccccggggctggaggcggcccggcagaagctggcgctgcggcggaagaaggtgctgagcaccgaggagatggagctgtacgagctggcgcaggcggcgggcggcgctatcgaccccgacgtgttcaagtgagcggggcgggtgggggccgcatgctagccagacaccccccgacctctgctttccgggtacgcccggcccgctggtcgggaggagcccccgcccccgtccttgtcgggtcttcagggaggtggccgcgccgggcggagagggctcaccggccccgcgtctgtccccgccaggatcctggtggacctgctgaagctgaacgtggcccccctcgccgtcttccagatgctcaagtccatgtgtgccgggcagaggctagcgagcgagccccaggaccctgcggccgtgtctctgcccacgtcgagcgtgcccgagacccgaggtcagagctgggcccgctgtccctgccccagtggcgggggtggcgggcggggagggggcaggcgcggcacagcggcggcgtggccctgagtggccaggcctgtctgtcggtctaggcccagcacctgcagggcccatccgtgggctctgctcctgggcttcgctgccagccttaggaggcacgtccaggtcaggtggacgcagagtgcgtaccccagggtggtccaggctgggtagggctcctccgcttagctcccctccacctcttcactcaggccttcatcctacaacgtcgggaatcaagacagtttggggctgggcgccctggctcacgcctataatctttgggaccccagggcgggaggatcgtttgaggccatgagttttagaccactctgggtgacagggtgagatcctgtctctaaatgtttttcaaaagacagtctcgatctctgtcctgtggtatacagcatccagggaagtgcccagggaccagggcaggcagaggtcttcctgcctttaccccacctgggcccagttcctgcgcaggggcttggccagtcctggtcagctttccctctgatgactgcaggaagagagtcagacgcggaactcccagggtgcagaggcctgcgg

SEQ ID NO: 24512 - DNA, 2300 bp, Homo sapien
gtcagcgggtgtgggtgcccaggccctggcactccccccatgaaggcagcctgctctccacgccttctcaggatgcctgtgcgggtctcctcgtgcttccaggcagggagccagctctgggccttcttccattggcctaggaggttgtgctgcatttcagagagagccatcgggagcagaagcaacatgcggagaggatgagcagggacagaggctccaccatgacactctcagtcccagaatctcctcagcccagtcaccacactggagagggaggaggcccttcagaccccgcaggcctctgcaccctgggagttccgcgtctgactctcttcctgcagtcatcagagggaaagctgaccaggactggccaagcccctgcgcaggaactgggcccaggtggggtaaaggcaggaagacctctgcctgccctggtccctgggcacttccctggatgctgtataccacaggacagagatcgagactgtcttttgaaaaacatttagagacaggatctcaccctgtcacccagagtggtctaaaactcatggcctcaaacgatcctcccgccctggggtcccaaagattataggcgtgagccagggcgcccagccccaaactgtcttgattcccgacgttgtaggatgaaggcctgagtgaagaggtggaggggagctaagcggaggagccctacccagcctggaccaccctggggtacgcactctgcgtccacctgacctggacgtgcctcctaaggctggcagcgaagcccaggagcagagcccacggatgggccctgcaggtgctgggcctagaccgacagacaggcctggccactcagggccacgccgccgctgtgccgcgcctgccccctccccgcccgccacccccgccactggggcagggacagcgggcccagctctgacctcgggtctcgggcacgctcgacgtgggcagagacacggccgcagggtcctggggctcgctcgctagcctctgcccggcacacatggacttgagcatctggaagacggcgaggggggccacgttcagcttcagcaggtccaccaggatcctggcggggacagacgcggggccggtgagccctctccgcccggcgcggccacctccctgaagacccgacaaggacgggggcgggggctcctcccgaccagcgggccgggcgtacccggaaagcagaggtcggggggtgtctggctagcatgcggcccccacccgccccgctcacttgaacacgtcggggtcgatagcgccgcccgccgcctgcgccagctcgtacagctccatctcctcggtgctcagcaccttcttccgccgcagcgccagcttctgccgggccgcctccagccccgggggcgccgccgaccccggcccaggccctacgccctgcgccgccatccccgcggcccgcggaaaggtgcgctccgccccgccgcgccccctagcggctgcgcccaccaccctctccctgcagcgtcaacgtctggcctcccgggctgccctggcgggaggggcgggagcgcggggacggggccgcctccgcggcgtcattgaagcccaacagttattgggcgctcacggtgtgctgagcggcgctctaggagccgggagtggcatggcggaccgcaggggtccgctgcttggcgatctgggcctccctgatagactgcattggtcgtgctcgcttaggtggcagcacccagcccagtgccaggcatacattgggcgctcggtaaatgcctctttcaagaaagcgtgcaattttctggtccgcaccggtgcaccactaggggtcgcttttcggggcgggcggggggaaggggggggcactaatcaacaatactgcttacgcgcacgcggattccttgctggggagaaagtaccttggggcgccggaggccgccacaacgcaggcgcattcagctaaggaccactccctcccccgcactcctgcctcgccatttctcttccccgcccggccggccttcgctttgcgcacgcgccttttgaggtaacggcccaaagaggtggaagcgcttttcccgcccggccgcggggcgtggctctgcgcgcagcttgatgacgactttcggcgccgtggcggaatggcggcttccatctctgaggcgagcgacgctatggatcccacaggtgagtggcgcgggatgcgcgcctgagacggtccggcgccctgggggcttccccgagcccctgcggaggccatctccgttcctccgcgagccccaggactcgggccggccagccggctctgcccaggc

SEQ ID NO: 24513 - DNA, 2300 bp, Homo sapien
gctctgagtgtgatcatctcacttccctgccacaccctctgccctgagagctaggcctggctcccagagccctgagtgagtgctgagtgagcagcaacatcccctggagtgacaaggactctgttcccagtttctccctcctgctggacacttgcccctcaattgctcatctcagcctgcagtgcatacacccctactccaggcctgtccctcagcccctctccaccctcccttgggtccgagctctgggtggcagtgaggtgggcgctgtcaggaagtgcacgcaggaggtgcaaccaaagacccctgggctctcacaggaccctggctctgagcccctgatcacacctgctgacacctggaaagtgtgctaactcaggagtgaggtgggcaagggggctgagtgctggagtgtggccacggggccagcatatggcatctgtgtggcactgcccaggagactctgggaaggtgggagtctctgtttcagcctccagacttcctgtccagataagggacaacttctaagaggccgaggtgtttgtcacgcctggggctgtgctctccagcacagcacaccgcactctggccggctgtcttcccttggagaggggctctttacactcaccacagttcgcctctggggtgtgggggtgttggtcctgtccccagatgccagcccgactgtggggtctagagactgccacactatgtctctaataaaccgagtcagaaatcgtgccctgtggctaagcggcagggcagcgatggcctgcatggtcctgcccttggagctcaaagctgcttgggcctcctggggccaggcagtttccatggaaacaagggagagcaccaacccccagagataagccaataaacgcaacctgcaaaaggagagaacaggcagcaagagaggcggagggaacccggggggcctggagagagaggcgagtgtgtggcagccgggctgtggagcagaaccggagaggccgcaggctgcgggctggaggaaaaggagggccttgcaggggggctactgttcctggcagagagaaaggaggcctctggaggtcagagagagacacaaagagagcagacagagcgaaggtcagtgaagaggccagcacgcaggtgcccgggccctcttgggtcagcgggtgtgggtgcccaggccctggcactccccccatgaaggcagcctgctctccacgccttctcaggatgcctgtgcgggtctcctcgtgcttccaggcagggagccagctctgggccttcttccattggcctaggaggttgtgctgcatttcagagagagccatcgggagcagaagcaacatgcggagaggatgagcagggacagaggctccaccatgacactctcagtcccagaatctcctcagcccagtcaccacactggagagggaggaggcccttcagaccccgcaggcctctgcaccctgggagttccgcgtctgactctcttcctgcagtcatcagagggaaagctgaccaggactggccaagcccctgcgcaggaactgggcccaggtggggtaaaggcaggaagacctctgcctgccctggtccctgggcacttccctggatgctgtataccacaggacagagatcgagactgtcttttgaaaaacatttagagacaggatctcaccctgtcacccagagtggtctaaaactcatggcctcaaacgatcctcccgccctggggtcccaaagattataggcgtgagccagggcgcccagccccaaactgtcttgattcccgacgttgtaggatgaaggcctgagtgaagaggtggaggggagctaagcggaggagccctacccagcctggaccaccctggggtacgcactctgcgtccacctgacctggacgtgcctcctaaggctggcagcgaagcccaggagcagagcccacggatgggccctgcaggtgctgggcctagaccgacagacaggcctggccactcagggccacgccgccgctgtgccgcgcctgccccctccccgcccgccacccccgccactggggcagggacagcgggcccagctctgacctcgggtctcgggcacgctcgacgtgggcagagacacggccgcagggtcctggggctcgctcgctagcctctgcccggcacacatggacttgagcatctggaagacggcgaggggggccacgttcagcttcagcaggtccaccaggatcctggcggggacagacgcggggccggtgagccctctccgcccggcgcggccacctccctgaagacccgacaaggacg

SEQ ID NO: 24514 - DNA, 2300 bp, Homo sapien
gacaggaatatggacttcagtcacacgccttgtactcatgccctggggtgactgtttaaaggcattttgttcctgactagctcaacccattatcttcctgttcctggaatttgtgataccaaagacaatgtagacaatgtagagacaataaatagctttttttttttttttgagacagagtctcgctgtgttgcccaggctggagtgcagtggtgttatctcggctcactgcaagctccacctcccgggttcatgccatcctcctgcctcagcatccagagtagctgggactacaggcacctgcagccatgcccggctaattttttgtatttttagtagagacggggtttcaccgtgttagccaggatggtctcgatctcctgacctcgcgatccgcctgacttggcctcccaaagtgctgcgattacaggcgtgagccaccacgccctgccttctttttttttttgagatggagttttactctgttgcccaggctggagtgcaatggcatgatcttggctcactgcaaactctgcctcctgggttcaagtgattatcctacctcagcctcccaagtagctgggactataggtgctcaccaccatacctggctaatttttgtatttttagtagaaacagggtttcatcatgttggccaggctggtctcgaactcctgacctcaagtgatcctcctaccttggcctcccaaagtgttgggattacaggtgtgagccaccacgcctggcccaataaatagcttacgttattttaatataaattcctcaggctaggccagccgaggtaggaggatcccttcaggtcaggagttcaagactagcctggacaacacagcaagacttctctaatttcaaattcttggtaaacaacttaggaactgcctcttcttttcctttaaaaacccacttataactgctgctaatattttaagacaacttgcatctccagggttgcacttctcaaacttggcccaaataaactattttttttttcaagatggagttttgctctgtcacccaggcttgagtgcagtggcgtgatctcagctcactgtaacctctgcctcccgggttcaagggattctcctgcctcagcctcctgagtagctgggattacaggcgcatgccaccatgccttgctaattttattttttgtagaaacgggcaaggtgggactcaccacgttgcccaggctggtctcgaactcctgacctgaagcaatcctcctgccgtggcctcccaaagcactggaattacaggcatgagctggtgtgcctggcccaacctctccacttacgttaattttgcctcctttcttccttttttttttgagacagagtctggctctgttgcccaggctggagtgtgctgtggcccaatctcggctcactgcaacaactgcctcccagtttcaagcgattctcctacctcagcctcccgtgtagctgggattacaggtgcctaccaccagccagggtaatttttgtgtttttagtagagatgggttttcaccatattggccaggctggtctcgggaactcttgacctcaagtgatccacccgcctcggcctcccgaagtgctgggattgcaggcgttagccatcgcgcccggcccgttttctccctttgggtcagaaaagtgattgaatcctgccacttcccgggtgctgggtgggaacagggaagagggggataattgcggtgctgctgtgacttgggtagatggcggcaaggcctctcagaggtggccttgtttgcaaagatctgaattaggcagggagaggagcaggcctggggcaatcagggaggggcagtggcacactgggagcaaggcaatgttccgcgacccacagaggcagcgcagtagctgttccaatcctggtcggaagacaccccggaaatgcctcagcaaccgcgcagcctttgatgaccccgctgccttcccgccaatcctgcatccaatcagagagcatccccactacacgtgttgagcaacggccaatcagaactgggatccggccctcggcctgcctcccaggaactccgagccaatggcggcctggcaccggcaggccaatcctgtgcggcgcgcgtgggcaggtcattgcagttgggcgctcagcagctgtggcagccggttgaggtctggaagtagcgttgggctgaagcagcggagttcgccatggtaagacccgggtcactcccgccccgcagatgcccaggcagacgaagttggcctcgggtggacagagggacgttgttgcgggcctgggcgctgaga

SEQ ID NO: 24515 - DNA, 2300 bp, Homo sapien
gcacccaagcattcctgtgaccctgtacagccagttgcaccatcctctgctcagagcctctctgtgggtcccacagtcttcatcagggcttacatcacctgactccactctaggccaccggcctcggcacataccagatatatctggcttcagggcttttgtcctggctggttcctccatctagagcactgttccccaaaatcacccacaaagcttttccttcacctcctcagagagacctcccctggcccactcctgtcccactccattatgtgtttttcataacaattttcacagcctgacttatgttaagggcctacttatttgcacgttgcctttgtctgcttctaaacattacatgaaaagtgtttgtctcttttgttccctgctgtatccccagcagctagcatgaacccgaatgctgccaacaaccagtaaatgcttttggaaaaaataatgggtgtacaacggaagtttggatggaggaaaacctgcaaagcctttcacagactaaccccagccatggcagcagtgctcaagtgttccctgtggatagagggtctgagggccacagagccaaacaacacggtccactcaccatcccggaagcttgcttgagcctgacgtagactgtgaggaactaggattccaaaccagttcagggggtcctgaggggcctcagaggactccggttctggggtcttagtggggcccttgcgcctccgcagacctgaggaaagaaaggttggaggaggctgggatcttactccctgacctttatcatcttggtgacaatgttgagcttgatctgagctcatgattctataaaacactgttggttggaaaattccaactttggggttccaggaaacagcttaccacaaaacacagcctttccccttgtgattcagatgagactgtttgtccactctttcccgtgactcctgtaagacccactgatgaccctgtttgcctgtgacactgatcttacccattgtacctgaacatgccaacagaccagacatagacgttccaactccccattctttgtctcaggatgattaactgggattagaagtttgtccctctgaaactagctagacacacagataaatattttctgttcagctgactgaaatgtatgtgattgtaaatctattcccagtgtaaagcaactcaccaacaatttctctacttcctataaaagtctaaggcaaaaccaccctacaaaaacattctgttcttctgctctgggatgctctctcttatcgcaaaaacctaatttaaatcatctccataatttgcattttgtctttgacactgggaaggggttctgcagaaggaagagggggctcacctgcttcgcgaggccccacctcctctggggcgtggacaccagctctcaccaccttgaacttctggagtccctcctgggcctcgctgaaggacgagaagggaggatggagctttggcagcccgggcctagaacgcgcccgcccgcccacccagcccagcatggaagcttcctcacctggcgtggaggcagacctggggctccatgtgggaagcatactgcaggggccctaccgacttggcgcccatcgcgtagcgagccttggcgagcgagagccagccctgcagggagaggaaagcggtgagactcagtttacgcccgtgtaccctcctgcccgccccaggcgcctacctcctccacccgggcgttcaacaccgttcgtttcccctccagctcctccaggtccccaagcagctgcaggaccagcgaatccagctccgctcgcaggtcaagcgccgccatggacacacctccagatctggagccaccttcttccttgtcaccctccgcagtttggcaggacagccaataggcacacgagatcctccatcaaggggcgttcccatctggggatccccacgccggcagcaccaaggcctctgggtcagcttctttaagggcaagcgcccttagagaagcagcacggaagcaaccaatcaactggtttctccaattagcccccaagtggatcagcctgctgaactgtcggctagggttataggtggttctgagtccttccggaagctgccgaatcttagaagtcgcgccactgttgtggcgatggaagaaggcgaagctctacagaaaccattttggttgagggaagagtggttttaaagttaatttggaaaggagccggcaagcaaccttcagtcggtgtgcggtttttacagttgaactgtttccagccgctaattatgattgttttagcggttcgtcatctgaa

SEQ ID NO: 24516 - DNA, 2300 bp, Homo sapien
cagactaaccccagccatggcagcagtgctcaagtgttccctgtggatagagggtctgagggccacagagccaaacaacacggtccactcaccatcccggaagcttgcttgagcctgacgtagactgtgaggaactaggattccaaaccagttcagggggtcctgaggggcctcagaggactccggttctggggtcttagtggggcccttgcgcctccgcagacctgaggaaagaaaggttggaggaggctgggatcttactccctgacctttatcatcttggtgacaatgttgagcttgatctgagctcatgattctataaaacactgttggttggaaaattccaactttggggttccaggaaacagcttaccacaaaacacagcctttccccttgtgattcagatgagactgtttgtccactctttcccgtgactcctgtaagacccactgatgaccctgtttgcctgtgacactgatcttacccattgtacctgaacatgccaacagaccagacatagacgttccaactccccattctttgtctcaggatgattaactgggattagaagtttgtccctctgaaactagctagacacacagataaatattttctgttcagctgactgaaatgtatgtgattgtaaatctattcccagtgtaaagcaactcaccaacaatttctctacttcctataaaagtctaaggcaaaaccaccctacaaaaacattctgttcttctgctctgggatgctctctcttatcgcaaaaacctaatttaaatcatctccataatttgcattttgtctttgacactgggaaggggttctgcagaaggaagagggggctcacctgcttcgcgaggccccacctcctctggggcgtggacaccagctctcaccaccttgaacttctggagtccctcctgggcctcgctgaaggacgagaagggaggatggagctttggcagcccgggcctagaacgcgcccgcccgcccacccagcccagcatggaagcttcctcacctggcgtggaggcagacctggggctccatgtgggaagcatactgcaggggccctaccgacttggcgcccatcgcgtagcgagccttggcgagcgagagccagccctgcagggagaggaaagcggtgagactcagtttacgcccgtgtaccctcctgcccgccccaggcgcctacctcctccacccgggcgttcaacaccgttcgtttcccctccagctcctccaggtccccaagcagctgcaggaccagcgaatccagctccgctcgcaggtcaagcgccgccatggacacacctccagatctggagccaccttcttccttgtcaccctccgcagtttggcaggacagccaataggcacacgagatcctccatcaaggggcgttcccatctggggatccccacgccggcagcaccaaggcctctgggtcagcttctttaagggcaagcgcccttagagaagcagcacggaagcaaccaatcaactggtttctccaattagcccccaagtggatcagcctgctgaactgtcggctagggttataggtggttctgagtccttccggaagctgccgaatcttagaagtcgcgccactgttgtggcgatggaagaaggcgaagctctacagaaaccattttggttgagggaagagtggttttaaagttaatttggaaaggagccggcaagcaaccttcagtcggtgtgcggtttttacagttgaactgtttccagccgctaattatgattgttttagcggttcgtcatctgaaaactgcattctgcacggcggtggtggggggaggacgaggatggagaagcctgggcggacatatttattagctgcggtcctaagtcacgtgtgacattctgtatccagtctatcggttatcccaaggagaacgccctgccggaatggccaatcgccttgagatgtccccgccctattcgccatcttaacatagggcattccccacagctgcaggcaccagtgaagcgtctaagggaccatcttggttgagggcggaagtgaggactgtgtcgcgctggaggagcccacagattctcccggacccacgtggaagcggcactcaagatggtaggagaatgagctcctgtttcggaggtccggggcgcgtgaagtgctggggatgtggctctggggacttggaggctcagcggctccggggctccggggttccggggctcgggagcgagtagtgagtgactgggcctgctgttcccacagctgcgccgcgaggcccgcctgcgccgcgag

SEQ ID NO: 24517 - DNA, 2300 bp, Homo sapien
gtggttactaggacttcattttctttagtctcatgacttgaggactttctaaaatatcttaatgtactgtattgcttttataatcaggtagaaatctaaacatcgattttttttttttttgagacggagtctcgctctgtcacccaggcagagcagtgcagtggtgccatctcggctcactgcaagctccgcttcctgggttcacgccattctcctgcctcaggctggcgagtagctgggactacaggagcccgccacggcgcccggctaattttttatatttttagtagagacggggtttcaccgtgttagccaggatggtctcgatctcctgacctcgtgatccacccgcttcggcctcccaaagtgctgggattacaggcgtgagccacagcgctcggccttaaaaattacttttgaaaagaaatatagactgttctgtacgtatgatggtggaccagagacctttaagctctcagacagcaaaaccgttggtcacgatgcccacagcgcttcgaaggcatggcttcagcgggccctggaccacaggctgcctaccgcagagcacagcgctccaggtgcgcactcggggccagcactgttccccacggagctcagaggaactcctgcagggaggatgggcagcgcagtctgcagcaccagcgctatccagatagtctttagagagaatttctttttttttttttttttgagacggagtcttgcttttttgcccaggctggagtgcagtggcaggatctcggctcactgcaacctccgcctcccgggttcaagcgattctcctgcctcagcctcctgagtagctgggattacaggcgcgtgccaccacggccggctaatttttgtatgtttagtagagacgagatttcaccatgttggtcaggctcgaactcctgacctcatgatccgcccgcctcggcctcccaaagtgctgggattacagcagtgagccaccgctctaaagagaatttctacaggacaagataaagtctttaaaacttgggacgaacttgacacactgcacacagcgggcaagctgcaaaacccgggtactgcaacgtcagtgacaagtaattaataccatcacacggaagaaacactctcaaaaccaacaggagaacccaatgggcaaggaaaacggccggcaagcatttggaaagacgctcggatattcgaacacaaatgcgtgccggggtggtttaccacgcagacgcccgcggggccgatgccttaccttccagcgcgcgccgcagccgctccttcctctcctgggctgagcgctgcgcctcctcccgggccttgcggtacaggtactcgcggcgcaggcgggcctcgcggcgcagctgtgggaacagcaggcccagtcactcactactcgctcccgagccccggaaccccggagccccggagccgctgagcctccaagtccccagagccacatccccagcacttcacgcgccccggacctccgaaacaggagctcattctcctaccatcttgagtgccgcttccacgtgggtccgggagaatctgtgggctcctccagcgcgacacagtcctcacttccgccctcaaccaagatggtcccttagacgcttcactggtgcctgcagctgtggggaatgccctatgttaagatggcgaatagggcggggacatctcaaggcgattggccattccggcagggcgttctccttgggataaccgatagactggatacagaatgtcacacgtgacttaggaccgcagctaataaatatgtccgcccaggcttctccatcctcgtcctccccccaccaccgccgtgcagaatgcagttttcagatgacgaaccgctaaaacaatcataattagcggctggaaacagttcaactgtaaaaaccgcacaccgactgaaggttgcttgccggctcctttccaaattaactttaaaaccactcttccctcaaccaaaatggtttctgtagagcttcgccttcttccatcgccacaacagtggcgcgacttctaagattcggcagcttccggaaggactcagaaccacctataaccctagccgacagttcagcaggctgatccacttgggggctaattggagaaaccagttgattggttgcttccgtgctgcttctctaagggcgcttgcccttaaagaagctgacccagaggccttggtgctgccggcgtggggatccccagatgggaacgccccttgatggaggatctcgtgtgcctattggctgtcctgccaaactgcggagggtgacaaggaagaaggt

SEQ ID NO: 24518 - DNA, 2300 bp, Homo sapien
gaaacacccagctggacaaacagacagattactgacagatgggtagaccctcagccagacatccaaataggcctgtggccagagagacacctgggccccccagccaggcaaaggtcagaatccctcaaggacaggtgccctccccaaaatggacagagacattaccccagaggagagaacaccccacccacctagtcaaccagaccttcagctggacgacatgccctccaccagtcagacagacctcagcctatgaggacaggccctcaacaggatccctgctgctggacagagatcctctagcccataaagactgccctgaataaccatgtgtgctcaggggctcacattttcccagaaaatgtctttattttctgaaagcttactgatgcttctgtattctacctccctggatctccatggccatccacaaaccctcaatgattatactgagagtcactatcatgcactgagcagagctctcaatgacttcccagactcttcggacccttcaattactaacactccaaatcccaatggccccacaattactttcacttcttgtcccaagtatccactggcctcccaatgactgtcattaatatctactgacacccccccccccatgaacatccaagggaccccgactggcttccaatgaattccctatcaccaccatcctaaacaattacctccctgagaatgctcaaagatgaaactgataaatgatgaacatgaatctcacagtgacccctgcggaccccacgataaatcaaacagccctagctgctgatccccacagagccactttgatcgctccatcacttcagccaaggtcagcaaacgacagcctgtaggccacacacacacactagaataattcatgacacatgaacattacatgaaattctgatttctttgtccataaatggtttctttgggacacagccacactatattgtctgctttcatgctgccacagctgagttaagcagctggggcagcgatagcaaagccaaaaccacttcctaccgggacctttaagaaagtgtgcccttaaatactctgatagcccctagtgaattaaattgaccacctgacatcatgcccctgttgacccttcagagactcaggcacacatccaggccccaatgctacctttcaacccctcaacgacctcaaactggtgtccactgacgccccttccagtgacacccctcttaattcttccgacctcggcgagaagggggctaacctaggcctgtccttgaagagacccaggtgccagtccattctctccagcctcccctcggtgatcccggaagctggaacggcggctctcctctgacctctgcacactttctgaagatgggagtgtcagggcaggcaaaaaagagaagctcttcgttccccagaacccacttccagtgcctcagttctgtttcccagcaggcttgtgcaggtcgagatgctcacacaggactgaccctggtgccccagcgcatccgggaaaaaggaaccacaaattcctcgggaaatacacagagaagatcccgctgccacttggcctttcccacggcgtggctgcccctccccggcctcccttgggcccggctggagcgcacagcgcgggacgcccccgacccggggtcctctggcacgaggggcagcctgatctcggcgaccgtctccacccaaggctgctgcccgccccagctcggactccgcgcggcctggctcccaggggacgggcgggagggcccggcgagaccgctcggccgtccacccagagccggcacccggaggtcggcccctgggcgcggatcccgatctgagggcgggtcccaagcggcagggagcgaacctgggaccgtgccacccccccaccagtgggcgcggcagccgaaaaaaaggggaagcgccggcgctggactctgctcagggcagcccgcgaggacctagggctccggccacagcggcccgagcgcccggggtggggctacgcgggctcagaacacggtggctggggcgccctgcccgccgctgcgcgcttccattggctgccgaggcaagggcggggactcagtcaccggcctccgcctcccgcggcgtccacactcgccgcgcgcgcggcggccgggctggaccttgctggcccgcggcgccatgagccgcagcctggactcggcgcggagcttcctggagcggctggaagcgcggggcggccgggagggggcagtcctcgccggcgagttcagcgtgagtggcacacggggtccgcgagcggcgcgccccggccc

SEQ ID NO: 24519 - DNA, 2300 bp, Homo sapien
gtctcagtgcccttgtttgaaatttattaagattagacggcagatgctccaaagatacaacaattttctgaaatgtgtaaccaatggaaattttctttcttttagggttgggttgataatctaaatggatgtagctgactcattattgcggtatgtatagggatgaagaagtaactgtaatgtagtggaggaatagtaagaaaattcttagtgctggcttagcttcattgatccaaaaacataaatgctactttactatcaattgaagcatattatttcaattattctggttataatatggaggcaggatgaaattgtttttattcttttagaattttttttatcaggaaaacagaggtaaagtgctatcaattactatttaagagttctattttgaaaagtctttaataaggatttttcttttctttttaaaaaagacttttttaaaaattaaaaataaaagaagcaaaagtcttaggaaaaggaggcaagtagccctgccactctatgtacagtaataacaatatctgtcccagttattatgtacaatattataaaaaatgtcgcagacagtacaaattaaggcacttatttctcaaaggacatcaagtcttatgccccgtgggagggaagatgccacttaattattgcaccattttgaaaaacagaactcgtcaaggcggatagtggtcttttcccacctggtcttcagtcacagatgggggctggggcagtggcgccgtcttcgtcgtcgaggtagaccctatggagccacaccgccctgccgagttctctgggtgcaataaataccagtcacagtttgggagggggccgtgtgcaggtggggaggcctctgggctgcatgtgccgcttcctgtgcagggcaaggtgggcagagcgcaagaaggcgtggtggcaccaatggccctgaaatggccagtggcccctgtgcttgtggtggtggagcgttagcttgtctgagtgagcacgcttccagctgcttccatcccagtggcagtggtcgggcttgtcacttgtgtgctgcgcagatgtgcctgcaagggagaattcttgctgtaggtctggccgtagccgcataggtatgcccggtgttgcggttcccaggccaggagcagctgtcatgcttgggcttggcctccagccgctccagcggggacgccggtgccaccacaaggagactgcgggcgactgggggtgccaggcccagggctgtggcggtggcggccaacgcctaagagactaaagacaggggcgtggaggggcggagctgggtggggggcgcctcatgaaggccgggctgggtgtcccaaaccagggccacggaaaggcagcgggaaggaggcgtgcgggccgtaggggctgaggggcgggtgttgggggcggaatgggagggacccgggacctcgcatgcatgaagccgcaggcccggggcgccctagtgtttgaggacgcgcggtccatgcctgaacctgggtgcgcagccgcagctgccgccatctgcctcagggggttgggctttgaccaggcggctgggcagcgccagttgaaagcggttgagcaggccgggcgcagtggctcacgcctgtaatcccagcactttgggagaccaaggcgggccgatcacggggtcaggagatcgagaccatcctggctaacacggtgaaaccccatctctactaaacatacaaaaaaaaaaaagtagccgggcgtggtggcgggcgcctgtagtctcagcactttggaaggctgaggcgggcggatcacgaggtcaggagatggagaacatcctggctaacaggtgaaaccccgtctctactaaaagtacaaaaaccaattagccgggtgcggtggcgggcgcctgtagtcccagctactccggaggctgaggcaggagaatggcgtgaacccaggagatggagcttgcagtgagccgagatcgcgccaatgcactctagcctggacgacacaaggagactccatctcaaaacaacaacaacaacaacaacaacaacaacaacaacaacaaaaacaacaaaaaccagctgagcagcgcgggccttctggcagcgggtccagctccagggcgccctagggcagcggcgtgcagtgttcgggtaataggacgcagacggtggggtcgccgggggcttcggggtggcctcggccccaggccatccagccctgtggaccgaatggagtcccacacgctgttgaggtagttgtgggttcccctggcctcgggctcggcgcagggtcagcgctcctgcaggcggcgcttg

SEQ ID NO: 24520 - DNA, 2300 bp, Homo sapien
ctgcccagggtgggtgtctgggacctgacaacattcccccagtgattgaccacatcacacatccagggtccagtgagcctggcctcagacgtgcccagtacactgaaggtgcacctggagcccgctccacctgatgcctccacagccctcgcagggcctgacctcccagcatgcacctgcctctccctgcaccccagctgtccaccatgcctgttccctgacttcctccatcctgtccagcgggatgggatggacatggggacagcctgtgtgcacatttcgtggcgagtgggagtgacacaccatctctgggaggcaccatggttcctggcaaacccgatcccaagactctgtccttgaggtggttttaccaaaccccaaacccagaactgcagttgtggctcaggggtcagctcctgctagtgccaggacactactgggaggctgggacccgaccaaagcccatggtgcctctggcctgaggacaaggtgtcttgggaccataaggccagcccaccaatggccattgggggctgagccccaaatcataggggctcagccccaatctttgtccttccctggctctttctggttcagtcccatcagggccctggatcccaagactcagcatccaaggtcccctccaggaatcctggcagctcagcatactttattctgtttcatctgagagcaaaaatgtaaaattggatgcacagaaaagtgactcaaagtgcttaatgactagaagaaatctaggagcagcaagaaggtaatgtggagggagggacctccatgaccggtgtctgcagagccaggggtacaggcacccagtgctgtggcctggcaccacctgcatctcagagggtgggtggcacactccttacccagaggacagcaggcctggtcaccagcttttctacctgtccctgtaagcatcacattgctggaggaaaatctcatgccagagcttggaccatccctagctcaggggttaggggttgtcccttggtgacctaaatgaaaaaacaggtccagaacagagttcctgatgctggacactcattcagtctttgaatcgtgggaggggaggcctggtactaggtagacctaacctctttgaggaaccacagagcccaaggctggaaacctccagaatcctccaccccctgatcctccctggggacccctgtggcctgtctcactgagcactcttccatctgtagatgtctgggctgctgtacaagggagtcccctttcaggtgtggtgctagacatggtcactcctgctggatgtctaggtggtagaaaccaaggacctagggaaataccaggtacagcctttccatgctcatccagagcaggacaaacaggccaggcggtgtcaggagcccaggtctccagctggagggaacgtcaacccttcggtgggagcaggggccctttgcacatcctaggcacagatggtaatgtagacaccgcaggtaagctgggcttggtacctacccctccccggattcagaaagaaaccaaacaaggagctttgtgcggaatgaaacctcctttcctcccagaagcactgctgactgtttggtggttgccatttgtggcagtgagcctttgtttgttctgaggttgggctggtttctcctcttggccctgccctacagatcataaaggagaagagcaagaggtccccagcaaacatccacagatggccttggaaataagtcaccttgtgagaagcatgtcatgttctgggagggataaggcatcaagtaaggcctatggggttggaggatccctgggcaggtggggcaatccttggagtcttcccatgggaatagggaggtcctgaggcagaggcaggggttccacaggaggagtcacagagctaccaaaggctctcctgtgccaggaagcagtcaacaccatgaactgaacacctgctgggctccaagccctggtccaggctggggcatgtggggccaggaggcagctcagagagggaggcagagagaagtgtgctgagagggcacccatttctgggtgtaatgtggtccagagattttggctgggaagggcttccagagtttcatatgtgttacggagctgcttcctctccctagcctcaccctgcaggaatgccagtgaacttattgctgacatcttggagctcagtaccctcatagtgtaacggcgtcagcagatctgcctgtgctgggacttcctgtactacccattcctgaggggcgatgcttctgcagggcctgtgacttggtgcacaacttcagacaccatca

SEQ ID NO: 24521 - DNA, 2300 bp, Homo sapien
tcagtaaggacctggtcagtgaggccttgtcagggaggcctggtcagtaaggtcctgttcagtgaggccttgtccatgaggccttgtcagtaaggtcctggtcagtggagtcatggtcattgttggcctggaagcaggggtcttgttagtgggtcctggtgatggggatctaatcagtgagggtgtggtcagggaagacctgatgtgtggggtctggtcagcaggaacctggtcagtggggactgctgagtgctgcttggagaagccaggtgcattgcacgttatcaagggccctctggacagctgggatggcccagtgatgcccaacggcctggtcaaaagtggacaaagcagttgtttggatggacctgggagatgttgctcagagattctgacaggacaaaggtgaagaaagggtcagagtgtctggagagatggtcacagtctatgggctgcacaggatggagaaagccagggaacaggcagggtgggcagtgcggtgcagggagaggtaggtgcatggtgggacgtcagaccctgtgaaggctgtgagggtgtcaggtgggttgggctccaggtgcaccctcagtgcactgggtgggtctcaccccaagctccctggaccccagccaggtgatgtggtcactccctgggggactgctctcaggtcccggctacctaccctgggcagcgctgtcccatctcaggactggacttcctcagatcctgtagagggcacagcctccacccaggaggggcaaccccatggtgcagcctgagctctccatgggcctggagcatcccctgccagccttgtgctccccattctcccaggtcccacttttccagtgtcagccagcagggatgccccgtcctcccttccccatgtgtctcctgggctgaaacttgtggcagattgggacagggatggtgcttccctcaggcccatttggggaggggactggctcccagactggtgcaggtcctcagctctgcctcgattggcttagagtgagatggatcagtcagttccctgaaggtgaagataagagactgtccctgctgttgggaggctagtctagggatggaggacgtaacaggtcctcccaggctgtcaggcctgggcagcactgtcttgtcttaggactcagaaagtccagtcctgagatgagacagtgctgcccagggtgggtgtctgggacctgacaacattcccccagtgattgaccacatcacacatccagggtccagtgagcctggcctcagacgtgcccagtacactgaaggtgcacctggagcccgctccacctgatgcctccacagccctcgcagggcctgacctcccagcatgcacctgcctctccctgcaccccagctgtccaccatgcctgttccctgacttcctccatcctgtccagcgggatgggatggacatggggacagcctgtgtgcacatttcgtggcgagtgggagtgacacaccatctctgggaggcaccatggttcctggcaaacccgatcccaagactctgtccttgaggtggttttaccaaaccccaaacccagaactgcagttgtggctcaggggtcagctcctgctagtgccaggacactactgggaggctgggacccgaccaaagcccatggtgcctctggcctgaggacaaggtgtcttgggaccataaggccagcccaccaatggccattgggggctgagccccaaatcataggggctcagccccaatctttgtccttccctggctctttctggttcagtcccatcagggccctggatcccaagactcagcatccaaggtcccctccaggaatcctggcagctcagcatactttattctgtttcatctgagagcaaaaatgtaaaattggatgcacagaaaagtgactcaaagtgcttaatgactagaagaaatctaggagcagcaagaaggtaatgtggagggagggacctccatgaccggtgtctgcagagccaggggtacaggcacccagtgctgtggcctggcaccacctgcatctcagagggtgggtggcacactccttacccagaggacagcaggcctggtcaccagcttttctacctgtccctgtaagcatcacattgctggaggaaaatctcatgccagagcttggaccatccctagctcaggggttaggggttgtcccttggtgacctaaatgaaaaaacaggtccagaacagagttcctgatgctggacactcattcagtctttgaatcgtgggaggggaggcctggtactaggtagacctaacctctttgagg

SEQ ID NO: 24522 - DNA, 2300 bp, Homo sapien
aaattggcaaaggctgatacttaattgttgaacctgggtttattggctcattctaccagcctttgtgtatgtttggaaatgtccactaaggtaaaatttaataaataaactgtgggggaaagttagattttagaggctgcttttaaagctttactattgtcagagaggtttggtttcaatatcactctgtaaaatgaacagttttaaaacttatttatacaaaaaatacaatcatctagcttatatacatcttcattttagtatacaaacaatttagctcatgcaaaagattctattaacttaaagtcataaaatgtacttacttttacatataattaaatgatgcaattaaccagtagtaaccactgagtttaaaagtgtatttttcggccgggcgcagtggctcatgccagtaatcccagcactttgggaggccgaggcgggtggatcacgaggtcaggagatcaagaccatcctggctaacacggtgaaaccccgtctctactaaaaatacaaaaaaattagccaggcatggtggtgggcgcctgtagtcccagctactcgggaggctgaggcaggagaatggtgtgaatccgggaggcggaggttgcagtgagccgagattgcaccactgcactccagcctgggccacagagctagactccgtctcaaaaaaataaagtgtgtttttcaccggacacggtgggtttgtgcctgtaatcccagcactttgggaggcagaggcaggaggatcgcttaaggccagaagttagaggacagcctgggaaacatagcaagatccctatctctacaaaataaaaaaaaaattagctgggcataggggcgcgagcctgtagtcctagccactcagaggctggggtaggaggatcacttaagcccagaagttcgaggatgtggtgagctatgatcgcccactgcactccagcctggctgacagagtgacactttgcctctaaaaaacaaaattaacaaggtgtttgtctcatgacttacagcacttacagatgcttgatgaagtcctggggcaccttcctccatgtgctctgcccactcgggtctgctggccttgacctggtccttgcagcccacaggacccattgctgggaggccccccagggtagcccggtcctccaatttcctattgctttatttaacagcctctttaataaacctcacacgtaaagatgtaagaaattaaatcaccattaaagactatttcagccttggaggaagaatactatttttagaaatgagtttttatattaaaatcacagaacaatttgcaacactgggttgcaaagtgtcttctttagtgctgataaaaggggctcagtccctattctggtagttagaaaagcagatttagaaggtgctagaaaataccccaaatcactccttccttgggttccgtttggattcagcaggctcctctggcgatgggcgggcgccgcagttgcgcctgtgctcccaagggctcgccttaaatacctgtgggtatctcctcatcatatcggtgccattcatgtttctcagagatctaactgccaaaggacttaaactctctaagcctccctttctctcttttcacgtgggggataataatagtgcctaccctagagggtcctatagtaaatgggggcagtgcccctcccccacttgctgggcacagagaagaggctccatctgcagagtaagggggcctctcttaaagcaggggtgacgtgctttcccttatcctcgtgttccccactcagggcggctgggaccccaggctgttgcctgtgccccacacaggagctccctctcccacagggcccctcaccatctcccagtacaagtagtatgcagtagaaaatctccaccttcctgtgaaagctttttgttcatgttgggatttttttttttttccagtgagaaaatggctcgtcaccttggataccaatgttttacatcagggattggtcactcctgctgctgtcagcactgtaaacactgctggggggagtcagcccaagtccccaccccccagccaggtctcatagagggaattgttcttcaggctcggaggggcctgcctgtcactgcgcccccgaccctagctcagggactgcagaactcaagataccatcccgtttctcctggctgaggaagggaagggaacatccacatcttctgtactcgtccattctgtgtccccggggcctggagtaaagacaccttcaaatgcagagactcttcagattcagctttcctggaaactgatcttcaatgcactaaga

SEQ ID NO: 24523 - DNA, 2300 bp, Homo sapien
tccttttgagcattatgctgtgcccatcttgtcattgtatgtgcagaatgttggggtaggaagtttctttaatttcataggtccacaggtgaggaagaattgtactcaagggctgtgtttagcagattacagctgggaacctcatccatattctatttggagtatttaaatgatgagattgtggattttgagctgatgagataattctatttagatttagatgatgagattttgaattttaagttgagactctaatgagattgccagaagcgttcgaaccagagcaattccatcttgaataggggccggtaaaatgaggttgagacctactgggctgcattcccaggaggttaagcattttttttttttttttttttttttttttgagatggagtctcaccgctctgttgcccaggctggagtgcagtggcgcagtcttggctcactgcaagctccgcctcccgggttcacatcattctcctgcctcagtctcctaagtagctgggactacaggcacccaccaccacccccagctaatttttttgtattttttagtagagacggggtttcaccgtgttagctaggatggtctcaatctactgactttgtgatctgcctgcctccgcctcccaaagtgctgggattacaggcgtgagccaccgcgcctggccttttttttttttttttagacaaagtctagctctgtcacccaggctggagtgcagtggtgtgatctcggctcaccgcagcctccgcctcccaggtccaagctattctcctgcctcagcctccccagtagctgggacttacaggcacccgccaccatgcctggctaatttttgtattttaagtagagacggggtttcaccatgttggccaggctggtctcgagctcctgacctcaggtgatccgcccgcctcggcctcccaaagtgctgggattgcaggtgtgagtcaccgtggccagcccccaggaggttaggtattctaagtcacaggatgagataggaggtaggcaaaagatacaagtcataaaaatcttgttgataaaataggttggggtaaagaagccggccaaaacccaccaaaaccaagatggcaacgagagtgacttctggtggtcctcaatgctcattatatactagttataatacattagcatgctaagagacactcccaccagtgccatgacagttcacggcaaggtcaggaagttaccttacatggtctaaaagggggaggaactctcagttctgttaattgtccatccctttccctgaaaacccatgaataatccaccccttgtttagcatataatcaagaaataaccataaaaatgggcaaccagcagccctcaggactgctctgcctatggggtagccattcttttattcttttactttcttaataaacttgctttcactttatggacccgcccgaactctttcttctgcaagatccaagaatcctgtcttgatgtctgaatcggcccctttccagtaacaggatgaggctcttggtaaccttgaggtatgctgaatgcattttggggattgggagggacatgcgtcactggaggccggaggttgggctgtgttaggtagaattctaagatgactcgctgccactcagctgttgtctatgaccctcctgttgagtgtggagggacctgtgactgagatggcacagccctctcgtgactgttgtatgctggagtttaagaaaaggatattgtattgtccctagtgggcctgacctaatcccttgagccggcgtccttatggaggagtgggttgaactcggaaagcaagctggaaatgcttgatgacgtgatgtaagcacttgccctctcatcattactgtatatttctgggcttgggccatagttgccttcatgtctcccctgcacagtggacttcctggagggaggggccctgtgatgctctgggggtttccagcgacccctgcctcctaccgacctgggctccccgcacccgccgcgcgagatccagtcccagcatcctgatggacgcaggcgttttcctggagccccgcggttggccacgccccgcgctctccgccccgtcggggacgcccaggccaccggcctgatgagggaagcaggggcagagcgctcaggccagggccggcgggggcactgcgcactggccgcctccctcctctggccaatcctcctgccgctgcgcgtctagtccacctcgtccctctctgcaggtgagcgggcaggggtggcccagacagagcgaggagcagaggtcgcctgcctctcgtggccgtcc

SEQ ID NO: 24524 - DNA, 2300 bp, Homo sapien; identical to SEQ ID NO: 24523

SEQ ID NO: 24525 - DNA, 1645 bp, Homo sapien
gctagactccgtctcaaaaaaataaagtgtgtttttcaccggacacggtgggtttgtgcctgtaatcccagcactttgggaggcagaggcaggaggatcgcttaaggccagaagttagaggacagcctgggaaacatagcaagatccctatctctacaaaataaaaaaaaaattagctgggcataggggcgcgagcctgtagtcctagccactcagaggctggggtaggaggatcacttaagcccagaagttcgaggatgtggtgagctatgatcgcccactgcactccagcctggctgacagagtgacactttgcctctaaaaaacaaaattaacaaggtgtttgtctcatgacttacagcacttacagatgcttgatgaagtcctggggcaccttcctccatgtgctctgcccactcgggtctgctggccttgacctggtccttgcagcccacaggacccattgctgggaggccccccagggtagcccggtcctccaatttcctattgctttatttaacagcctctttaataaacctcacacgtaaagatgtaagaaattaaatcaccattaaagactatttcagccttggaggaagaatactatttttagaaatgagtttttatattaaaatcacagaacaatttgcaacactgggttgcaaagtgtcttctttagtgctgataaaaggggctcagtccctattctggtagttagaaaagcagatttagaaggtgctagaaaataccccaaatcactccttccttgggttccgtttggattcagcaggctcctctggcgatgggcgggcgccgcagttgcgcctgtgctcccaagggctcgccttaaatacctgtgggtatctcctcatcatatcggtgccattcatgtttctcagagatctaactgccaaaggacttaaactctctaagcctccctttctctcttttcacgtgggggataataatagtgcctaccctagagggtcctatagtaaatgggggcagtgcccctcccccacttgctgggcacagagaagaggctccatctgcagagtaagggggcctctcttaaagcaggggtgacgtgctttcccttatcctcgtgttccccactcagggcggctgggaccccaggctgttgcctgtgccccacacaggagctccctctcccacagggcccctcaccatctcccagtacaagtagtatgcagtagaaaatctccaccttcctgtgaaagctttttgttcatgttgggatttttttttttttccagtgagaaaatggctcgtcaccttggataccaatgttttacatcagggattggtcactcctgctgctgtcagcactgtaaacactgctggggggagtcagcccaagtccccaccccccagccaggtctcatagagggaattgttcttcaggctcggaggggcctgcctgtcactgcgcccccgaccctagctcagggactgcagaactcaagataccatcccgtttctcctggctgaggaagggaagggaacatccacatcttctgtactcgtccattctgtgtccccggggcctggagtaaagacaccttcaaatgcagagactcttcagattcagctttcctggaaactgatcttcaatgcactaaga

SEQ ID NO: 24526 - DNA, 2300 bp, Homo sapien
tcagtaaggacctggtcagtgaggccttgtcagggaggcctggtcagtaaggtcctgttcagtgaggccttgtccatgaggccttgtcagtaaggtcctggtcagtggagtcatggtcattgttggcctggaagcaggggtcttgttagtgggtcctggtgatggggatctaatcagtgagggtgtggtcagggaagacctgatgtgtggggtctggtcagcaggaacctggtcagtggggactgctgagtgctgcttggagaagccaggtgcattgcacgttatcgagggccctctggacagctgggatggcccagtgatgcccaacggcctggtcaaaagtggacaaagcagttgtttggatggacctgggagatgttgctcagagattctgacaggacaaaggtgaagaaagggtcagagtgtctggagagatggtcacagtctatgggctgcacaggatggagaaagccagggaacaggcagggtggacagtgcggtgcagggagaggtaggtgcatggtgggacgtcagaccctgtgaaggctgtgagggtgtcaggtgggttgggctccaggtgcaccctcagtgcactgggtgggtctcaccccaagctccctggaccccagccaggtgatgtggtcactccctgggggactgctctcaggtcccggctacctaccctgggcagcgctgtcccatctcaggactggacttcctcagatcctgtagagggcacagcctccacccaggaggggcaaccccatggtgcagcctgagctctccatgggcctggagcatcccctgccagccttgtgctccccattctcccaggtcccacttttccagtgtcagccagcagggatgccccgtcctcccttccccatgtgtctcctgggctgaaacttgtggcagattgggacagggatggtgcttccctcaggcccatttggggaggggactggctcccagactggtgcaggtcctcagctctgcctcgattggcttagagtgagatggatcagtcagttccctgaaggtgaagataagagactgtccctgctgttgggaggctagtctagggatggaggacgtaacaggtcctcccaggctgtcaggcctgggcagcactgtcttgtcttaggactcagaaagtccagtcctgagatgagacagtgctgcccagggtgggtgtctgggacctgacaacattcccccagtgattgaccacatcacacatccagggtccagtgagcctggcctcagacgtgcccagtacactgaaggtgcacctggagcccgctccacctgatgcctccacagccctcgcagggcctgacctcccagcatgcacctgcctcttcctgcaccccagctgtccaccatgcctgttccctgacttcctccatcctgtccagcgggatgggatggacatggggacagcctgtgtgcacatttcgtggcgagtgggagtgacacaccatctctgggaggcaccatggttcctggcaaacccgatcccaagactctgtccttgaggtggttttaccaaaccccaaacccagaactgcagttgtggctcaggggtcagctcctgctagtgccaggacactactgggaggctgggacccgaccaaagcccatggtgcctctggcctgaggacaaggtgtcttgggaccataaggccagcccaccaatggccattgggggctgagccccaaatcataggggctcagccccaatctttgtccttccctggctccttctggttcagtcccatcagggccctggatcccaagactcagcatccaaggtcccctccaggaatcctggcagctcagcatactttattctgtttcatctgagagcaaaaatgtaaaattggatgcacagaaaagtgactcaaagtgcttaatgactagaataaatctaggagcagcaagaaggtaatgtggagggagggacctccatgaccggtgtctgcagagccaggggtacaggcacccagtgctgtggcctggcaccacctgcatctcagagggtgggtggcacactccttacccagaggacagcaggcctggtcaccagcttttctacctgtccctgtaagcatcacattgctggaggaaaatctcatgccagagcttggaccatcccctagctcaggggttaggggttgtcccttggtgacctaaatgaaaaaacaggtccagaacagagttcctgatgctggacactcattcagtctttgaatcgtgggaggggaggcctggtactaggtagacctaacctctttgag

SEQ ID NO: 24527 - DNA, 2300 bp, Homo sapien
tgcccagggtgggtgtctgggacctgacaacattcccccagtgattgaccacatcacacatccagggtccagtgagcctggcctcagacgtgcccagtacactgaaggtgcacctggagcccgctccacctgatgcctccacagccctcgcagggcctgacctcccagcatgcacctgcctcttcctgcaccccagctgtccaccatgcctgttccctgacttcctccatcctgtccagcgggatgggatggacatggggacagcctgtgtgcacatttcgtggcgagtgggagtgacacaccatctctgggaggcaccatggttcctggcaaacccgatcccaagactctgtccttgaggtggttttaccaaaccccaaacccagaactgcagttgtggctcaggggtcagctcctgctagtgccaggacactactgggaggctgggacccgaccaaagcccatggtgcctctggcctgaggacaaggtgtcttgggaccataaggccagcccaccaatggccattgggggctgagccccaaatcataggggctcagccccaatctttgtccttccctggctccttctggttcagtcccatcagggccctggatcccaagactcagcatccaaggtcccctccaggaatcctggcagctcagcatactttattctgtttcatctgagagcaaaaatgtaaaattggatgcacagaaaagtgactcaaagtgcttaatgactagaataaatctaggagcagcaagaaggtaatgtggagggagggacctccatgaccggtgtctgcagagccaggggtacaggcacccagtgctgtggcctggcaccacctgcatctcagagggtgggtggcacactccttacccagaggacagcaggcctggtcaccagcttttctacctgtccctgtaagcatcacattgctggaggaaaatctcatgccagagcttggaccatcccctagctcaggggttaggggttgtcccttggtgacctaaatgaaaaaacaggtccagaacagagttcctgatgctggacactcattcagtctttgaatcgtgggaggggaggcctggtactaggtagacctaacctctttgaggaaccacagagcccaaggctggaaacctccagaatcctccaccccctgatcctccctggggacccctgtggcctgtctcactgagcactcttccatctgtagatgtctgggctgctgtacaagggagtcccctttcaggtgtggtgctagacatggtcactcctgctggatgtctaggtggtagaaaccagggacctagggaaataccaggtacagcctttccatgctcatccagagcaggacaaacaggccaggcggtgtcaggagcccaggtctccagctggagggaacgtcaacccttcggtgggagcaggggccctttgcacatcctaggcacagatggtaatgtagacaccacaggtaagctgggcttggtacctacccctccccggattcagaaagaaaccaaacaaggagctttgtgcggaatgaaacctcctttcctcccagaagcactgctgactgtttggtggttgccatttgtggcagtgagcctttgtttgttctgaggttgggctggtttctcctcttggccctgccctacagatcataaaggagaagaacaagaggtccccagcaaacatccacagatggccttggaaataagtcaccttgtgagaaacatgtcatgttctgggagggataaggcatcaagtaaggcctatggggttggaggatccctgggcaggtggggcaatccttggagtcttcccatgggaatagggaggtcctgaggcagaggcaggggttccacaggaggagtcacagagctaccaaaggctctcctgtgccaggaagcagtcaacaccatgaactgaacacctgctgggctccaagccctggtccaggctggggcatgtggggccaggaggcagctcagagagggaggcagagagaagtgtgctgagagggcacccatttctgggtgtaatgtggtccagagattttggctgggaagggcttccagagtttcatatgtgttacggtgctgcttcctctccctagcctcaccctgcaggaatgccagtgaacttattgctgacatcttggagctcagtaccctcatagtgtaacggcgtcagcagatctgcctgtgctgggacttcctgtactacccattcctgaggggcgatgcttctgcagggtctgtgacttggtgcacaacttcagacaccatca

SEQ ID NO: 24528 - DNA, 2300 bp, Homo sapien
ctgaattagatagttctatcggctggagtctcagtgcccttgtttgaaatttattaagattagacggcagatgttccaaagatacaacaattttctgaaatgtgtaaccaatggaaattttctttcttttagggttgggttgataatctaaatggatgtagccgactcattattgcggtatgtatagggatgaagaagtaactgtaatgtagtggaggaatagtaagaaaattcttagtgctggcttagcttcattgatccaaaaacataaatgctactttactatcaattgaagcatattatttcaattattctggttataatatggaggcaggatgaaattgtttttattctcttagaattttttttatcaggaaaacagaggtaaagtgctatcaattactatttaagagttctattttgaaaagtctttaataaggatttttcttttctttttaaaaaagacttttttaaaaattaaaaataaaagaagcaaaagtcttaggaaaatgaggcaagtagccctgccactctatgtacagtaataacaatatctgtcccagttattatgtacaatattataaaaaatgtcgcagacagtacaaattaaggcacttatttctcaaaggacatcaagtcttatgccccgtgggagggaagatgccacttaattattgcaccattttgaaaaacagaactcgtcaaggcggatagtggtcttttcccacctggtcttcagtcacagatgggggctggggcggtggcgccgtcttcgtcatcgaggtagaccctatggagccacaccgccctgccgagttctctgggtgcaataaataccagtcacagtttgggagggggccgtgtgcaggtggggaggcctctgggctgcatgtgccgcttcctgtgcagggcaaggtgggcagagcgcaagaaggcgtggtggcaccaatggccctgaaatggccagtggcccctgtgcttgtggtggtggagcgttagcttgtctgagtgagcacgcttccagctgcttccatcccagtggcagtggtcgggcttgtcacttgtgtgctgcgcagatgtgcctgcaagggagaattcttgctgtaggtctggccgtagccacataggtatgcccggtgttgcggttcccaggccaggagcagctgtcatgcttgggcttggcctccagcagctccagcggggacgccggtgccaccacaaggagactgcgggcgactgggggtgccaggcccagggctgtggcggtggcggccaacgcctaagagactaaagacaggggcgtggaggggcggagctgggtggggggcgcctcatgaaggccgggctgggtgtcccaaaccagggccacggaaaggcagcgggaaggaggcgtgcgggccgtaggggctgaggggcgggtgttgggggcggaatgggagggacccgggacctcgcatgcatgaagccgcaggcccggggcgccctagtgtttgaggacgcgcggtccatgcctgaacctgggtgcgcagccgcagctgccgccatctgcctcagggggttgggctttgaccaggcggctgggcagcgccagttgaaagcggttgagcaggccgggcgcagtggctcacgcctgtaatcccagcactttgggagaccaaggcgggccgatcacggggtcaggagatcgagaccatcctggctaacacggtgaaaccccatctctactaaacatacaaaaaaaaaaaagtagccgggcgtggtggcgggcgcctgtagtctcagcactttggaaggctgaggcgggcggatcacgaggtcaggagatggagaacatcctggctaacaggtgaaaccccgtctctactaaaagtacaaaaaccaattagccgggtgcggtggcgggcgcctgtagtcccagctactccggaggctgaggcaggagaatggcgtgaacccaggagatggagcttgcagtgagccgagatcgcgccactgcactctagcctgggcgacacaaggagactccatctcaaaacaacaacaacaacaacaacaacaaccagctgagcagcgcgggccttctggcagcgggtccagctccagggcgccctagggcagcggcgtgcagtgttcgggtaataggacgcagacggcggggtcgccgggggcttcggggtggcctcggccccaggccatccagccctgtggaccgaatggagtcccacacgctgttgaggtagtcatgggttcccctggcctcgggctcggcgcagggtcagcgctcctgcaggcggcgcttg

SEQ ID NO: 24529 - DNA, 2300 bp, Homo sapien
tctgagattgttgtatgggctatttaattcctaagatgattctcagcaggaggcaggctctgtatcatcccagcggctttttcaccttgggagtttcgcgctttccgattccatgaagttgctgcttgtcaccccgtcaccggctataaggatttagctcacaaccacatttttactgagggattgtcatttaacgagtttccctctcccagggaatctgcattctaagaccccaaaggccggcgagggtcgttgtgctgggctggacagcagagagaggctcggccttggccctcagccctgcagcacacagggcacccgcgcagagagcgtggcctgcgaatggctctgctgcctctcccggcctggggccgattagaccggtcagagcatctgtaaagtacaaggggcccctagggagtgcaggccagggcagctggggcagggaggcggggtccgccccatggcatcgcggtttctctggaaggggtgatgggctttctcagaaccacctttagtttctgtaccgtaatcggccaaaaaggcgcaggcgctgctgctcctggcagctgcgtaacaggctctcagaggaggacgcggttccgggctgcggcgggcgtggtccggggctgttctgggcgtggtctttggctgtgatgggcgtggccttgggctatggagggcgtggtcccagggctgcgatgatggtggtccggggctgtggtgggcgtggccccgggctgcggcgggcgtggtccccgggctgcggcggacgtggtcaggggcggttctgggcgtggtccctgggctgcggtggacgtggtctcgggctgtgacgagcatggtccctgggcagcagtggacgtggtctcacacccagagtctgaaatttctgcctcttcctggccctaaaaatatcctgcctgttcccacgcggctcctgccttctggagcagtctgccaggccggcggtgggtgttgggcaggggtctcaggctgccagcagccaagtgcagcccgttctgcagtgatgacagggatctgtgggcagaggggaccgagcctcggaggatgctgtaggtgggagagctaacattgactcagcatttacttcaggctatgcactgtgctgagtcccttacctctgggcttccgcaacgtttccctgaggtcagtgtggttggcattcgtgtttcacagataaggaaactggaacaaagcttttcaaggccacgcagccaacacctcgagagagcgggagagcttgttcacttgaactggatccccaaacaccaacagccaccctggccactggctctgactgagctcaccccacccccgacaagccaggtgcctggggaacctgccttccattcctccccactagctcctatgaggtctctgcctgccaggcctcctcctccccagaggaagggacgtttctaccacacagcgaccccacaagtcagctgagattttgggggcaccgaatactcacatggagccctgagtggaaggggtgtaggagtcacactcacacgcatgcacagggtcaccctgagctggagaccatacccaaggctctgtgaggaaatgtgagtgcgcccaggcccctccagcctggtccaatttgctgagcctctagctcgacagaggtcagaccaggtctacagcccagcgatcctagttccagacagctgctccttcctttctaggagggcagcccggaatataatccagtgtggtgagaatccattgcacactccctgtgagccaagcagacaggtttgggggccactgagataggggacacttctggaggggtcagtgactgcaaaatggtggcagtgggatgatctgttatgtctacccacgcacatgcagctgcacagttgcagagatgtgaatgcaggaagccaggtgtgagtctgaattcacattggtttttttatctttattaagcagtcattcctaaggcctgcccgagcctggcatctctacagaggagtggtgccatcaggacccctgtggggcagatcaacactcaaggcaggtgcagaatcaacaacctgtgacaaagccagccatccctgccaggaagcatgggggatgagctggcaccttgccctgtgggcactacagcttggccggccctgatccagctcatcagcaagacaccctgcatgccccaagcagccagcaacacttccttgggcctgggggacctcagggtgcccagctccatgctgtactggcttttccttccctcaagcctgctggctgcagccacactggctgtc

SEQ ID NO: 24530 - DNA, 2300 bp, Homo sapien
gatggttgcacaacagtgtgagtgtaaatgccactgaactgtacacttaaaaaggggtaaatggtaaatttcatattatgtatattttaccacaataaagaaaaagaaaccggccgggcgtggtggctcacgcctgtaatcccagcactttgggaggcgaggagggcagatcacctgagattgggagtttgaggccagcctgaccaacatggagaaaccctgtctttactaaaaatacaaaattagccaggcgtggtgctgcatgcctgtaatcccagctactcaggaggctgaggcaggagaatcacttgaacccgggaggtggaggttgcagtgagccaagatcacaccattgaactccagcctgggcaagaagagtgaaactccatctcaaaaaataagataaaaatttttttaagaaaaagaaaccaactgttcactgtttggaaatatgaaataaaaaagtttttaaatattgaaaattttaaaagaaaaagaaacagctcaaagcagtaggtctgatggtaccccacaaatgcagctgacgtgactggcacagtggatggccgactcatttgtgcccacagtcaactctttggcctgccaagaaagcaaggggtggtgtggccagaaggtctgagaccctggggacaaccaagtgaccagaaagctagttccaggaaagaaaaggtttacagccactgctcaaaaacacagatgagaaatctaagtcagtgttttgtgtgtgtttttttgtttgttttttttttttttttgagacagagtctcgctctgtcacccaggctggagtgcagtggcacaatctcggctcactgcaagctccacctcctgggttcacgccattctcctgcctcagcctcctgagtagctgggactacaggcgcccaccaccatgcctggctaattttttttgtacttttagtagagagggggttttgccatgttagccaggatggtcttgatctcctgaccttgtgatccgcccgtctggacctcccaaagtgctgggattacaggcgtgtaagtcagtgtattgtaaaaataaaatgtaagttcacattagaataatatttaagaaaaatcattcagtggtatctgaactgggtagcctagtgtaaaagatttttccaggagtccctggggaagacctgatcccacatcttggggaaataaaaaatttgaaatatatattttcatgttacccaaaagttaggggtgtttgaaaactgtctgaaatgacaaagtagaagggttggaacagtttgcagtggccgaacgatgaccatgtgagcatcgaaaatgagcaattgtcactcactggaagaagctgaatctgtaattatcctcacaattacatgattttataagacacattaaaaaatccttaaatgcaaaagcggggagagcctaataaggaaggctaatgcttactaattttaacaagaggaggactgtggggtctgcgggagtcctacccctgacttggggtgtatgtggcaacgaggcagaaactgccttctgtcctacctaagagaaagacagggaactcccacagccaggatctgccaaaaaaggtcaagactaccagcaacatgggcgagggggcctctggggtcacgttgagttagtcgctgcatagaaagagggctcaaatctaaaaaatgcaagagggtaggtcacccaagggtggggaaggtcttggctggaggatgaaggggcctcttgtctctggggcgaggcgatgtcaaggggaatgacaaaccaaaccagtccaaagcaaggggactctgtgtcctgggttctcagacaaggtgactgggagggagcccaccaagctcagggaaaggcctggcctccgtcatccacctgagctctgccttcccttcagccttagcctcagcgtggacccgggactcctgcatcctcccgtcctgccccgcctgggcacaccacggccgagagcctcctgttggcatcagcctctccccagcaccgactgtgcgctcccgctcccccctcctccccacaaccccgccccacactactggcactgctgcctgagccttcctggagttacttaatccaccccagccccaggcactgaaccacgcgtgcagacccctcgtcctcagttctgcggagacagagtccccacagcatttctgctcctccctcaagactgcggcagagcacagcaccagtagaccccacacagtgagtacctgtagggcaagtgcctctttcgttctcttaataatagagtcaggtcccttctccaa

SEQ ID NO: 24531 - DNA, 2300 bp, Homo sapien
ggccaggggttgtgtattttcactggacctcccccctcgccaggggattagcactttaagccttcagagaagagcgaattaacttttgctaagcacctgtgaggtttaatttctcacgtactctccatggcaaccccaccaggcggtcattcctctcgaatgttaaagatacgtgtttagagcagatgatcatgattacacaactggtgtgcagcacagccaggtgcccagatccgaatcccacaccctcctcccaccaccatgggcctcagggacatgcttctagcacagtcatggaccctgagtgacataaaggctgtgacaggggacgcaggatcttcagatggccccacagtgcctcctctgagtatctatctcccaagcttctcgcctggcctggttgctgtgagggcctggggagaggcagagacaggttgggtgtacggaaaatgcacactctgccaggcacccctgacacgcactgctgaccaggcatagcgttcagtggggctaggacttggacgagggtgcaggcttgagcaggggtgcaaaaagccagtctgggcagatgctctccctctgtggggcgccgatctcagaaatggtggacagagcagggctgcagtatggtgcacatgggccttggggtcttagctttcgtgggcctcttcctgcataaaataaaatagttaaaattagagtttacaactgcattcatataaagatgaatatactccaggctagattcattattattttattatactcagtttttttcttctgatttaaaatagtgcggtcctagggctggttagagtgtttcctggcaggccctgtctccttaaacccctgcaaagaaagcagcgaggacttccctttgccccttagcagaaagctgcgctccttaatggttacgggtgtgaccattcacttacatcctatctgcaggacatacctggaaaggtaagtgggaggcaagagggagctggaggccaagacttcggtcccagatatcctagtccacatttgtccccaccaggtgtgtgagtgccggcgcgctgcacagcctccctgggcctccgtttcctcaactggtaaacaagaacgctgggcggactgaactctgaaagttctgggagcttgacaatcagaactctcagcagagaggccgcccctgctctcaggagggcggaggcacctgagtctccagtgcggaggacaggccgaagcgctgcgttggagatgtgcaaatgcgcaagaagcgtgctgctttctctctgagaaaacactcctaggcttcaagggggcccaagagctcgactgggcgggatgatcccggcggcccctgggccgggtctgtggacggctctgctgtgtgcctgtgcgtgcccagtcccgcgggtgaccaaagcccaggggcgggcagggcaggagcctggacctcacgtgcctccagtggccaggtttgcgggggcggagcgtccgggcgagggcgcgggggcggaccctagggcggggcgcggggtggcgtcggtggagccggctcggcggcgcggctcgtagtgctgcggccgggctccgggcgtcccggcggccaccatgctcagcgtcgtgcacttcctccggagcttcttcaaggtgagagccggcgtccgggacttgcggtcgggctcccggcgccctgcgcgggtggggaggagcacagcccgcgctggctgctgcgccccgggccgtcccctgggcacccggtgggtggggacaccctcgtggctccccgccgctcccaactttccgacgtgcagaccggaggcggcgtcctgcaaagtggggccgtctcgagcgcggggaaggacggggctccgttgggggcggtagggacggcggcccggggcgagcccctgagagggcaagggcgagcgcctgagccggcctccccgcacctggaccgtcctgggcgcgcggggcactcggagccgctgcctggaccggcctgggcgcgcagggcactcggagcctctgccgcttggcgcagtaccagctgttttgggaaggagggctggtgccggcccggtgggtacgggagaagtggttgctgttgttattccccaggctgagagtacgcgagggcgcagcagcggcaaggggctggaactggggtcggggctgttgggctcctgctcggggtgccccctctctggcccgatttccgggcccgctcaccatccgggacccactcagttgggacgcctccacctcgctgcccccacaggaaccccaagatgggccgggggctccggggc

SEQ ID NO: 24532 - DNA, 2300 bp, Homo sapien
aaggagaccctctgaggggcacaggtgatgcttcctgtggtgtgcatggggaggcctcaggtgtctcaggacctacagggacctgaggcagaaagtatggaaaggcctctctgaatagatggggaactggaggaccgtgtgtgtcaggaatactttcacaaaggccaaatcccaggagcctcccaggcagcagcaggcaaggtggctgcccagagatgtccagtggtctctcctccagccacactccacctgctcctggagcttctggggccagctgggtgactcagattctgcccaggcatcttggattctgtccggccatcttcccctcacctgggcaactccttgccacccttgctgtgggtgcagcagaaccaaggtccagggctcaccacttcataaacacactcacgtttctttccttccttccctccctccttccttccttcctttccttccttccttccttcttttctttttcttttttttgagacggagtctcgctctatcacccatgctggagtgcagtggtgctatcttggctcactgcaacctctgtctcccgggttcaagcaattctcctgcctcagactcccaagtagctgggattacaggcgcccactaccgcgcccggctgatttttgtatttttagtagagacggggttttgacatgttggccaggctggtctcgaactcgtgacctcaggcgatccgccccccccactcggcctcccaaagtgctgagattacaggcatgagccaccgcgccgggccacactcacattttctaataagaccttcacactaaccctgaaaggtgtggagggcatggaaacatcacccacatttttcaaaacaaagacccaggtggttatgtgattgtcccaagattgtacacctcctcaatgacagagtcggcatttgaagggggtctgagctcttccaagccatctcctacactcaccagcacaggttcctgaaaggctgccttcccggctgtccggccctctccactcttgatgccagcgatcacttcgttatcgctgggggtgggagctgatgccaggccagcggataggctgagggcagggctcctgcaggtctgccctgggtcacctggcttcctgcccctttcactagagctctcagggccacagaactccgacctcaacctcccgtcttcaactccgggagaagatggctgcacagccaagtagggcgccctcccgccctcccgccccgacagccccacacaggtctgcctccccctggacctgcagctgacagctggtggctcttccccgcctctcctttcatgcagttgctcccggagtaggagcccatcggagctcagcaccacccagcgtcgcaaccgccctcccgctggctcacctggggaggtcgggcttggcaacctgtggccggccacccctgacagtgccccggagcccccggcccatcttggggttcctgtgggggcagcgaggtggaggcgtcccaactgagtgggtcccggatggtgagcgggcccggaaatcgggccagagagggggcaccccgagcaggagcccaacagccccgaccccagttccagccccttgccgctgctgcgccctcgcgtactctcagcctggggaataacaacagcaaccacttctcccgtacccaccgggccggcaccagccctccttcccaaaacagctggtactgcgccaagcggcagaggctccgagtgccctgcgcgcccaggccggtccaggcagcggctccgagtgccccgcgcgcccaggacggtccaggtgcggggaggccggctcaggcgctcgcccttgccctctcaggggctcgccccgggccgccgtccctaccgcccccaacggagccccgtccttccccgcgctcgagacggccccactttgcaggacgccgcctccggtctgcacgtcggaaagttgggagcggcggggagccacgagggtgtccccacccaccgggtgcccaggggacggcccggggcgcagcagccagcgcgggctgtgctcctccccacccgcgcagggcgccgggagcccgaccgcaagtcccggacgccggctctcaccttgaagaagctccggaggaagtgcacgacgctgagcatggtggccgccgggacgcccggagcccggccgcagcactacgagccgcgccgccgagccggctccaccgacgccaccccgcgccccgccctagggtccgcccccgcgccctcgcccggacgctccgcccccgcaaacctggccactggaggcacgtgagg

SEQ ID NO: 24533 - DNA, 2300 bp, Homo sapien
ttcaagacctcagagggctctccagtgtttctcttcagaaatccaggtctgagagctatctgggcatcccagtggtctggcccttccttctctggtgctgtgaactgggtcggagttggccacatatccacaacagggccagggcactggtgctacctagcagaggcccactggacaacacagcccctctggggaccaggacaaagaaggaaagtactctaggccctgcaggggacacagaattgctctggtcccagccccactcggatgtcccctgccagcctcctttgaggacatcttgcctcctacgcaccaaccgtcaccatagtgccccagaaactactggtgacaagaacagggcatcccccagactcaactgtgggcacatgagggcactggtcagggcccattccatagcagggttttcaccagagtgccccgaggatcccgtgggacagaatgttgtgaagtctgggacccatgtgaaggaaggggccaaaaatgaacgagatccaagaatacaaaacatcccttcccctgcacccacccagctgtctggcccgattcctgcttttcagagtggggctccccatctgcagggtccctgcaagcctggtgggtttcgcttgcaaagggcctctcaggacactccttctgcaggtctcctgggggaaaaccagttaagacaggattccaggtcatgtctggtggcttcatgcctcacctcagagttagtgaagctcagtgcagaggaagtgcctgagcccgctgagtgcaagtcagagcaaagcccagaaagcagaacccaggaaccccaaggcacccaactcgcaccaagagctgctgatgagagagagacacagaagcacctctggggcatttctgtccaggcaggaaaccaaaccagtaattacacatcaaagtatgtgctcagcgaggaaagcaagtcacctaccagggccaagttcccacggcagcctagcagtgaggggacccaggtgtggagtggagacttgatgggctgcttggaagtgagtgacagttcagatgcccctgagaccacccagaaatcaagcgcaatagacacttcaaaggcagccgaagaagccatggttctagaccccaactacagggaacaggctttgcaaggtctttcagaattcaaggcagccacggtgtctcactgcggccccggggctgaggagggtgaacaggggcctgggggtgccgggggccggcagctggagcccaaagcaggcggcgaggcctcgaggggcaggggcgccctcatcattgtagctgtggagcagaaaggtcttcaggccagcaggagcaatgcggggcctgttccagaaacactgccccgtgactttcctaaggaaagaccagaatctcccttgagcactggcgagaccccctgtgagtctcccactagggggaaaacaccagccggtaatgagtgtgagttgccagcagcccccatacagggagctggcgatggggctcttcagcgggtggcccaggccgcagagcttgggagagtgctggtcccccaagctgcttcggaagagacgccgagcacagaggagcccccgggagagagactgcgtggggagagccggagctccgggtcaggggagcgtggcccggaggaggcccccgaaggcggtgctgcagcagcccggggccagcgcccccgcgtccccgccttggagccgccccagccgccacgcgggctccgcaagggcgcgcaggagcctgggaagcgcccgacgttttccaaggtgacctccttcaggaagggcaggcccttggccactgagagcccaggaggggtcccggccccgaccaccgagggtcgccgctggggctcttcaggccccgaggggctccccagggagaatccgcccgctgcggccggtcgggacgcaccgcctctgcaccacggggacgccagcgcctggcccgagtttgtcccgcaggctgcaggcgacaggactgcagggccggcaggagcggggcacacggggacctcaggggatcttggtagccgagggccttcctctgagagctgcaacgcaaagagactcaaaacaacggagaaaaaactcagggcaaggttggccttggctcataagaccttttcaaactttattgagtcaatagttctagagaaagagaacacccatgaacgttccccaagttctcccaagggcgagaaggagaagagcaggctgcgccagggttcctggcgggcgtttctgaaaagcaaagatgccggaagccccaaaaagcccacc

SEQ ID NO: 24534 - DNA, 2300 bp, Homo sapien
tctgtcttcaagctgctatttctttcagtatttccaatcttcagttcagcctattcagtaaatatttttattttgatactgtattctccagttctggaatttctatttgattctttgttataatgtccatttctttgccatttcctatttcttcatgctttagaagtatgtgcttctgtatatttttgagcattattataatagtttatctgttgcttcagacacctgcatcgcctaagtgctggtttacactgacttttctcttgggaaccaatcacattttccttttcttcatatgtctagtaaatttcgattgtatgttggctattgaatagtttacagtctttggattctgttgtttctctgaagaggtttttgttttgttttgttttgttttttccgaccttttagcaggaagttaatgtggttgaattaaaacttcacattctacgttcaggttttgtagcctctactaggctgcttggagtattccccataccttcagaattcaggggtcagccagagatttgggcagagctccacacagagctctgtagctcgcctctgcagctctttgttctgagattgtcctccttattgatgcttctaagatcaccttaaaatctttgttctaactgttcaatcagtgacactgtgactgcaggtttctctctgtgttttagccaccccttggtgcctgcctgcaagcagaaagctgtaagggcaggaaactcagccaggggtattcctgtggtttctgcctgctttaggtcattctccagtgccatcagatagccgttttgttgtgcttttttcccagtaggtataattatctgcacagagtttgtctgatagtagccattccactattattagaaacccttaagagaaaataaatattttattcattgagtgattgagagggatatttttttacattctctgacgtgaaattaggttttggatgacgctaatggcctctgtcgaagagcaagcatgtgcttctgtatcagccactttggacagcattgcatgctactaatgtccacattggtggttcctggtagcttccctcaaaactggttaacttagattggtcaggagcccaccagagctgagggggtggggtagagagaagaaacgaagttaggtgggcagcaagctttgatgctgtgggtgaggcagagcaagtgtctctgttgtggctggggttactttgttgtgcacttgggacataatggagggaagctaaagccacatcctgacagagttctacatcttagcgttgcagaggcatttccactttagaaatcaaactcgtgtttatgtgtttaaagcagatccagaatggatggtattttcaagttaatgtctttagaaaaaaagaggtaggcaattattagagcagaggtgtgtgtgttggaaactacacaggtttgaagccacaggacttagggttgtgtctgaattctgctgccattttctctctgagctggtaaagcctttccacactgcagaatttctcttatgtgaagtgaagtcaaataacacagttccacaacagaggagtaaacaaaaatgtttgttgaacctgaatccaaaaggtttagattacattttcttgatagtaaaacaaaatagtccaggcattttagcacacctgaccttttcagcctcatttatcccaaccttagccccttcacccacccttagattatccgaagtttcaccagtgttcaagcccatgcctaggaattttatgggaaatatttgacaaagggataaaagtagcctttagcaaatttgttttatctgtcttaaagtatgcattcatttgaatagacagtgtcagggttggtaggaaaaaggatggtagcagaagagaaaaaaaatgcaatttctgggaagtctgcatgtttccagcaatatttaggacttaagctcccgtgaatatcaggacctcaagcatgtgcttccatatcagccactttggacagcatttcatgctattaatccccccattggtcgttcctggtagcttctctcaaaactggttaactgagattggtcaagagcccatcggagctgatgggggtggggtagagagaggaaatgaggccagatgggcagcaagctttggatgctgtggtaaggagttttgactgtcactctgaagcagctctcaggcagaggaatgatgtgatttattgtagtttaccaaggaccgctcagggtattgtgcagagggaagaccagctggaggttcttgtgtcactccgtgaagtgtgggggcggcggag

SEQ ID NO: 24535 - DNA, 2300 bp, Homo sapien
gaggattcacacagtgcttagggagtacccagtgaagtgaaaggagggctcctgggatgggagctcagaggagggcctgtttgtgacattcccatccttgaccgcccccacagctgtgacagccagtgccaacacctggtcctagcagggagggtcgtggacctcacctcctgtgcagccccagcccactcctcctctcctgccctaaggccctagaactgctcatcattcagggagcagaaacagatcccatgttaggagaaagcaggggtcagccccatggcgtacaagggctgcctgggagaggcaggggagcgtccagtgtcttagtccacaccactctggagcaaggcactctgctggttatttgagcagagagaagcatgtgaagaatggtcggctaggtataatgtggttgactgggtaacactgcataagagcagtcctgaagtgcctgtcacagaggtagcagctgcaaaacgtttctgcttctcctagaacttgggaaatgaagagaagaggttggactaactcaaacttaggatcacagggcttgggacctagagctctaagaaggggcattgctcagctggtgctggcatctctggggcttgggatgggagcaggggtgccatgaggttggttctgcaagtgttgaaaaacacacagtaaacaagctccaatcactccaatggcagggcactgtctacctggatgaaggggcattgtggttggtggctgaccttacaggcaatgctcatccacaagaagcccacaggagggcaccagcccccagcccctccctcctgcagccttgcagcccagcctctccctcctgcagccttgcagccctcagcctctccttcctgcagccttgcagcgcccagcccctccctcctgcagccttgcagcccccaggccctccctcctgcagccttgcagcccagcctctccctcctgcagccttgcagccctcagcctctccctcctgcagccttgcagcgcccagcctctccctcctgcagccttgcagcccagcctctccctcctgcagccttgcagccctcagcccctccctcctgcagccttgcagtgcccagcccctccctcctgcagccttgcagcccccaggaattctggattgggaatgctaacagggagcagttggcagtcccagtgacaggatcagattctgtggtcagttcacttccggctccatcactgagccttgataatctagacatgcccagaacatagcccctgccccaggaaagccctgctcctgtcagaggcagccttgtcagctcctctgtaaagaagtcaggatcccctcttcccagggctgctgagggagtggagacagagagcagggaggcccaggcagcctcccccactgacccgcctgcccgtggctctctcggcagctcatcagcgatggcagtgtggtctgcgctgaagcactctgggaccatgtcaccatggacgaccaggagctgggcttcaaagctggggacgtcatcgaagtgatggatgccaccaacagagagtggtggtggggccgggtcgccgatggcgagggctggtttccagccagcttcgttcgggtatggttccaagccccagcttctcccaagttgggcccataaaaagctacctggttctgcagagaaatccaagcccaaaacagctctggcatcctaggtgcagagcactgggtggtgggtgtcggggcgcagtgtcacagccttcctcctcctggagagccactactcctgctcccattcctcttctggtgagccctcgggggccagagaggagagcagtcgagaaatgagtgtgtgcagacactaggcacccctctgcgatacccccgcaactccaggcgctagacatttcccaagccctgaagagcactgataggggactgctcacctcacacacagccccgggagtgggaaccatgacttacacctgaagaagttgaggcacggtcaagttattagccctggagatagcagagaggggacctggattccatctaagggggtctccagtcttcaaggaaggaatccaggtgcagtctccaaaaggcctggctcagggcgtccaagctgagggccgtccggcggggaggtcccaggccctggtgttcagatgctcctcctgccccagatcccctgggaaactgtccactccgcaccctaagcctttccccaagttgcatgttagccagcgggcgcgccacccatccccctgcttctgcccgctggggctggcaggagcaggcactggttcaggaa

SEQ ID NO: 24536 - DNA, 2300 bp, Homo sapien
atttctttttcaagttataggctatttcactgcatgatgaaccagagtttactcagtcatttccctaggtgtggacactagggtttgtttccagtattttgctactatgcacaatgctgcaattaataggtgtgaactcattttatttcacacatctataagtatctctgtaggcaaactcccagaagtgcagctgttgaatgaaacattgtttgtgcgtttattttgacacacatcatcagacgatcccctttcccatccagcaatgtctgagagtgcgagcttcctggcagccttaccaatagcattgtcaattttttggatgtttgccaatcacagtgaaaactgctacctcaaagagttttaacttgcatttttctttatagaagtgagattggatatttttcatatgactaacagccagacttagtcctttgctgtgaactctcctttttctattgggtggtagggctttttattgttgacttctggaagcttttggaatattaaagagattagctttgtctattacatgtgttgggactatttcttccttgttaatcatttatcttttgactttgcttatggtgctttttgccgaccaaagcttttcatagtcatgacttctggatttcaagtaataatgtagaaaagccttctttactccaatactaaaaaggaatttccccatgttttcttcttgtccttttatcacatttatattttatttttatttttttttttgagacggagtcttcctctgtcgcccaggctggagtgcagtggcccgatctcggctcactgcaacctccgcctcccgggttcaagagattctcctgcctcagcctccagagcagctaaggttacagatgtgcgccaccacgcgcagctaatttttgtatttttagtagagacgcggtttcactatgttggccaggctggtcttgaactcctgacctcgtgatctgcccgcctcggcctcctataagtgccgggattaaaggcgtgagacaccgcgcccatctgtttttatttcataaacgactgaaaaaagaccagagccaggcctcctcccttccatcactaatctttattgcaataactccctcctttgtcgtcctgtacctagctcagaccagacgacaccccaaacacaaacaccaagacacgcacctctttaatacgaaataataaacatacctcccccagagagacaccctgaactaaccaaatcattgtaactatacactaagccttacataaaaatactaacatttggccgggtgcggtggctcacacttgtaatcccagcactttgggaggccaacgtgggtggatcacctgaggtcacgggttcgagactagcctgaccaacatggtgaaacccccgtctctactaacacaaaaattagccaggtgtggtggcgggcgcctggaatctcaattactcaggaggctgaggcaggagaatcgcttgaacccgggaagcggaggttgcagtgagccaagatcgcgccattgtactccagcctgggtgacaagagcgaaactccgtctcaaaaaaaaaccaaaaaaccccctaacattctagtacacttccctgaactcttgtctatagaaatgatcccgcacttctacacttgaaacgctgacttgcattctctaaaatctgcactcctgagcgggcgcccgcagcctccgcactggcaaagaatctgtgagctgagctccgccccgctccgaccccgtagtggcggtcacccggggtgtgctcgactcccgggtgcggcctgaggatccgcgccctggcgtctgggcacacacaaaggtttctgcggcgcgggactatctcaaaatataaattaaatacttttttcacagacagttaataaaaaaactacagctacacccggccctttcgccaactgggaccggcccactccgcgctcgcgctcgcgctcgtccatccgggcgtctcgagggcgccggcgggagcgagcacgctgcgcagtcacgtgcccggcgcgcccccgtcgcggcgcgctcaggcggaagtgaggtcggcggctccggtggctgcgcagcgtcggcggggagcgcgggctgcggagaggcgggccgggccaagcggagccgagcgagcgggagcgcggcgtccgggaggcggcggagacgcggggctcggagggtcagcctcttatcgtagcaggtctcctcggcacgccccccttgtttcgccccacggccaagcccgccgcgggccggcgtgcgctggtcactgaggcccaggtcgccgccgc

SEQ ID NO: 24537 - DNA, 2300 bp, Homo sapien
gcagggtctcattcttttgctcaacctggagtgcagtgacacaatcatggctcactgcacccttgacctcccggattctagtgaagcttccctctcagcctctcaagtagctgggactacagatgcatgccaccatgccagtctaatttttttatttttatttttttgtagagaaagtgtcccactgtgttgcccaagctggtcttgaactcctgggctcaagtaattctcctgtcttggcctcccaaagtgctgggattatagacgtgagccatcacacccagccttaaatattactttttcctgttgttgaagtgatacatattcatgaaagaaaacttggaaaatgcagaaaagtagaaaaaagaaatgtcatccacagtcccatcactcagagagaatgtgttagtgtatttttggatactccaaactcagaccctgaaaggtccctaagactgaccctgaaggtggtcagggctagtatagccttaatgagggctggtcaagaagcttgttgatgtcaggcaatttacccgagctcatccagaagcagcggaaccaggaagaaccccatgtcacacaaatctctgaactcttgtgttgactaagctataatatcttgcaaaagatgggattgcaggcatcataggactccctaccctgcattttttaaattttccccagagaggagctgggttaagacaggggccctgattggcagagtttggggttttgaagaccaataataatagggctcttccaatattttttttaagagtttttcccttttaaatttagatataatttatacacagaaaaatgtacaaatcttttttttttttttttttttttttagatggagtctctctgtcgcctaggctggagtgcagtggcgtgatctcggctcagtgcaacgtctgcctcccgggttcacaccattttcctgcctcagcctcccaagtagctgggactaccggcgcccgccaccacgcctggctaatttttgtatttttagtctctgagtatctgggattacaagcgcaccaccaggcctgactaatttttttttgtatttttagtatggacggtgtttcaccacgttggtcaggctggtctcaaactcctgacctcgtgatctgcctgcctcggcctcccaaagtgctgggattacaggcgtgagccactgtgcccggccaaaaatgtacaaatgttaagtatagtgttcagcttgataaagttttacttacacacacgtacccaccactcagatcaatgtatagaacattttcagcaccctaggagtggggttgccaggaggctctctcaagcctctttccaggcagtacccctacaccaccccccaacccctgctaggctggaacgcagtggcttgattgcaggtcaaacttctgggctcaagcaatcctcctgcctctggctcgcaaagctctgggattactggcatgaaccatctcacctggctaacatttattttccctctattgtcttcagaaaacccccaacttttcatctggaataattttagactacaaaaaagttataaagctagtatacccttcacacaatttctcctaatgttaacatcttacataaccattatacatttcttataactaaaaactactattacctaaacttaaattttattttaagtttatagcctagctacatcaccatgttgcatatgacagtgtctcagtttttttcttgcttttgattaccttgatagtttgaggagtactggtgaggtgttttgaggaatatcccacaaacgagatttgtctgatgtttatctttcagttagactgaggtcacggttttttttttaatcacatgtcaagggcaagtgcagtgactaatcactttgattttcacgtggagtggctctacagccctctttccacactgtactcttggaaaggtcgtccccaggcataggccacactcagggtgggtgtggacggattaccacacccctctggatgaggtattattagaattcctctgcaaggaagattatcccttctccctcatttatttaatcacgtatttatagcagcacgggctctgggctgttttatactttaggttataacttaatgcaatgtactttatattgctgctcaaattgtcccaggcgcggcccccggaagctctctgggtagatccctgcgcccttggacgcccggtccttcagttttttgagcacctcaagcttctggcctacaaaacgctcccggctcagctggagctttctgcgcccgggtcctagagtcgcc

SEQ ID NO: 24538 - DNA, 2300 bp, Homo sapien
agaagcttgttgatgtcaggcaatttacccgagctcatccagaagcagcggaaccaggaagaaccccatgtcacacaaatctctgaactcttgtgttgactaagctataatatcttgcaaaagatgggattgcaggcatcataggactccctaccctgcattttttaaattttccccagagaggagctgggttaagacaggggccctgattggcagagtttggggttttgaagaccaataataatagggctcttccaatattttttttaagagtttttcccttttaaatttagatataatttatacacagaaaaatgtacaaatcttttttttttttttttttttttttagatggagtctctctgtcgcctaggctggagtgcagtggcgtgatctcggctcagtgcaacgtctgcctcccgggttcacaccattttcctgcctcagcctcccaagtagctgggactaccggcgcccgccaccacgcctggctaatttttgtatttttagtctctgagtatctgggattacaagcgcaccaccaggcctgactaatttttttttgtatttttagtatggacggtgtttcaccacgttggtcaggctggtctcaaactcctgacctcgtgatctgcctgcctcggcctcccaaagtgctgggattacaggcgtgagccactgtgcccggccaaaaatgtacaaatgttaagtatagtgttcagcttgataaagttttacttacacacacgtacccaccactcagatcaatgtatagaacattttcagcaccctaggagtggggttgccaggaggctctctcaagcctctttccaggcagtacccctacaccaccccccaacccctgctaggctggaacgcagtggcttgattgcaggtcaaacttctgggctcaagcaatcctcctgcctctggctcgcaaagctctgggattactggcatgaaccatctcacctggctaacatttattttccctctattgtcttcagaaaacccccaacttttcatctggaataattttagactacaaaaaagttataaagctagtatacccttcacacaatttctcctaatgttaacatcttacataaccattatacatttcttataactaaaaactactattacctaaacttaaattttattttaagtttatagcctagctacatcaccatgttgcatatgacagtgtctcagtttttttcttgcttttgattaccttgatagtttgaggagtactggtgaggtgttttgaggaatatcccacaaacgagatttgtctgatgtttatctttcagttagactgaggtcacggttttttttttaatcacatgtcaagggcaagtgcagtgactaatcactttgattttcacgtggagtggctctacagccctctttccacactgtactcttggaaaggtcgtccccaggcataggccacactcagggtgggtgtggacggattaccacacccctctggatgaggtattattagaattcctctgcaaggaagattatcccttctccctcatttatttaatcacgtatttatagcagcacgggctctgggctgttttatactttaggttataacttaatgcaatgtactttatattgctgctcaaattgtcccaggcgcggcccccggaagctctctgggtagatccctgcgcccttggacgcccggtccttcagttttttgagcacctcaagcttctggcctacaaaacgctcccggctcagctggagctttctgcgcccgggtcctagagtcgcccatttctctaaggcgccttggccctatttttagagagcggtatttagaaaccaagattagggtgctaacaatttttttttaaatttttatatttttaagacaggatctcactttgtaacacttccttttagtggaagcgccgacctcctgggagacccacgccccctgccgccttccgtcccgtttctcagaaaaccacccagacaccccgccccaccggccggggcccgccgcgcatgcgcgccgaggcgtgacgtcagaacggcggccaggacgccggacgtgcggcagttgcaggcgagcaggcgaggaatcgccgtggcgtcttggtgttctccacgctggttcgcaggtgagtgtccctgtttagtccggacgaccctagctcctttcccctctggcccgcgcctctccagattctcctctagagctgcccagcctcgcgcccctctgaggggaccccgcaccgcgccacctccgcggtgtccccactccctaattttcc

SEQ ID NO: 24539 - DNA, 2300 bp, Homo sapien
tctccagattctcctctagagctgcccagcctcgcgcccctctgaggggaccccgcaccgcgccacctccgcggtgtccccactccctaattttccctgaggctcctggccacgggtccgcccacctccctggaccaccctgaccttccccaggtccgccctctcagtctcccctagagcagcccattcgagagccctcccagtgggcccccccggcctctcagaccccttcccatcgcttccccggcgtccgcctccggtcctttccccgagcccctcctctccggccccgcggaccctcctcctttcccgactgcagcctccgccttgcatcctttctggccgctcgggagtgtcccacatgtctgactgccgggacctgctgcggcccgccgcctggggtctcccggcgtccgatctctacccctgctgctccctctgctccagggaacttgccttctcagttctcctgcccagaggtctcccctccttaagtcccggggggcgttgaggctttaccctcgcggtgcggtccgcccccgctgcatttcacctgctcttggccttgcaatgtctttagtcataagtgcttggtgtaccttatcttacatatctctcttcatgtttgattctgttactcaactagattgaaaactccggaggtcagggatttgcatagggatccccgccccgccaccccgcttaaatctcaaatgtagaccggttcagggtgggtggaggaaaggaatgaggtggagtggtcactgtaaaaaattaaaggaacatggttaattcaaaataatactgactcatggtctcagcctttaaatttttagtgcttaggaaagggtggaaccaccaccgagggaggagggctgacagctgaggggaggaatattccaaggtcttctgtggcctttggtatgaaccagtaccaattcaggaagtgacttgtccgaagtcacatgaggaattaggacccgagctggcactggtaactgcctgtttagtgtggccctcagtatttgttgactaaactaatgaccaaaacatgtatgcacagacacagctgtgcgtctgtgcccatgcagtgggtgtgtctgcctaaggacctgtgggggtgtgggaatactgctgtgacggttcaattgtggtgctcaggagtgttccctaggttcagaaagttcctaaccctgggctggttggctggatattgataggactggagcttgtctgggcttcctttgtgcctggtgtttactctctgtggtggtgatctctttactcgactcttccctattcgtactgatctccctgaggacaggaatcaaactgtgttgcagggtttccctaataaacagcatagtgtttggcactttgtaggtggtcagtaaatgcttattgaagaaggctgcagaaaagaactcagaacctgacagcggttctttgctagcattatattttaaaggcggtggtacattctgtaagtaaatttcctgctattctcaaggactgagttgattaaatgtgtacagcagtggtatagagaggacagatactcttgtggtgttactccttgggaaggtggaggtttctctcagctctttctgaaagctttgcttatgcttttcagcttgcattaatatttttgtttctcctttcctctgcctgccttcttactgtttgtctaaagaaattaaagaattaccttattaataacagtaactaccaaaaactgcaaaacacactgttaaaaatgctcccaaagtgggggctaattgacccagttgttttgttagttatatatttgcttccacagtggatcatggaaacggaaagttggacttccttgcctctttgctttctttgcctgtctgccctttgatggtgcttgtattaggcttgttgttaagaagtggttcccaactggaaatggccaatgccacgtgggaactgacctctacatgttgatgggtcacccaaccttctttcccttctgtttcagaatgtacctgtgacatctctttgactctccactgttgcccttgaagaacagagatgagttttcttcctttttcataaggaagccacttttatagcgaaagagagctggagaactgggatatcatgaggagttgtagacagttaaacctgaattctagcttttggaacaaaatagtaatgtaattgtagcagttctcacttttttattttttatttttttgagacggagtttcactcctgttgcttaggctggagtgcgatggcgcagtctcggctcactgcaacctccgcttccc

SEQ ID NO: 24540 - DNA, 2300 bp, Homo sapien
gaaatctcaggatccttaaggttttacctaaaagtctcttttaactctttatcggccaggcacagtggctcatgcctgtaatcccagcactttgggatgccaaagcaggcagatcacttgaggtcaggagtttgagaccatcctggccaacatggtgaaagcctgtctccactaaaaatataaaaattagctgggtgtggtgacacctgtaatcgcagctgcttgggaggctgaggcatgagaattgcttgaacctcagaggcggaggttgcagtgagcctagatagtgccattgcactccagtctgagtgacagctaaactccgtccaaaaaaaaagatagcaaatgtagccaaattaatatcaagaaccattagaaggctgggcatggtggctcacacctgtaatcccagcactttgagaagctgaggcgggtggattgcctggccaacgtggcgaaatcctgtctctacttaaaatacaaaaaattagctgggtgtgatggcacacgcccgtaattctagctacttgggaggctgaggcaggagaattgcttgaacctgggaggtggaggctgcagcgagcggagatcattgcactccagcctgggcgatggcacaaacaaagaaacaaacaaacccattagaaatgtaaagaaattgaccacagaagttcaggagactcctgttactccacgtttttatattcactgtgtcctgtaaccgcctgcgaagttgcatggctgtgtttcagtcaggttttgtatttgtcatgactacgtagttctcagtaccttttctagtaatttttagcctgttctcatttttttttgtatgaaatatactgggaattcacattatggatgcaggaagctgtagtatgaatataaatatctaggatttgacgtgaatgcgtacgtgctttgccctctcatttttttgtgttctgggttaataaccccactgcacagatgtgatactgtctacaacattccttcctttttgtttcgcctgtttcttctgctgtactaagctacatgagagtagcattttggcttggtcactgctgtatccttagtgtctaggacaaggctggacacaagtaaggtgttctaagaatatttaatgaaaatatgatgctggtagttctctgcttcaaatccttttggaagtaaaatgattgttttaggatattttaggctgtaagttgcaggaaaccaaattcaaccatcttaagtgataaacccatcatgctgcttagtagaaagtcttgggtaagggtgggtttgggggttggtgaagtaagtggctcagcagtgtgagctctgctgtctctgcgtcagctgcccccagccggttcctcatggtcagaaggtggctgccagcacagtgagcagcagtgtgcttccctgttaacatcatcttagagacagggagactggcttttgtttgctggggattgtatgtttgagaacctaaatgtggtagagaaagattggggaaaaatgaaaaacatttcgtttcttggtaaggacagatagcatgaattgaaaaaaactgcaaagagagcaagaagcttcagcgtgcatgattttggagatgccggagtatggggtgactgaggcttgtggcactctttttaaaggtttggagaaagatgagaagtcaaccatgcttagatatggggaaggagctacattagagactcatttgttcttctgaggtgcccacttgcgcttgtgctaaccttaccaaccttagtgccttaaagaaatagctaaaaaagctaaagcaaggccaggcgcggtggctcatgcctgtaatcccagcactttgggagaccgaggtgggcatatcacgaggtcaggagatcgagaccatcctggctaacatggtgaaaccccgtctttactgaaaatacaagaaaaaattagccgggcgtggtggcgggcacctgtagtcccagctacttgggaggctgacgcaggagaatggcgtgaacccaggaggcggagcttgcagtgagccgagattgcgccactgcactccagcctgggtgacagagcaagattccgtctcaaaaaaaaaaaaaaaaaaaaaaaaaaaaaaagctaaagcagaaaacaaaagtggcccatggtctcagcttccagataataactattgatttcaaaaaataaaatggcctgggtgcggtggctcatgcctgtaatcccagcactttgggaggccgaggcaggtgggtcacctgaggtcaggagttcgagaccagcctgaccaatatggtgaaaccccgtctttg

SEQ ID NO: 24541 - DNA, 2300 bp, Homo sapien
acagtatatttccagttgtaaattttaatcttgcaaattaaatactaaatttgtctgtggtttgtttttttgaagttttcacctctaacataaatatttattttttctctataaagacatgcagtaaaaaagagtaggccgggccgggcgtggtggctcatgcctgtaatctcagcactttgggaggccgacgcgggtggattacgaggtcaggagatcgagaccatcctggctaacacggtgaaaccccgtctctactaaaaatacaaaaaattagccaggcgtggtggtgggcgcctatagtcccagttactcaggaaactgaggtgggagaatagcttgaacctgggcggtggaagttgcagtgagctgagatcatgccactgcactccagcctggggacagagcaagactccttctcaaaaaaaaaaaaaagttatatgtgcagatttaaggcttaatttaaaaattggtttgcgtgcatactaagaagctcatttgctttaagtgagcatttcctttttgggcttttgttgggcactgtgtgtctcccatgttccccatttgtctgccacccaataagcatggtgtcgagggctgaagtagaaatcagaggctagaatctgaaagcttcattagggttctgctttttgcagattagggactttggcccttagtgagctgaggatcttggtttcctcccagtgtgcggtttcagggatgtcggccacatgatgtgcctgttgtggaggagggctgggtcgccagtgtgacaggagacagcagatcccttttgtgaaaggagaactggtactttgcgtgatgttaaacttcacaaaccgctgctcagaaatctgctattttccttctcttttaggactttatggacagcagcctgctaaccaagtcatcattcgagagcgctatcgagacaacgacagcgacctggcactgggcatgctggcaggagcagccacgggcatggccttagggtctctattttgggtcttctaggggcctcaaggtcttgatgtgcatagcttctgataaccctgtgtgcaataatatgatttgcagggcatttctgtttgtgacaaaagtttttaataatagttttaatcattcctttgaaagtagtgatgtcataattgtactaatccacataagtaccacagagaagggtttgaactgtgctattttgttcaaatgttgactctccgggggcactggctcattccaagactgttcttgtgcaactctcagaataccttatttgagcatacctgttttgaaaggcattttctttttagagttaggtgtagtgcttaagggttaatttattttcatgttatgccagtaatatagtgttgtatgcctattgagtgattgtggcaagaaaagctacagcttctttgcgtttaactttttcaaaccacagaccagaactggttgcatgttactttaggagttgtgggttggtaagctcccaggtacttcccgaggctatggtgtgagagcccccgtcctgccctctggggctccacaggcccctggcaaggccgatggctcaggatgatggggcacagcccgcctttgaacaatcatgcttcagaaatctgcctgaccctagctgctgctgctgctcactttattcttgtatggctttggtaggcatacttggagaacatatcccacattaggaattgatttaagcctgagagtttgagggctttaatcctttaaaacttggagaagctggctgggcgcggtggctcacgcctgtaatcccagcactttgagagaccgaggcgggcggatcacgaggtcaggagatcgagaccatcctggctaacacggtgaaaccccatctctactaaaaatacaaaaaattagctgggcgtggtggcaggcgcctgtggtcccagctactcgggaggctgaggcaggagaatagtgtgaacccaggaggcggagcttgcagtgagccaagatagtgccactgcacttcagcctgggtgacagagtgagactctgtctcaaaaaaaaaaaaaaaatcctggagaagccagaacaatatacaaacaagtatgtggaggcagatttgctttattccaagaggctgtttgagtgtgtgtctgcctaagcctccttatagcctatttttctacttgctgagagagtaatattaaaggaacagtgagggagtggaaggagagccttagttagagcgttcccatttctggcctttgggggtttgcactgtgcgggagatgctctctcatcactctgaaggcccatcc

SEQ ID NO: 24542 - DNA, 2300 bp, Homo sapien
ttcaatgctactcaaagcattctacagattaaatgcaaccgctgtcaaattccaatgtcattcttcacagaaatagaaaaattagtcctaaaatctgaatggaaccacaaaagatgctgaaaaaccaaagcaatctttagcaaaaagaacaaacctggaggcatcagactacctaatctttgacaaagcaaacaagaaaatgggaaaggacaccctattcaacatatgctgctggtataattggcaagccacatgcagaaaaatgaagccgttcttcaaaggttaaatacagaattaccacatgactcagtaaattcactcctatgtatacaccaaaaataaattaaaacaaatgccttacacataaaggtatttatagcaacaaaaagtaggaaacaacagaaatgtccatgaattttggagtggattaataaaatgtggtctgtccataaaataaaatattacttggcaatgaaaaagaaaaacatattaatacatgctccaaaaaggatgaacattgaaaacatgataaatgaaagtagtaagtcacacgtaactatattattatgattccacttacatgaaatgtccagaataggcaaatccttccagaataggcaaattcttaggaagtagatggatgattgcctagggctgggagaggtttaaaggaagaatggggaaaatagggaaagattgctaatgggtgcaaagtttcttttaaggagcataaaaatgttctaaaatcgtggtgattgtttaactagttaatacacttaaaaaactgaattttatactttaaatgagtgaattaaataatatataaattgtatctcaatgaacctgtgaaaaaagttaaaaaatatgtggtatgcataaacaaaaagttcttcattttatttcctagggttttggggaaaaggtggtgtttgattatatgagtaagttctttagaggtgattcaggagattttggtgcacccaacacctgtgcagtatacactgtatacactgcaccggggcaggagctggctgcaatcctgtggccccaaatgcccccttgctgatggcctcgtgttctgggtgcggagcaaagaggagcaggtgttgaaggcacctcaggcaggccctgggctcggtgggcgtcttgtgctccgcgattttgaggccatttgcagccagctccgtcagcccgagctcccagctgcagctgctgccatgcacaacagcaccgccaggagtgtcctgggggcttttttcaaaggaggctgtcagcatcctcaagttccagacgcttagccccagtcctcctttaagaggcttttttttttttcaccagaggcttctcagtggcttgaaagctcagctgactcccacgaagtttgccggaactcaaggctgtcagtgacattcgtggcgccaagacttaagcaggcgcgttgcatgcatcggccagtgtctgtgccacgtgccctgacgccacctgagataagcacgccgcacgccgcacgccgcacgcgcacgccgcacgcgcacgcgcacgcccggcagcagcttgctggcttgtaacggcttgcacgcgcacgccgcacgcgcataacggtttggccggcctgtaacggcttgcacgcgcacgccgcacgcgcgtaacggcttggctggcctgtaatggcttgcacgcgcatgctgcacgcgctttaacggcttggctggcctgtagcggcttggcttggctttgcgttcttggcttggcttggcgttggtagcttggattgacgtttcctgcttggattgacgttttctctctcgtgttcctttgctgggcttgaccttttctctgctgggtttggcattcccttgggtgggctgggtgttttcttgggggcgggggttggccctttctggggttggccctttctggggtgggcgtggggtcgcccagggggggcgtgggctttcctcgggtgggtgtgggttttccctgggtggggtgggctgggctggaatcccctgctggggttggcaggttttggctgggattgacatttctcttcaaacagattggaaacccggagttacctgctagttggtgaaactggttggtagacgcgatctgttggctactactggcttctcctggctgttaaaagcagatggtggttgaggttgattccatgccggctgcctcttctgtgaagaagccatttggtctcaggagcaagatgggcaagtggtgctgccgttgcttcccctgctacagggagagcggcaagagcaacgtgggcacttctggagaccacg

SEQ ID NO: 24543 - DNA, 2300 bp, Homo sapien
cagaagtgactggttgctctttgagccagcttggccttgcctggcatgcacaagcctcagtgcaacaacagtgctacaaatggagcgacagagaggaaacgagtggcagacttaggagcagggtgtgcgctgcctttggggctccagtccatgcctcgggtcctatggcactgcgggcttcatggttgccaagaggcagaccacaggccgtcttgaggaagactttatgttgaagtgcagaaagcagccaggattaccactcaggggacttggccttctgtggccctggccagactcagaatttgtgtcacggcaggacaagctcactcggagcagcgtgttagtacctggggcctgtgcatgccaggaaaggccaagctggctcaaagcgtaatcagccacctctacaagggtgcgcctggacctgttggaccagccaccagcttcacccactgaaggaagccgggatggccaggttccagcagcctgagtggctgtctcctgatggctgatggagcagagtccttaggaaaagcagatggccttgtggccctacctttagggtagaagtactgatgtgccatgtctggcagcaagtgaggttggtggctggtgcaccggctcctggcgcacccttgcagaggtgactggttgctctttgagccagcttggccttgcccggcatgcacaagcctcagtgcaacaactgtgctacaaatggagccacagagaagaaatgagcagcaggctcaggagcagggtgttcgctgcctttggggccgcagtccatgcctcaggcatcatatggcactgcgggcttcttggttgccaagaggcagaccacaggccatcttgaggaggacttcatgttcaagtgcagaaagcagccaggattagcatctaggggactcggccttctgtggccctggccacacttagaatttgtgtcaaggcaggacaagctcactcggagcagcatgttgctacctggggcctgtgtatgccaggcaaggccaagctggctcaaagagcaaccagtcacctctgcaaggatgcgcctgtcgtctggaggttggtggctccctgtgttagtcctccaagcccatattttccttctgcactgccctcgcagaggtttctgaagaggctctgcctctgcagcatgcttctgcctggaaacagtgggaggtagttttgcagggtggaagccttcaccagtggttaagcaccatcttcatgatgctgacctcgtgatagttctcatgagatctgcttgtataacatgatgtggcacctctttcctctctgtcttgctccttctcctgctgtatgaaacatctccttgccccttggtcttctagtatgattgggaggcacctgagtcctcccagaagcagaagccactgtgcttcctttgcagcctgcagaactgtgagccaatgaaacctcttttctttttgatcatacagaaggttagtactgtgaagtgaagctatgaaattccttcaaggccttttccctatgaaatgccttcaaggccttttccccattgtcttggcaagcagcactcagcttcttttcatgcaaatatctgaagcctgtgtgaattttttccctgaaaatggacttttcttcttttaccacattgccaggctgtgacacagagagctgataatgtagaagcaggttcagtagtgggtaaaagacagaggtcgggagagttgggaaagcttaaaagacagcaagatgaggaaaagcttggacccctgtagagaattgttaaatacttgtgatcagaaggctgacagaaggatggacagtgaaggccagacttaaaagttctcggataaaaatcaggaatttcctgtgaataggagccaaagctacatttgatttgcccaacagaggctgcacagtgaccttgccctggagatctgtgaaactatgaacttgggggtgatgatttaggatgtatcttgtggaatgaacatctaagcagcatagctcaagaggtgtcctgtctgcgtcgagcagcctgtgttatgtatgagctaagaaaggacctcaagttggaacttctacttagaagcggagctcaaaagtttggaaaatttgcagcctagtcaagtggtcaaaaagaaaagctgattttcagggcgaaaattcaataaggcttagagtatttgcataaaaaggaggttagtgcaagtgtccaagacaaagggtaaaaggccttgaaggcatttcagagacctttgcagtagcctttgctctcacaggccctggggcctagcagagaa

SEQ ID NO: 24544 - DNA, 2300 bp, Homo sapien
agatgagacagtgctgcccagggcgggtgtctgggacctgacaacattcccccagtgattgaccacatcacacgtccagggtccagtgagcctggcctcagacgtgcccagtacactgaaggtgcacctggagcccactccacctgatgcctccacagccctcgcagggcctgacctcccagcatgcacctgcctctccctgcaccccagctgtccaccatgcctgttccctcacttcctccatcctgtccagcgggatgggatggacatgggaacagcctgtgtgcacatttcgtggcgagtgggaatgacacaccatctctgggaggcaccatggttcctggcaaacccgatcccaagactttatccttgaggtggttttaccaaaccccaaacccagaactgcggttgtggctcaggggtcagctcctgctagtgccaggacactactgggaggctgggacccgaccaaagcccatggtgtctctggcctgaggaccaggtgtcttgggaccataaggccaggccaccaatggccattgggtcataggggctcagccccaatctttgtccttccctggctccttctgattcagtcccatcagggccctggatcccaagactcagcatccaaggtcccctccaggaatcctggcagctcagcatactttatcctgtttcatctgagagcaaaaatgtaaaattggatgcacagaaaagtgactcaaagtgcttaatgactagaagaaatctaggagcagcaagaaggtaatgtggagggagggacctccatgaccggtgtctgtagagccaggggtacaggcacccagtgctgtggcctggcaccacctgcatctcagagggtgggtggcacactccttaaccagaggacagcaggcctggtcaccagcttttctacctgtccctgtaagcatcacattgctggaggaaaatctcatgccagagcttggaccatcccctagctcaggggttaggggttgtcccttggtgacctaaatgaaaaaacaggtccagaacagagttcctgatgctggacactcattcagtctttgaatcgtgggaggggaggcctggtactaggtagacctaacctctttgaggaaccacagagcccaaggctggaaacctccagaatcctccacccccttatcctccctggggacccctgtggcctgtctcactgagcactcttccatctgtagatgtctgggctgctgtacaagggagtcccctttcaggtgtggtgctagacatggtcactcctgctggatgtctaggtggtagaaaccaaggacctagggaaataccaggtacagcctttccacgctcatccagagcaggacaaacaggccaggcggtgtcaggagcccaggtctccagctggagggaacgtcaaccctgcagtgggagcaggggccctttgcacatcctaggcacagatggtaatgtagacaccacaggtaagctgggcttggtacctacccctccccggattcagaaagaaaccaaacaaggagctttgtgtggaatgaaacctcctttcctcccagaagcactgctgattgtttggtggttgccatttgtggcagtgagcccttgtttgttctgaggttgggctggtttctcctcttggccctgccctacagatcataaaggagaacagcaagacgtccccagcaaacatccacagatggccttggaaataagtcaccttgtgagaaacatgtcatgttctgggagggataaggcatcaagtaaggcctatggggttggaggatccctgggcaggtggggcaatccttggggtcttcccatgggaatagggaggtcctgaggcagaggcaggggttccacaggaggagtcacagagctaccaagggctctcctgtgccaggaagcagtcaacaccatgaactgaacacctgctgggctccaagccctggtccaggctggggcatgtggggccaggaggcagctcagagagggaggcagagagaagtgtgctgagagggcacccatttctgggtgtaatgtggtccagagattttggctgggaagggcttccagagtttcatatgtgttacggagctgcttcctctccctagcctcaccctgcaggaatgccagtgaacatattgctgacatcttggagctcagtaccctcatagtgtaacggcgtcagtagatctgcctgtgctgggacttcctgtactacccattcctgaggggcgatgcttctgcagggcctgtgacttggtgcacaacttcagacaccatca

SEQ ID NO: 24545 - DNA, 2300 bp, Homo sapien
tttttttggagacagggttttgctctgtcacgcaggctggagtgtagagacatgatcttggctcactgcaacttctgtctcccagattcaagcatctctcgcctcagccttgggagtagctggggactacaggtatgtgtgggtgagtctgggtgtgggtgggtgagtgcaggtgtgtctaggtgtaggtgggtgagtatcggtgtgtgtctgtgtgtaggtgggtgagtatgggtgtgtgcgggtgtgtgtgtaggtgggtgagtatgggtgtgcaggtgtgtgtgtgtgtatgtgtttacattgtggtatgtgtctgttgggtgccgccgttagggatttggaagagtgaggaccataaacctgtaaacatttctacatgcctgctccacaacaagtgtaccaagcatggtcaaaagtaactaaaccaagtaaacaaattagacattaattaaacttaatgctgggcaggaaagaagtattcaaggccaggtaaaatgaagaaatataaccaaataaatgaaattttaaaattagtagaatgagacagaaatatttttaaaagtttttaatttctggtgaatatcagtatataaaactaagaattatatggctgtcaattgactaaaaacagtacttaagatttcagctagtgaaatagccatatatgatcttgtaattccatttttctgtctcaagaatgacttgtttaaataattttttttgaattgttacattgtcatcttgaaagagcttcacaaaacttacatgagaatctggattgtcataagaggtctgagtttttaatggtatgttcgtatttctgttatgtacattgatgtcaaacattcatttcctgagctgttctccagaacacaatttgacttataatgaacactcaataaatggttggttggataatcaaatcaacaccttagtttcatcaattttcatttcatataaaagtgactgatcttctatactcatcaatgaaacagagagagatgagggagggatagcagtggagactaagaggatgacaagcagacctcattctgcagtggatatcctacactctccacttctcaatgcttggaaacacttgccatactaaaaaaattggtatttcctaggcagaaaatgggagttaaagaaagtccatatttctatactacaataacttacactataatacatggacgacatacatttctaagctattcacttcatagaaaatgcagatacatttaggtgagcaagatgcaggagaagggttaataatcaggctgagtgtgattgtgagattcagtctaatatcttgatacaattcttgtgtaattgtatcagttgacatatctgttcaaatgcaaggcgggagagttttgcaggagctcctgaaacttcctgcatgatgttaggagacaggttggtccatgtgattaggccagatgtgtttgcttaattgtggcttaggaaagttaagtttctgacctctcacagaaactgggagatagggacgctaaattttataacatttctgtttaatatatatttaataatacataataaagtctttaaaatgtcaattttgtcttttttctagtttgcaatattttgttttcaccgccccattgtttttagtacatatgttttgtgtatttaaaaaaatgtgtggaggcgccctggctcgccccgcgccagaggctcgcgcactcagcaggttgggctgcggcggcggcggctggggaagccgaagcgccgcgcgtgagagatcccagatacgtctgcggttccggctccgccaccctccgcctttctcccgcaggtcttggagccgggtgaggaagaagggaacggccctagccttgggaagccaaagcacacccctggctcctgccgacaccgccctccttcccttcccagccgcgggcctcgctcggtgctcggctactctgccgggaggcggcggcggctgccagtctgtggagagtcctgctgccctccagccgggctcctccaccggcccttgcaggggcgcagagagctcggcgcccgcccttccgctcgcctttttcgtcagccggctggagcagcatcggtccgggaggtctctgggctgaggcggcgacagctcctctagttccaccatgtccgcgggcggagacttcgggaatccgctgaggaaattcaagctggtgttcctgggggagcaaagcgttgcaaagacatctttgatcaccagattcaggtatgacagttttgacaacacctatcaggcaataattggcattgacttttta

SEQ ID NO: 24546 - DNA, 2300 bp, Homo sapien
ttggaggaaacagagcccaaagatactacacatggatgcagattttcttcctcttaaaaatgcaaggtgcttcatgtctgtctctctcttttgtaaaattcatgcacagactgcctgtgagacattggaaacgcaggtaccatttctgttttacagcggaggaaatgactgtttttcccacacccatgcagtgacagcctctgttctccctgttactgcctgagcaaaaccaggaggggacactcaggagccttatattgtccagggactgttgggagtgctgattcccacatgcgatccagcacaggaaggcacctgtccataggaggagggagaaccttccaccatctgcttgaggaacctgacaatctctggtgtctgcttgggaggcatgaggacattgggctcgtggtgggccagcagcttggctgctctggtgctggagaggccctgagaaggccaagcaaaacacacgcacaaagagaaataggaagcagacatttcttctccttcgggggttgggctgcatatttttgcagcttagggttaggcatccatgtgcccaaagaaggtcctgggaaaagggggccatgcctcatccctccagctgcccaccctttttgaaagaatatgtaatgcttaataccagtcaggcaatatgctgtgtatacttccttacttattcttcaaaataaccctccaaggaagggaccatttgaggttatcagaactctccatttagaaaatcattctttacatcctctccagcacctattgtttcctgactttttaatgatcgccattctaactgctgtgtgatggtatctcattgtggttttgatttgcatttctctgatgaccagtgatgatgagcattttttcatgtgtcttttggctgcataaatgtcttcttttgagaagtgtctgttcatatcctttgcccactttttgatggggttgtttgtttttttcttgtaaatttgtttgagttcattgtagattctggatattagccctttgtcagatgagtagattgcaaaaatgttctcccattctgtaggctgcctgttcactcttatggtagtttcttttgctgtgcagaagctctttagtttaattagatcccatttgtcaattttggcttttgttgccaagggaattgaacaatgagaacacttggacacaggaaggggaacatcacacaccggggcctgttgtgggatggggggagttgggagggatagcattaggagatatacctaatgttaaatgacgagttaatgggtgcagcacacccacatggcacatgtatacataggtaacaaatctgcacgttgtgtacatgtatctaaaacttctaccctaaaacttaaagtataataaaaaaaagaaaatcactctttatatattttcaaacaacacattggtaaacatgtaatgctgcttttttcagcatctccgagtgaatagccagtctttcatatacacattgacagagaaatctctcaatgaactcagaaattcagaaattagtaagtatgaaaacttagttgcatagagaaaaacagtagataacatagatagctgataagagaagatttcatacagttactgtgagatattcttagagattgacttttaaaatttgaatttatggtaaggcattttaaactttaatctggaacaaatttaaaatttctgaatagagaaatttctgatgactcaggaatagtaaaaatgggtggggataatgtttcaaatcaaggaaggaacctcattttattctgaacatactagttttgactgttttcaccctgaaattttcactactaaatatatttgaaagcaagtcttttttccttaacatttgtttcatacacagagaataacactgtgggtctgggattcagattttgaaatgaagcgtggactctgagtggccccttgtccttgtgaaagtgcactggtctagagagcggcagttggaccccagagtgtggcacgtgttcctgtgttcatttgaatattctgtgatgacctgtcacggaggtcatgtgatgatgtatatcctgccctccatcccaactgccactgggtttcaactgccacctgggagactgctggtaaagatgggaggtggcctttgccgctttccatcttctcactgcagtttcttcacgtgggccacttgtacttaaaatgtcttcttaatttattctttttacttccccagctccaatttgtctacagatttacaaatttgttttatagttttatgactcaatttgtattttcggtcc

SEQ ID NO: 24547 - DNA, 2300 bp, Homo sapien
ggtgactgtttaaaggcattttgttcctgactagctcaacccattatcttcctgttcctggaatttgtgataccaaagacaatgtagacaatgtagagacaataaatagctttttttttttttgagacagagtctcgctgtgttgcccaggctggagtgcagtggtgctatctcggctcactgcaagctccacctcccgggttcatgccatcctcctgcctcggcatccagagtagctgggactgcaggcacccgccgccacgcccggctaattttttgtatttttagtagagacggggttttaccgtgttagccaggatggtctcgatctcctgacctcgtgatccgcctgccttggcctccctaagtgctgggattacaggcatgagccaccgcgcccagtcttcttcttcttttttttttttttttttttttgagatggagtttcactctattgcccaggctggagtgcaatggtgtgatcttgactcactgcaaactccgcctcccgggttcaagtgattatcctacctcagcctcccaagtagctgggactataggtgctcaccaccatgcctggctaatttttgtatttttagtagaggaagggtttcatcatgttggccagactggtcttgaactcctgacctcaagtgatcctcccaccttggcctcccaaagtgctgggattacaggtgtgagccaccacgcctgacccaataaatagcttacgttattttcatataaattcctcaggctaggccagccaaggtgggaggatcccttcaggtcaggagttcaagactagcctggacaacacagcaagacttcttctctaatttcaaattcttggtaaacaacttaggaactgcctcttcttttcctttataaaacccacttataactgctgccaatatattaagacaacttgcatctccagggttgcacttctcaaacttggcccaaataaactctatttttttttcaagatggagtttcgctctgtcgcccaggcttgagtgcagtggcgtgatctcagctcactgcaacctctgcctcccaggttcaagggattctcctgcctcagcctcctgagtagctgggattacaggcatgcgccaccgtgccttgctaattttattttatttttttgtattttttgtaaaaacgggcaaggtgggtctcaccacgttgcccaggctggtcttgaactcctgacctgaagcagtcctcctgccatggcctcccaaagcattggaattacaggcatgagctggtgtgcctgacccaacgtctccacttacgttaattttgcctcctttcttccttttttttttttttttttttttttttgaaacggagtatggctctgttgcccaggctggagtgtgcagtggcccaatctcggctcactgcaacaactgcctcccagtttcaagcgattctcctacctcagcctcccgtgtagctgggattacaggtgcctaccaccagccagggtaatttttgtatttttagtagagacgggttttcaccatattggccaggctggtcttgggaactcttgacctcaggtgatccacccgcctcggcctcccaaagtgctgggattgcgggcgttagccatcgcgcccggcccgttttctccttttgggtcacaaaagtgattgaatcctgccacttcccaggtgctgggtgggaacagggaagagggggataattgcggtgctgctgtgacttgggtagatggcggcaaggcctctcagaggtggccttgtttgcaaagatctgaattaggcagggagaggggcaggcctggggcaatcagggaggggcagtggcacactgggagcaaggcaatgttccgcgacccacagaggcagcgcagtagctgttccaaccctggtcagaagacaccccggaaatgcctcagcaaccgcgcagcctttgatgacccccgctgccttcccgccaatcctacatccaatcagagagcgtccccagtacacatgttgagcaatggccaatcagaactgggatccggccctcagcccgcctcccaggaactccgagccaatggcggcctggcaccggcgggccaatcccgtgcggcgcgcacaggcaggaggttgcagttgggcgctcagcagctgtggcagccggttgaggtctggcagtagcgttgggctgaagcagcggagttcgccatggtaaggcccgggtcactcccgccccgcagatgcccaggcagacgaagttggcctcgggtggacagagggacgttgttgcgggcctgggcg

SEQ ID NO: 24548 - DNA, 2300 bp, Homo sapien
gggtgcccaggccctggcacttcccccatgaaggcagcctgctttccacgccttctcatgatgcctgtgagggtctcctcctgcttccaggcagggagccagctctgggcctccttccattggcctgggaggttgtgctgcatttcagagagagccatcgggagcagaagcaacatgcggagaggatgagcagggacggaggctccaccatgacactctcagtcccagcatctcctcagcccagtcaccacactggagagggaggaggcccttcagaccccgcaggcctctgcaccctgggagttccgcgtctaactctcttcctgcaatcatcagaggcaggaactgggcccaggtggggtaaaggcaggaagacgtctgcctgccctgctccctgggcacttccctggatgctgtataccacaggacagagatcgagactgtcttttgaaaaacatttagagacaggatctcaccctgtcacccagactggtctcaaactcatggcctcaaaggatcctcccgccgtggggtcccaaagattataggcgtgagccacggcgcccagccccaaaccgtcttgattcccgactttgtaggatgaaggcctgagtgaagaggtggggaggagctaagcggaggagccctacccagcctggaccaccctggggcacgcactctgcgtccacctgacctggacgtgcctcctaaggctggcagcgaagcccaggagcagagcccacggatgggccctgcaggtgctgggcctagaccgaccgacagacaggcctggccactcagggccacgccgccgctgtgccgcgcctgccccctccccgcccgccacccccgccactggggcagggacagcgggcccagctctgacctcgggtctcgggcacgctcgacgtgggcagagacacggccgcagggtcctggggctcgctcgctagcctctgcccggcacacatggacttgagcatctggaagacggcgaggggggccacgttcagcttcagcaggtccaccaggatcctggcggggacagacgcggggccggtgagccctctccgcccggcgcggccacctccctgaagaccggacaaggacgggggcgggggcagcgggggctcctcccgaccagcgggccgggcgtacccggagagcagaggtcgggggtgtctggcgagcatgcggcccccacccgccccgctcacttgaacacgtcggggtcgataccgccgcccgccgcctgagccagctcgtacagctccatctcctcggtgctcagcaccttcttgcgccgcagcgccagcttctgccgggccgcctccagccccgggggcgccgccgaccccggcccaggccctacgccctgcgccgccatccgcgaggcccgccgaaaggtgcgccccgccccgccgcgccccctagcggatgcgcccaccgccctctccctgcagcgccagcgtctggcctcccgggctgccctggcgggagcggcgggagcgcggggacggggccgcctcctcggcgtcattggagcccaacagttagtgggcgctcacggtgtgctgagcggcgcgctaggcgtcgggagtggcatggcggactgcaggggccagctgcttggcggtcagggcgtccctgatagacttgcattggtcgtgctcgcttaggtggcagcacccagcccagtgccaggcatacattgggcgctcagtcaatacctgtttcaagaaagcgtgcaattttctggtccgcaccggtgcaccactaggggtcgctcttcggggggggtggggggcactaatcaacaaccctgcttacgcgcacgcgcattccttgctagggagaaagtgcgtgagccctaccttggggcgccagaggccgccacaacgcaggcgcattcagctaaggaccactccctccccccgcactcctgcctcgccatttcccctccctggccggccggccggccttcttcgctttgcgcacgtaccttttgaggtaacggcccaaagaggtagaagcgcttttcccgcccggccgcggggcgtggctctgcgcgcagcttgatgacgacgttttggcgcggtggcggaatggcggcttccacctctgaagcgggcgacgctatgggtcccacaggtgagtggcgcgggacgcgcgcgtgagacggtccgacgccctgggggcttccgcgagcccctgcggaggccatctccgttcctccgcgagccccaggactcgggcggcccggcggctctgcccaggccgggcaggctggggagtggagg

SEQ ID NO: 24549 - DNA, 2300 bp, Homo sapien
tatcctgacttcgtgataagcccgcctcagcctcccaaagtgctgggattacaggcgtgagccaccgcgcccggccagctttctcttttccttttttttttttgagacggagtctcgctctgcgctctgtcgcacaggctggagtgcagtggcgccatctcagctcactgcaacctccgcctcccgggtgcaagcaattctctgcctcagcctcccaagtggctgggattacacgcgcccgctaccacgcccggctaatttttgtattttctactagagacgaggtttcaccatcttggccaagctggtcttgaactcgtgacctcgtgatccacccgcctgggcctcccaaagtgctgggattacaggcgtgagccaccgcgcccggcctcaattcttaacctagctatcaattgcagtgttaaagaaaaacgcctcagtcctaatgcacttggtcaagaaaacactgcactactgcaaaatgatcaaagcagcattaaactgtggactgctggataagtgcggagctctagagatgatgaaggggagagcatctctgctcagtaaaagctttcatgggcagcgactgaaagaatgaggcccagaggaatttctaggaactttccaagagaggaaattcaaacccgagaactcccaagaggtgtctcccacacccctgttctctgaccctgccatggccaccctcccccgtcacaggtctctgcgtgccatgcacctagagtccacttcgtcgcgactctccaacacctattttctccaggagctgcttcggacccgtttgttttttttgtttcgttttgttttgtttttctgacagcgacagcccttgggcaacgctaatcattccaagcaaattctgtcatgccaagacctcccttaacagcacgcgcccacttgtttccaactctcctgcgaattgggcttcgggagcctccgaaaccaaggctcggagatgtggagcgcacaggggaagggtcgagctgggacccacacccggctcttcctcccacaccgcctgttgagcccaaggctcaatttcaacacaaagctctccttccctcaattccttcaacgacgggtaaccttcaacgaacacctaccggaccagaacagagtgtacgagcggcgcgggaaggtggcacaaaggcatggcccagaggagtggcaggaagactcagccggggccctccactccccagcctgcccggcctgggcagagccgccgggccgcccgagtcctggggctcgcggaggaacggagatggcctccgcaggggctcgcggaagcccccagggcgtcggaccgtctcacgcgcgcgtcccgcgccactcacctgtgggacccatagcgtcgcccgcttcagaggtggaagccgccattccgccaccgcgccaaaacgtcgtcatcaagctgcgcgcagagccacgccccgcggccgggcgggaaaagcgcttctacctctttgggccgttacctcaaaaggtacgtgcgcaaagcgaagaaggccggccggccggccagggaggggaaatggcgaggcaggagtgcggggggagggagtggtccttagctgaatgcgcctgcgttgtggcggcctctggcgccccaaggtagggctcacgcactttctccctagcaaggaatgcgcgtgcgcgtaagcagggttgttgattagtgccccccaccccccccgaagagcgacccctagtggtgcaccggtgcggaccagaaaattgcacgctttcttgaaacaggtattgactgagcgcccaatgtatgcctggcactgggctgggtgctgccacctaagcgagcacgaccaatgcaagtctatcagggacgccctgaccgccaagcagctggcccctgcagtccgccatgccactcccgacgcctagcgcgccgctcagcacaccgtgagcgcccactaactgttgggctccaatgacgccgaggaggcggccccgtccccgcgctcccgccgctcccgccagggcagcccgggaggccagacgctggcgctgcagggagagggcggtgggcgcatccgctagggggcgcggcggggcggggcgcacctttcggcgggcctcgcggatggcggcgcagggcgtagggcctgggccggggtcggcggcgcccccggggctggaggcggcccggcagaagctggcgctgcggcgcaagaaggtgctgagcaccgaggagatggagctgtacgagctggctcaggcggcgggcggcggtatcgaccccgacgtgttcaagtgagcggggc

SEQ ID NO: 24550 - DNA, 2300 bp, Homo sapien
tcctacccttacctgactagggagtactctgacccctgggctgggaaaagcccaccctggcttctggagggccagcaagagagccaaacctcacagggctgtgcatgtctctcctgcgccctctgggggaagtgggaagagtcagtcccacccagctgccgcctggtatctgggctccaggccaccggaggatttggcccccagccactgagccctcagcacatacctcccccacaggtcctggagatgtggctgagctacctgcagccgtggcggtacgcgcctgacaagcaggcttcaggcagcgactcccagccccggtgtgtgtcggagaaatggtgagccgcagcccctctcacagacatgccactggctcccccaggtggatattgttccagtgggtggaggccaagccagcggcctgtgctggggtcagcctggccctggcccccgtggcctcctgaagtcctctcccagcccctgccgagcggaacacagaccagcctttcctaggctcaactttgccaggccctagaattggtttctcatggaagccgtgggtgacccatcctgccctgtcccctctcccttctgtcccagacgagtgttcagccaccccgaaactatcccttgatcttcatcagcacagagcagagcagcagtgatcaagcaggggatgagggaagccgtcttcccccatcccctgcttgatcctcacagcagaccccaggcttccgtggcacctggcatggccactgacccctcccctccttgcccaaggcattcccctttggaccctctgggggatcctccctcagccccctcaggctctgggctggcctctgccatggtggcttccatccacttggaaaggggcctcagccttgctaaggatgtggcgtcctcagagggcctgggtcttacctgcctctgtcctgccctccctgcctgcccgtggccccctgagctgtcatctgtgacagcttgtcaccttggctagggagagtctgaaagcccaagggtgagcaagggcattaggggcatggaccggcgcagaccccgcctccagttggaaggctggcgccaacctgccaccttggtccccagggcgccctttgtccaggagaacctgctgatgtacaccaagttggttgtgggcttcctgaaccgcgcactccgcacagacctggttagccccaagcatgcgctcctggtgttctgagtggccaaagtctttgcccagcccaacctggctgagatgattcagaaaggtaagtcctcagcctgggccagccgggtagacgtcaacccagccagaccagggccaggcccttagctgggggtggctggtctttaagagggacccacacgtccagagtgggccccggcaaagggtgctgtggagactcctgggacacatctgtgcggtgaagtctgaaactggctggatcctgcctgccctgcagccaccaggcactgggtgggggatcgcaggtgtgctcacagagcgggccggcacggtccaagctgcggccccgtgaccccgccgtttaaccctggcaactcgtggtggccgcttcaggaggtgagcctggtctctgccttgcattcatcctggctgggttgggcgttggtttctgtcgatcctcctgttgtttacctcctgcagacactgctaggggctctgtgagccagcagctcccccatccgccctccccatgtcagccacctactgtgtgggagatgttgccaggcagggcctcaggaggacacccctgggtcagggctccccagacacctcagagacaccccagaatcctaagggcagcagtcgggtactctgccccggggaagtgggtgccagttcgtctcctgccttctaggtgagcagctattcctggagccagagctggtcatcccccaccgccagcaccgactcttcacggcccccacattcactgggagcttcctgtcaccctggccaccagcggtcactgatgcctccttcaaggtgaagagccacgtctacagcctggagggccaggactgcaagtacaccccaatgtttgggcccgaggcccgcaccctggtgagtggattggcggtgcctgtcctcagggcccctggagccatggggctgagcagaacccgggaagtgctgtgatctggcaggaaggagggaggctgggtgtagatttgacgccatatctccttcccccattttagtaaagtctaattttttcctgataacgaaggcagtgtttgttgggaaatttcaaatgtagaagatcatcctttag

SEQ ID NO: 24551 - DNA, 2300 bp, Homo sapien
accatcttggctcactgcaagctccgcctcccgggttcacgccattctcctacctcagcttcccgagtagctgggaccacaggcgcccaccaccatgcccggctaattttttgtatttttagtagagatggggtttcaccgtgttagccaggatggtctcgatctcctgacctcgtgatccgcccgcctcggcctccaaataatttttgtatttttagtagagatgggttttcaccatgttgcccaggctggtcttgaactcctgacctcaagtgattcacccacctcagcctcccaaaatgttgggattagaggtgtgagccactgtgcttggccaacttctcgcattttcttttcttttttttccttttttttttttttttctgagatggagtcttactctgttgcccaggcttgaaggcagtggcatgatctcagctcactgcaacctccacctcctggattcaagcaatcctcccaccttagcctcccaagtagctggaattacaggtgcatgccaccacgctagctaatttttgtattttttagtagagatgggatatcaccatgttggccaggctggtcttgaactcctgacctcaaatgatctgcccaacttggcctcccaaagtgctgggattacagacatgagccaccctgcctggccttcacattttctttagattatttcttagaatgtctacttctctgttcccattatcagtctgtaatctcatgttgtccactttttccattagagcccttagcatattaatcatagttgtattccatttcttggtctgataattccaacatctctgccatatttaagtctggctctgatgtttgctgtgtcttcaaactgtgttgttttttattatgccttgcaagtttttgttgagggctggtcgtgctcaaccagtaaatggactttctgtgtgaagttttatgttggtctggttaggggttgcgccatgtgttctgtttgttaactggaggtgtcagaggcttaaacctcctctagtgtcttagtttttgtctccctgttgcctttacggtttcctagagatttcttgaataagctctgagatgagcagttctttcacttgtatcccctgttattatacaggagccccgctgatgtggcagtaagatgtggggaaaggagagccagagcaggctggggttagctatgttcccttcctccaggtttgctggtatctggcaaaattatgattggcctggctgtgattttttttttttttttgagggcaggccttgtaaaaaaaataagacttctttttatttttattatttttaaatttatttatttatttatttattttttgagacacagtctcaccctgtcacccaggctggagtgcaatggcgcgatcttggctcactgcaacctccacctcctgggttcaagtgattctcctgcctcagcctccggagtagctgggattacaggtgtgagccaccgcgcccagcctcttatttttaggcagcatctcactctgtcacttaggctggagttcagtggtgccatcatagctcactgcagcctcgacctctggggttccagcaatcctcccgccttagcctcccgagcagttgggactacaggcgcaagacaccatgcccgggttttttttcttttaattttttagagacggggtctcactttccattcaggctggaaaggatgcctggatgccttttattattatttttttagacagagtctctgtcgtccagattggagtgcagcggtgcgatctcgactcactgcaacctctgcctcccggttcaagctattctcctgcctcagcctccagagtagctgggattactggctcccgccactacacccggctacattttgtatttttagtagagttggggtttcgccatgttggtcaggctggtcacgaactcctgacctcaaatgatccgtccgcctcggcctcccaaacttcggggattacaggcgtgagccccggcgcccagccctggatgccttgtaaatcactactcacccaggaagagccagcgacaggccccgcccccgccaaccgcctcgcgccttccgtcgcccggtttccatggtgacggggcgccaggctagggcggcctggccactgagccggggtgcagtggcagcgggagagtacctggcgatggcgatatgagcggtgcgggggtggcggctgggacgcggccccccagctcgccgaccccgggctctcggcgccggcgccagcgcccctctgtgggcgtccagtccttgaggccgc

SEQ ID NO: 24552 - DNA, 2300 bp, Homo sapien
cgactcactgcaacctctgcctcccggttcaagctattctcctgcctcagcctccagagtagctgggattactggctcccgccactacacccggctacattttgtatttttagtagagttggggtttcgccatgttggtcaggctggtcacgaactcctgacctcaaatgatccgtccgcctcggcctcccaaacttcggggattacaggcgtgagccccggcgcccagccctggatgccttgtaaatcactactcacccaggaagagccagcgacaggccccgcccccgccaaccgcctcgcgccttccgtcgcccggtttccatggtgacggggcgccaggctagggcggcctggccactgagccggggtgcagtggcagcgggagagtacctggcgatggcgatatgagcggtgcgggggtggcggctgggacgcggccccccagctcgccgaccccgggctctcggcgccggcgccagcgcccctctgtgggcgtccagtccttgaggccgcagagcccgcagctcaggcagagcgacccgcagaaacggaacctggacctggagaaaagcctgcagttcctgcagcagcagcactcggagatgctggccaagctccatgaggagatcgagcatctgaagcgggaaaacaagggtgagccggcgcggggccctaggccggccctgcctccccaggcacactcaacactgccgctcccgcagcacagaaacacagccatcaactccagcacacgcctgggctcagggggaacacaggacggtaagcccgccctgccacgctgagctgtcccctcctcccagagggagacccgcgtggcccccgggcagtgccgaccctgtctgcctgtctcgtagggcagcagcatttcagatgctgactccgccaatcctctcctctccaagcagggtcagacacacctctgttaaaaactttatagaggggcccgggcgcggcggctcacgcctgtaattccagcactttgggaggccgagacgggcggatcacgaggtcaggagatcgagaccatcctggctaacacggtgaaatctcgtctctactaaaaatacaaaacaattagctaggcgtggtggtgggcgtctgtagtcccagctactcgggaggctgaagcaggagaatggcgtgaacccgggaggcggagcttgcagtgagccgagatcttgcgactgcactccagcctcggtgacagagcgagactccgtctcaaaaaaacaaaaacaaaaactttatacagggaaacgtgcccaagtgcgagtgcgcagctcaatgaatttcttccagctaaacacatcggatcaggagcaggcattcccccgccccccaccccgtccccgcttcgcctgtgcccatgctgtcctccggcggggccttcccaactgcacccttagctgctcctcacccccacgcccccctttctccctccctcctcccccacccctcctgccccgagcagaaggagggcccgccaggatgtgggatgtggctccgctcctcgatcttgcttcaggagggctccagcaagggcaccagtgcccgcggcctcctctcccgccccgttccctggtgctgccttacctgagtgccgagtatcccatcaccaggcgtctgttttgtcaggaccccgcttccccatgtcttcttgagcctcaggacgcccagttcctaatgtcttcttgagcctcccccgcagtccctgatccccacgggatcatgacactgccatagccaggggttccggagttcacctctgtacccctaaagcccaggccctgcctgggcagtgtggatgccctccagtcatctcagatggatgaggccgatatgcccggtgggctctgcctagggaacaggcagggccattcctggcctgacacccacgacgaaggcgtggtggagagcgggatccatggggcagggcccaatcagccagtgggggggcaggacttttgggctcagcagccaggagaggacaggccaggcttcttctctcagaatagctgtggtttcacaagtgctgaggagagcgtgtgcttgctttcagatctccattacaagctcataatgaatcagacatcacagaagaaaggtgagaactgggcccttcagtgactgatgggatgctcttgccacccaggggagcccctccagactgtccttgcccacctggctgcactggcccctgtatgccaacccagtgggtacaggttctgggggacctggacagatgccgctacctctagccgtggctggacgatgtt

SEQ ID NO: 24553 - DNA, 2300 bp, Homo sapien
cctgcagcgctcctactcccccttcccggcccccagacttgctgccactaccaccactagcaccaatgccaatacaattgctgtcgccgtcaatgcagcagcccaccctacaaggttcctaccaccttgcccccgcaggcaccctcctaccactcctgtcgagctgcagtctctgtggctgccaccaatcacatgaggcgagctgcagagtcacgccacatgcaggctccagcgtaccacaggtgattccttctcctcctcctccagcctggcttggagcagctagacgggcaaagccagaaaagcctagaatgggatgcagggagtggtaacgttagagcctcaccttgtcatgctggccactgggtggcagggaccagcttcagctaaggcactcacacccacccaccgaagtccagcctctctttctggcaaaaggtggccaggaactggggcgggtgtgagtgcctatgctgaaaccacccccatccaggtgcaactggccagaaattgctgggcccaccagggctgcactccttggggagcaggagtaggagaaactcagacccagccagccctccccactcaactgctggttcccgttcctgacacctccacccacagtgccctgttcccacagtcccccgcgatgcccactaatccccacccggtagtcccaggtggtctccccaacacagagcatggggtgtgggcgggaggtgcaggccggagaaccgcagtgggtgtgggggtcctgccatgctcaagattgcacgagcaggaagagatcaccctctagagtctggagtacggaaaggagaagagtcacccgaaggagcaaggagaccatggctgttgctgtccccaccacctctgcagccgaccaacaccactggcagtatagcccccatagcaaccctaacctgacccctgccgccggcagtgtagccctcggacagcacacccaacacaccctgtgccagctgcaggcagtgtaaccccaatacccccccaaccaccccctccacaggcagtgtagcacccgatagtgcccacaacctgacccagccacaggtgttgctgcacaagacagtgccccaaaatcgccgcccccaccccgccacgggtaggggagctcctgatagtgcaccctgagcaagggcagtgcaacacctgacaacactcctaaaccaccccccactaccagcatcgtagctccgaataaccacccaacccactccttgccctgggcagtgcagcagaaaatagcgcccctaacccatcccccgccaccagcagtacacgttagtgcacacaacctgcctcccccgcccaccacccccgccaccgtgggcagtgtagccccagatagccagccaacaccgcacccccaccgccagcaatgcaacctcggagagtgcccccaaccagccccctgacacaggcagtgcagcctcggggagtgagccccaataggacacccaacccctgcccccacatgcgggcagtgcatccccagctgactcacctacaccaggacatttctaccactctggccgagctgcagtgtccgaggtcaccaccaaccgcagcgaggcgagccggggtggctcaggctccagcctccagcatgcctcggtgccgctcccttctactcgtcttcctgcccagcaggagaagctcctgctgcccgccgccctcctaccgctctgtcgacaccaccaactgcagtgagccagtgtccgaggctccagccagaaacaggtggcagccatgccggataccaaacgcgaaactgaagagcctaaaatgacctgacaccgcctcagcatgctttacgtactgaggtcgcgcacatgcagttcctggactacatgttctgattggatgagagaaaaaacctctaggcctactctgattggactttattttcatgctgtgattggttgtctcaagacttgctctcatccaatcagaacatgataataaagtccaatcagagtaaccctggagggtttttctcatccaatcagaacatgcagtccaggaaccctcatatatatatataacctcagtatatgaatgctcccgaagggaaggcaggcccttccaggttcccgtactttcttatggagctgctcagtgaccggcttagaggaccgggaatgggtaattggaggctggagccgctccactgtggttcgcctcgctgcaactggtggtgaccgcgaccgagatggcagtgcggcgggagcggtaagaagaggaaaatagttttgggatagatggagggggtaaag

SEQ ID NO: 24554 - DNA, 2300 bp, Homo sapien
gaacactggaatattacaagatgagattctgttcatgaagaaaagcagatagaagtggctgaaaagaaaatgaattctgggccgggcacggtggctcacgcctgtaatcccagcactttgggaggccgaggcgggcggatcacaaggtcaggagatcgagaccatcctggctaacacggtgaaaccccgtctctactaaaactacaaaaaattagccgggcatggtggcgggcgtctgtggtcccagctacttgggaggctgaggcaggagaatggtgtgaacccgggaggcagagcttgcagtgagccaagatcgtgccactacactccagcctgggtgacagagcaagactccatctcaaaaaaaaaaaaaaaaaaaaaaaaaaaaaaaaaaaaaaaaaaaaaaaaaaaattctgaggtgttttctttagttattttcaaatgtttttatatgtgtatatatttttaaaaaactagatattttggaaatataaaggatttttaagtcatatatatgtgtgtatatattctatatatcctttgtcatgtacctatatatgtacatataggataaagccatgttcttaattcacctccatttgcctgcaacagtcgagtagtgaccttcacaatggcctcagtccagaggagaagcatttgatacttttcataagaattgatgatctttccatataaaaagttttgctgctgaaaacagattttcttgtttttggacattagtttttaaaaaagtgttaatagagaagtcaattgattgttttcactgataggaaagtaggaaatgtatagctgggtcagaggccacattgtggatgtcattatccttacttttgtggagaggaacagtttgctccaagtagtttctcatttcaatgtaaagaggttagaaaacaatgacatgccatgatacacatttagtgatcatttattgataagtattttgttcctagagaaatagttcagtatatttcccctatttcacagttactactgtttcaaatattataaagaggaaataagttatcacaatgggaaataatctcatgatttctaagaaaatctctataagttgtatcttatttaccattcatattttgaaacaaaaggcttcttttgtatttatatatttacaccacagaagtaactgtggttttgtggaggatcactagaagtagcatcagcagacctggggaaaatcctgcatctgtgtatattttttgacctctccttttaagaatcgcgatcttaaatgagttcagtattgtatgtagaagtgcaatgcctagatacagatgtgtacagtgtggaagggtacagtgcttagatttgacagttataaataaatgtaattcttataactgagtatagaaatattagaaatgtagaatatcagtaaaacgttcttcagtaaaagaaacttaaagaactttgagaaattgcttctgtccaaatatatgcatagcaaggctcttaggatggtgtggttgataggttagatatcagagagtaaacctaatcttaaaaatatagtcaaatgtattaatcttatattttatgcctctgggttttttgtaactcacagaaagtcttttttaattctgagattcttaaaaatcctctagtgatttatttttcatagtctttaaataaatatttaaacttttaggaattcaggagaagattcctaaaagtttaaatatttatttaaagactatgaaaaataaatcactagaggaatttacactctattaggtttgaagttttgtccaatttttttccagttaaatatccactatgtggattctttcattatacaaatacacgttattttttaatttcagaagaaatcatgatatgtcaatctattgagtgctaactaaaagttccctttgtttacttagctttctcttagttataagaaagaaaaagacttcttgcatgaaaatagtacgttgcaggaagaagttgccatgctaagactggagctagacataatgaaacatcagagccagctaagagaaaagaaatatttggaggaaattgaaagtgtggaaaaaaagaatgataatcttttaaaggctctacaattgaatgagctcaccatggatgatgataccgctgtgctcgtcattgacaacggctctggcatgtgcaaggccggctttgcgggcgacgatgccccccaggctgtcttcccttctatcgtggggcgccccaggcaccagggcatgatggagggcatgcatcagaaggagtcctatgtgggcaaagaggccca

SEQ ID NO: 24555 - DNA, 2300 bp, Homo sapien
gggaggccaaactggctcaaagagccaccagctacctctgcaatggtgctcctcgaccaattggactagccaccaacctcacccactcagggaagcagggatggccaggttacagaatgctgagtggctgccacctgatggcagatggagcagaggcctgaggaaaatgagatggcacatttaactcttcaattcatccgaagttaatttttctataaagcagatggcagtagtccatgcctcagagctcgtatggcactgtggtccacagaaggctgagtcccctgagtggtaatcctgcctgctttctgcacttgaacataaattcttcctcatgacggcctgtggtctgcctcttggccctacctttagggtagaagaactgatgtaccatgtccggcagcgactgaggttggtaactggtccgcctgctcctggcacacccttgcagaggtggctggttgatctttgagccagcttgaccttgcctggcatgcacaagcttcagtgcaactgttgttccacaaatggagccacagagaggaaacgagcagcaggctcaggagccgggtgtatgctgcctttggggctccagtccatgcctcagggctcctatggcactgtacaattcttcgttgccaagaggccaaccacaggccgtcttgagaaggactttatgttccactgcagaaagtagccaggattaccatgcagaggactcggccttctgtggccctggccagacttagaatttgtgccaaggcaggacaagctcactcggggcagcgtgtcagtagctggggcctgtgcatgccaggcaaggccacgctggctgaaggagcaaccagccacctctgcaagggtgcgcctggaggaggtggaccagccaccaacctcacgcagtcaaggaagtggatggccaggttcccacagcccacgtggctgccacctgatggctaatggagcagaggccttaggaaaagcagatggccctgtggccctacctttatggtagaagaactgatgttccatgtcctgtagcgagtgagattggtggctgttccaccagcttctcgcacacccttgcagaggtggctgattgctctttgagccctgttagccttgcccggcatgcagaagcctcagtgccactactgtgctacaaatggagccatatagaggaaaggagcagcaggctcaggagcagtgtgtgcgctgcctttgggccttcagtccatgcctcatgggttgtatgacactgcgggcttcttggttgccaagaggcggaccacaggccatcttgagaaggactttatgttcatgtgcagaaagcagccaggattaccatccaggggactcggccttctgtatccctggccagacttagaatttggccctagacaggacaagctcacttggagcagcgtgtccgtagctggggtctgtgcatgccaggcaaggccaagctggctcaaagagcaaccagccacctctgcaagggtgcgcctagagcaggtggagcagccaccagctcacccactcaaggaagcagggatggccaggttcccacagcctgagtgtgtgccacctaatggctgatgaagcagaggccttaggaaaaccagatggcactgtggccctatctttatggtagaagaactgatttagcctgactggcagcgtgtgaggttggtggctggtccacctgctgctggcacatccgtgcaaagatagctggttgctctttgagccagcttgcccttgcccggcatgcacaagcctcagtgcaacaactgtgctacaaatggagccatatagaggaaaggagcagcaggctcaggaccagggtgtgcgctgcctttgggccttccgtccatgcctcatgggtcatatgacactgcaggcttcttggttgccaagaggcagaccacaggtcgtcttgaggagtttatgttccagtccagaaagcagctagtattaccacccaggggacttgggcttctgtggcccaggccagacgtagaatttgacagagtcaggataatctcatttagagcagcatgtcggtccccggggcctgtgcatgccaggcaaggccaagctggctcaaagagcaaccagccacctctgcaagggtgtgccaggagcaggtggagcagccaccaacctcacccactcaaagaagcagggatggccaggttccaacagcctgagtggctgccacctgatggctgatggagcagaggcgtgaggaaaagctgatggcactgctttgtagtgctgttctttgtctctcttca

SEQ ID NO: 24556 - DNA, 2300 bp, Homo sapien
taggagcgccctggcccacagctggcggtaaaacgcgggacctgggtccctcggagccccaggggcctctgagctggagtctaggattatttttgatgcctcagcacctttaaaaagagacctcgctagagcagggggcatctgtattttcagttctttgaggagtctccagctatttagctgttttccatggtgtgtatcctaattttcatttccacctacagtgtatgagtttccctttctccaaaaccacacccgcattcctactatttttggtttggggtttgttttgtttttgtttttgttttgagacggagtcttgctctgtcttacaggctggagtgcagtggcgccatctcggccgactgcaaccgctgcctggttttaagcaagtctcctgtctcagcctccagagtagctgggactacaggcgccgccaccatgcccagctcatttttgtatttttagtagagatggggtttcacgatattggtcaggctggtctcaaactcctgacctcaggtgacccacctgcctcagcctcgcaaagtgcagagattacaggcatgagacaccgttcccagcccctcctatttttttaaaaaaatcaaggaatattcgataagtgtgagattatctgtgtgtggttttgaattacagttttctaatgaatagttgattttgaggaccttatctcttatttgttgttcgattttatggctgtgcagaattgtctgttcaggttctttgcaaaatattagattggatgcttttgctactttgtagtgttttttgtgtacatattagatgacaactcctcgtgaattacaagattgcctgaaatttttgcctaatctataggatgcttttttaattggaaagtagttttctttgatgtgcagaaacttttcatgttgatgtagtcaacatgatatttatttttgcgtttcatgcatgtaattttcgtcacccatataagaaaataatatgtcagtgacaaagcatttaattgtcaatgaggtttttcttccagggtgtttattttcctctttgcaaaggtgagcagagattcaagtgacccaaaatatatgctcatcctgtgttttagttaaaaacattttgtagtttatggtcttttgttttgccttcaatttgggggagtgggtgttcattttcatacatcgtgtaaaataaggtcctatttctcgcttctgcatctggatatcatttttgtcaaaggtattcattctctgccttccacattgcagtgttctttatcaaagtcagttgattgtgtccatatttgtgttgatcatgtttttgtcctccctgtttttgtccatagtttatgcaagtatcatatatcagctgtataactacaacttggcagtgtaatttgatattaaggattgtgggtcttcactttgtatttctcaggattcctttagatattcattgcttttgtggttccctgtgatttttagcaatacgtatttatttctgttaactttttttcacaacataaaggtccataattaggggtacattttcatacatacagattgggtaatgatcaaatcagggtacttaggatctctatttgctcatccaggttttttttttttttgtggggagaacattcaaaattctcccttcttactctagaaaaatatgatattgttaactccagtcaccaggctgaggaggagaacctcagatttgttcctttaatgttaagataactttgtttccataatcaatccttccccattccccctctatctcccaaactctggtaaccaatattgtgctttttacttcattaagataaacatcttaagatttcacatgagtggtatcatgcagtgtttttctaggcctagctccttacatttaacataatgttttccaggttcatctgcgttgctctaaatgggactgtttcattattttgatggctgaagaatatttcctagtgtatgtatatgagagtttcttgatctctttatctgtggatgaacaggtaggttgaatttacacccagtaatgggactgctagatggaatggtatttctttttttcctattctttgcaagacctctaactgttttttatagtgttaatactaatttatgtttgcacaaacagttcccctttctggcaattcataccaggaattgtctttttaaatattttgatctttttgtaatgttcattctattggagtgagataagatctgagtgtggttttgatctgcatttttctcatgagtagtaatgttaaccacgtttttgtagac

SEQ ID NO: 24557 - DNA, 2300 bp, Homo sapien
tgtcccagggcaggtctagaaatgctgtccaagagtcaagtcctagaattggggaccccaagagcccacttggtgctctaccccacggtggtggtgttggtacctaagatgcaagacaaagtcccctttactcttccttctgtttttatcaagttattcctaaatcttatcattctttaaaccaaaaggatatccagtttgacagtgttcttttttaagaatgatgcttataactgaatataatagttcctatgggattcaatcaacagatagtaacagagtattattatgttattttgttctgtgtgtatttgtctattactgcacttaaaatacgaaacgggaggggcagtatgactttggactcatttgccataatgctgaagtcaaatgtgttgctgttaaatcagctttctttacccaattcacatttgtgcttaaaaaaaaaagcattacaagaccttgcatatttctgttcaacttatttttaacattcatttcattattgcaacatttattgtaagttgtatcagtttcatatttcttcatcttctatatatggagattatgccccagttacatctctttatctgtaagactagtaatatcaaaaaagaaaatgaatttcgtgtcttaaaatttatccttagtaaattctacattttctgttgattatcacttttaaaggccaaaccctctttttaggaatttttcctgaatcgcacccaggaatcacatgctgtagtttgctctgttttactagacttgaaatcaccctttcccatttatgtgaaaattagatttctgtttgtagggaaaagaaagagagatcagactgttactgtgtctatgtagaaagggaagacataggaaattccattgtgacctgtaccttgaacaattgcttcgctgagatgctgttaatttgtaactttgccccagccactttgccccagccactttgccccaacattcagctcacaaaaacatgtgttgtatggaatcaaggtttaagggatctaggactgtgcaggacgtgccttgttaacaaaatgtttacaagcagtatgcttggtaaaagtcatcgccattctcgagtctcgataaaccaggggcacagtgcactgtggaaagccacagggacctctgccctggaaagccgggtattgtccaaggtttctccccatgtgatagtctgaaatatggcctcatgggataagaaagacctgaccatcccccagcctgacacccgtgtagggtctgtgctgaggtggattagtaaaacaggaaagcttcttgcagttgagatagaggaaggccactgtctcctgcctgcccctgggaactgaatgtctcggtataaaacccgattgtacatttgctcagttctgagataggagaaaaaccgccctatggcgggaggcgagacatgttggcagcaatgctgctttattgttctttactccactgagatgtttgggtggagagaaacataaatctggcctacgtgcacatccaggcatagtacctccccttgaacttaattatgacatagattcttttgctcacatgtttttttgttgaccttctccctgttatcaccctgctctcctactgcattcctcttgctgagataatgaaaataataatcaataaaaactgagggaactcagagaccggtgctggtgcaggtccttggtatgctgagtgctggtctcctgggcctactgttgtttctctatgctttgtctctgtgtcttatttcttttctcagtctctcatcccacctgatgagatatcccacaggtgtggaggggcaggccaccccttcagtgttcgctactttcagtgcttacaatgcctgtcatttatctgtagctcttatactttttataaaaaataattttataccaaaagccttgaaacttttttagagtagtagctttgaattgttgttattattttattctactgttatcggtaacctcccatgttaacactattgtttctttctgtttactttcagttggttggcagagaatttgaactggagatgaactttattatccaggatgctgagagtataacatgcatgacagagcttttagagcactgtgatgtaacatgtcaagcagaaatagggagcatgtttacagccattctatgaaaaagtgttcggaatgtacagactagcacagaagctggactaattgaacaagtattgctgaaaatgagtgctgtagatgacatgatagcaggtatggggttgtctgtcaggaaagtataacttaaatgtttat

SEQ ID NO: 24558 - DNA, 2300 bp, Homo sapien
acttcacctcctgaagagctgggactataggcatgtgacaccgcactcagctaatttttaattttttggtagagatggggtctctctctgtgttgcccaggttgatctcaaactcctggcctcaagtgatcctcccaccttggcctctcaaagtgctaagattacaggtgtgagccattgcgcatgtccacctttatatataaatttaaagacatagaaataacctaatactacaaataagggaagataagaaaattatctttatttaatggatttcatgtttatatttaaattacattatacactttttttaacctgaaaatgttagatttaattacgtaaacttgttttcctcctacaaaccaaaatagggtatggtatgtatcatggactcagaaaaactaagaccaatgtatttccaaataagaataggttttattagacaccttacatttccacaaaagtattttaaatcttttaagataatatattaaaacttgttaattccagtgtaagcagtatgaacaaaatgaaagcaagagttttgttctagacaatgggatgtacaaatgtttccgcagtggtaaaatgcagacacggaaagctgatttagtgtttaacaacgtatcttgtgtgtttaattcagtcattgtttttttgaatgcagatatgctgagttcttaagcattctagtgataacactaccttcctcattcaaaaaaaaagtattatcaatgaaatacttcagactacaacatacacagatttttaattattcatgttgctcttgtcttggcacatgcctaataattaatagtttgcatccagtttcgtattagtctctacacactagtccagaagtaaaaactgacatgtttggtcttcacagtgttaaaatgtttgaattaaattttaaaatatagtgcttttagataaaaattcggatttcatgtttctcttgaaaaatatggaagaactagcaacagtgaacaattgacttgagctgaggagtaggggccacttttagaaaggacaaacattctctagtttgaggaagtccccatctggcccaattcacttacatgcatatctgtgtgccttctgtgagaacttgagtttgggacatttgatttaaccttattataacattgagtgagaaaattggagccacatcagctaaatgatttcctaagcttgaaaaagataattagtggcagagtcaggattttaagttgatgtcagcagcaatacactgaatatggactataaatcagaagacttagaattacatgctggccccttcccttctacatcttaatttcttaacattaagctttcatagttgtaagttgaaagtaatagtaatattgatatgtgattattgcaaaggttaaatatcatttatcattattagactcatatctgcagagcaattttaaccatgtctgacaatacctttcttgttatagatggcatatgtttagttgtctttcataaaaagtaataacatgttttaacaaacttctcttctgagtttagtatgtatattgtgatattattgttgagtagcattggtatttcatagattgatttgctttttagtgaagatatgaatatttttgcatattaactttttatagcctcaaatggtagtcatttttataagtaattcatgtgtcaggcactgcttatttacataaatactttttaaagtgttaataataaaaattaaacttatgctatgatgtagtcaagtaaaatcctattatatataatatcaggtttgatatttttttctaatgaaatgattttgccagtaatcaaaaactttaaattagaaaatgaagatctgagcatctttattggcataataaaacttaactctcattgaattgaagtgacaataacaaagtaagtaacaccactgaatagtccctgacacatgaaaggtacacaagtactttcttattgcaaatgtttctctgctttaaaacttttaagttttaattgttgcttttaaaaagagtgtttaccttggttttattttttcagagtaccttcaagtttaaatctgagagtgatattcatttggcagaacatcataaacaggttttgtatgatgggaaacttgcaagtagcattacctttacatatactgctaaggccactgatgctcaactctgcctggaatcatcaccaaaagagaatgcatcaatttttgtgcattcccaacatgctctaatgcttcaggtgggtgaatcatggctgtgttttcatgttcttgtcagaatttaacagta

SEQ ID NO: 24559 - DNA, 2300 bp, Homo sapien
gtccagaagtaaaaactgacatgtttggtcttcacagtgttaaaatgtttgaattaaattttaaaatatagtgcttttagataaaaattcggatttcatgtttctcttgaaaaatatggaagaactagcaacagtgaacaattgacttgagctgaggagtaggggccacttttagaaaggacaaacattctctagtttgaggaagtccccatctggcccaattcacttacatgcatatctgtgtgccttctgtgagaacttgagtttgggacatttgatttaaccttattataacattgagtgagaaaattggagccacatcagctaaatgatttcctaagcttgaaaaagataattagtggcagagtcaggattttaagttgatgtcagcagcaatacactgaatatggactataaatcagaagacttagaattacatgctggccccttcccttctacatcttaatttcttaacattaagctttcatagttgtaagttgaaagtaatagtaatattgatatgtgattattgcaaaggttaaatatcatttatcattattagactcatatctgcagagcaattttaaccatgtctgacaatacctttcttgttatagatggcatatgtttagttgtctttcataaaaagtaataacatgttttaacaaacttctcttctgagtttagtatgtatattgtgatattattgttgagtagcattggtatttcatagattgatttgctttttagtgaagatatgaatatttttgcatattaactttttatagcctcaaatggtagtcatttttataagtaattcatgtgtcaggcactgcttatttacataaatactttttaaagtgttaataataaaaattaaacttatgctatgatgtagtcaagtaaaatcctattatatataatatcaggtttgatatttttttctaatgaaatgattttgccagtaatcaaaaactttaaattagaaaatgaagatctgagcatctttattggcataataaaacttaactctcattgaattgaagtgacaataacaaagtaagtaacaccactgaatagtccctgacacatgaaaggtacacaagtactttcttattgcaaatgtttctctgctttaaaacttttaagttttaattgttgcttttaaaaagagtgtttaccttggttttattttttcagagtaccttcaagtttaaatctgagagtgatattcatttggcagaacatcataaacaggttttgtatgatgggaaacttgcaagtagcattacctttacatatactgctaaggccactgatgctcaactctgcctggaatcatcaccaaaagagaatgcatcaatttttgtgcattcccaacatgctctaatgcttcaggtgggtgaatcatggctgtgttttcatgttcttgtcagaatttaacagtatctttattttatgtatcaaacattgctcatctataaatctgtgactttttgtttcttttttggcttttgcagatcttttaagtgaaactttaaagaatgtctatcttttctgtagcaatatgctctaccctggccttgtctccttagtaggaaatctgtcatatctattatcttatatattatacagcctttgaaattaaatcaattaactgaataagttagttgttagatataaaaacatactttgctttaagattgtattactaatattctgtaacattaaaattacttgtctttaaatccatcaatagtatttctggttttaaaataacatttgattttaacttcatatttttagtgtaaaaatgtctcaacctaagatttgaaatttaaaagtgattagcaaatgtactcacttttttgtcttatgtgtgtataaaaattataattgaaggcttcaaaaatgtccaactatgttatttaattcccttataaaggtatttggaccaaggaaatagtgatgaaaatcattctatagaagtttaataaacatttttggttttagacataggatgtgaaagggatagtaacacattcaattcatagtgcaattcattcaattggacagattcaagtgctttttccactgtttccccaattggataatcggcagctcaatgacagtcaagtggaaacaactgtctggtaagttttctttacatgtgcaattgctggtattttatacacacttagactatgcatgatgtactcagtgctgtgtaaatgtattacagtatttgggttctgcccttaaagtgctaataaattttttagaactaatgcagatagata

SEQ ID NO: 24560 - DNA, 2300 bp, Homo sapien
aaaaatctactcaagatggattaagaacttaaacctaattcctgaactataaaaattctagaagataacactgcataaacccttctagacattggcataggcaaggatttcatgaccaagaacccaaatgcaaatgcaataaaaacaaagataaatagctgggactcatttaaactaaagagcgagcttttgcattgcaaagggaacagtcagcagagtaaataggcaacccacagagtgggacccctgaccctgaccccgacccctaaccactgaccctgacccctaacccctgaccctaacccctaacccttaaccctaactgctaaccctaaccccaaccctcaccctaacccaaccctaacccctaatccctaacccctaacctctcttaaccccaaactctaaacgttgactcctaacccctaactctgaccccaacccctatctccaacccctaaccctaaacttaacccctaaccctaacaccaaccttaaccctaggttcgttactacgtttgtattgactatgtcaatgctgattattatgatcgctgtcttaggactgcacggcagcgaggggattgcggatcttatattaatatttttgtattgaggcagtgcattagcattacaggtgcttgttacatgagcaatgggggtgtcatgtctgcattaggaatgctgcatttgtcttcctaggctgcggtgtgtatctcgcactgcggccgcctcgccttggctggggagaacttcggtgggcaggattcagaggggcttttggtttcccgttttccacactgaacccttctaactggtctctgaccctgattattcagggctgcaaacaggaaggattttattcaccgtcgatgcggccccgagttgtcccaaagcgaggcagtgccccccaaggtctgtgctgaggagaaccctgctctgccttcgcggtgtccccggagtctgtgctgagcagaacgcagctccgccctcgcggtgcccccgacccgcccaggtctgtgctgagaagaacattgctccgccttcactgtatctccaaagtctgtgctgaggagaacgcagctccgccctcgcaaaggccccccagcgccggcgcaggcgcggagaggcgcacccgaacccgaatcctaaccctaacgccgtcctaacagccctggggagaccttagggaacaagcattaaactgacactcgagtctgtagccggctgtgccaaaagacttgaggttggggtgatatgggagcaggggtcggggaagaaagcgttctggttttagacccacaggaagatctgtgaagcgctcttgggtagagcacatgttgccgggcgtgcccttgaaaacagcctaagaagagggggcgtctggaaggaacggcaacgccacgggagggtgtccagccttcccgcttcaacacctggacacattccggaaagtttcctaagaaagccagaaaaataataaaaaataataatccagaggccagggggcgctaatggggctttactgggactatctggcttaatcctccaaacaaccctgccacagcagcccatcagtcctctgagacaggtgaggaacctgaggtcgcaggaggacacccagaaggtccaggcagagccccctaggcccccacacctccccccgtggcagctccaaccccagctttttcactagtaaggcactccagctgcaggtccacgcccgctcccccaagcggggaaggcgcttcgcgctgccgccggctggggactgggcaccgccctcccgcggctccggagccggctgccaccagggggcgcgcccgcggtgtccgggagcctggcggcgcgtctgcagctgccagtgcacctgctcctgctctcaccgctgtctctgccaggaccccgacgcccagccggaccctgccctccagcggggctgcggctccacggcctgcgacagcagccccaccccgcattcggcgcgctcccgggggcagaggtcgcggtgtcctcaggctgtggcgccggcctgcaacccccacgccgggctcgggccccccggcggaggagggcgatgctccctgggtagggcgacctgtcacctgggctgggagggcggcttaggggcggaagcggcggtccagggccgcctggtgcagcagcctgtctcagccgcggtccctccagtccctccctggcggctgcggagccgtccgaggacaggggccataaactctccagagcgggaagccgcacgctggtggcccggccccgcgcacagacctggcggcagctgg

SEQ ID NO: 24561 - DNA, 2300 bp, Homo sapien
ttgtgtttcaatctttaatccaacctcagttaatttttttatatggtgaaaggtggggttgagtttcattcttctacatacagctacccaactagcccacaccatttattgaatacagagtagtcttttccctgttggttatttttcttaactttgttaaagatcagatatctgtaggtgtgcagctttatttctgggttttctgttccattccattggtctatgtgtctgtttttgtaccagtaccatgctgttctggcaccagtaccatgctattttggttaccatcacctgatagtatatttggaagtcagcaaacatgatgcctctggctttgttctttgtgattaagattactttggctattttggctgtttggagtttcatatgaattatttaatagtttttttctggttttatagaaaaaaaatgacatggtagtttggaacttcctagagacttattgaatggctctgaccaaaatactgatagtgatatggacaataaagtccaggctgaagtggtctcagatggagatgaggaacttgttgggaactgaagcaaaggtgactcttgttatactttagcaaagagactggcagcatttttcccctgccctaaagatttgtggaactttgaacttgagagagatgatttagggcgtctgatgcaataaatttctaaggagcaaagcattcaagaagtgacttgggtactgttaaaaacattcagttttatttattcagaaaggtatggtttggagttgaaatttatgtttaaaagggaagcagatcatagaagtttggtaaatttgtagcctgatgatgtgatagaaaagaaaaactcattttctgaggagaaattcaagctggctgtagaaatttgcataagtaataaggagtcaaatgttaatcatgaagacaatggggaaaatatctccagggcatgtcagaggtctttatggcagcccctcccatcacaggcccagaggcctaggaggaaaaatggcttcataggttgggtccagggccttgctgctttgagcactctcccaacttgctcccctgcatcccagctgtggctaagaggagccagtgtatagatcaggtcattgcttcagagggtgaaagtctcaagccttggcagcttacatgtggcattgggcctccaggtacacagaaatcaagaattgaggtttgagaacctccacatagatttcagagaatttgtggaaatgtctggatgtccaggcagaggtgtgctgcaggggcagagtcctcatggaaaacttctgttagtgcagagtggaagggaaatgtggagtcaagcactgtctggggcactgcctggtggagctgtgagaagagggccaccatcgtccagactccagaatggtagatccactgacaacatgcaccatgcacctggtaaagctgcagaaactcaatgccagctcatgaaagcagccagaaagggagctgtaccctgtaaagacacaggggcagagctgcccaaggtcatgggtgcctacctcttgcatccgtgagacctcgatgtgagacatgaagacaaaggagatcattttggagctttaagatttgactgctctgctggattttggatttctatggggcctgtagcctcttcattttgccaatttttcccatctggaatggctgtatttacacaatgcctgtatctccactgtatctaggaagtaactaacttgcttttgattttacaggctcataggcagaagggacttgccttgtcttagatgagactttggactgtggacttttgagttaatgctgaaatgagttaagattttggaggactgttgggaaagcatgattggttttgaaatgtgaggatatgagatttgggaggggccatgggtggaatgatatgatttgcctgtgtccccactcagatctcatccagaattttagctctcacaatccccatgtgttgtgggaggaacccagtgggaggtaattgaatcatggaggtgggtctttcccatgctgttcttgtgatagtaaataagtctcatgactcatgagatctgatggtttgataaaggggagttcccctgcatacactctttcttgcctgctgccatgtaagacgtgtttgcttctcctttgctttccaccatgattgtgaggcctccccagccatgtggatctgtgagtcaattaaacctctttcctttataaattacccagtcccaagtatgtctttattagcagtctgagaacagactaatacaacaggattgtgggaagttctccagg

SEQ ID NO: 24562 - DNA, 2300 bp, Homo sapien
tataaggtattcaattcagctgagaaatatgtaatttcatgaattataaattgtttttgctgttttacaggctggccacacaccacttttactggccataaggaaaagaagtgaggaaattgtggaatttttactgacaaaaaatgcaaatgcaaatgcagttgataagtttaaatggtatagtagttttttttattaaaaaacacttgagtagtgtgctagagtaataactctcaagtcagaaatattaaattagtaacatttacttaaaattattagattatgcagaaaaataccaacacaaattatcagttaggaagaaaagcaattatttggactggtcaacacaaagaacagtatacagtaggattttcttcttttattatattgactgattcttatttttaatctgatgtttttggttgcattatcttctattagctaaagtggttctgtattagttttaagaagtatgaatttttagtttactttataattcagtattgaatgattaacacctttatagtatttttctaacttctgtttttcatacacttttaaaaaatgcaatatttgctgggcatggtagctgttgtctgttatctcagcactttgagaggccaagtgtgtagatcacctgaggccaggagtttgagaccagcctagccaacatggtaaaactccatctcaatgaaaaatataaaaattagccaaccatggtggcacaagcctgtagtcccaggtactcaggacaatattattcctaatattgttttaagtcttcagattgctctcacttgtccgacttctagctaactttgaagtacaaaatattatatcagactaaggaggaaatagataattcttcacttaaaactttgcctcttttagattagtgaacagaacgtattttcttgcccctcagtggactttatgttagccaattctactatgccatatcccagtgagacatgagtcttttcaccccttccttttagccttggtcgtgatttacaaggataaacacttgagcactcaagatacttaacgtttgttaatacatgtaaatggttaattctatactgacaggcacatattaaattcgttcgttcctaataatgaagttatctctttgttattttagcacagccctcatgcttgccatatgtcatggatcatcagagatagttggcaagcttcttcagcaaaatgttgacatctgtgctgaagctacatgtggaatgattgcagaacgttatgctgttgcttgtggatttaatctctaagtgtttacatttaaaggctaggtgagattttatagtttgtttcaggtagtttttgaatgacagtgagttagttcacttcatcagccagaaactaggcaaaaagctgactagttagaaggattaatggctccaggattctttattttagggctttagggacgctaatgttgtctacttgatttgaagtataacccctatgcatgggataaatataatgtcacaattttggtttttctaattagttatttgggtctcgaaaagtccactttaagcagaaaacctgataatgtccccagggggctgtcttccatacctttattcttgaattttttaaaagaatctgaacctaagtccaaggaagacattccttttgtacaagtcagaaggattggcggtgggggcagaaatggccattctcttcattttgttgtttccattgattctattgctgcatcgttgccattgaaactgctcctgcagtctggtaatgattggcctttgtgaccaggaagcccttactaacacaggttcttcagtcttcatggtgtagacttcgaagttactgcatgtttttaaagttcacgtacatattctcagccattgtttccaaagtaccagcaccccactctggcagctagaacttttagctttagccacacacatagtgagcaaattgactcttctcctcacactcaaaacctgatgtgaaacccacatcttagcctggacatggcctagaccttcatggtaagttatcctttgagtggcttttttctattttctctagccaatattagttgtggtcgtttgaaactgtaagtcaggttgaaataatgttacaggaagaaattagagatccattttgtctttgttaccagatctatatccctggccctttatatcctgtgtagcaccattttgtaggcagtggacggtctcattctgtaaaatcccatgtcatctttcccaagttgtagtgggttccaacttgtggttgtcccctcaagtgattct

SEQ ID NO: 24563 - DNA, 2300 bp, Homo sapien
tgtaagcaaggggagaaggccggaatgatcatgtgataaaagaattgagtcgtagacatcagtatgaactaacacttacacacattacatttagaaatatttatagttatgtgtatacacagctttgtatacacacatttatttctttgctctgtaaactaagacggtctagaagcaatgatatcccagcagaaatgagcatatctaacactcaagtcttcaattcttgggtttttgttcatgatccaggatccaggagttgggccctggggctgggcattgtgtagcctccggggtggtgctgagcatccattcccaccctcctgcagctggggacccatcccttgacttgggccccctggaggcaagaacatggtcacccactttaatcacatggtccctatcacataatcagagggctctgtgggttttaattcttcaagctagatgtgtaaacaattcgacatagataagatatagtgactagaagtctttcatttatttattttgagagagagtctctgttgcccaggcttggagtgcagcggcacaaacaatcaaacaataaccaaaatccagaagactgaaaaggtcaaatgctgtcaaggatggggagcaacaggacctctcattccttgtttgtggcacaatcagtttactgtacccacgaactcccaggcccaagtgatcctgccacaatcaatctcccaagtagctggggccacaggcatgcaccaccatgcctggctgattggttttatttttatagagataaagtttccctgtgttgtctaagctggtctcaaactcctgggatcaagtgatcctcctatctcggtctcccaaagtgctgtaagtacaggcatgaggtcctgcacccagcctggaagtctttatagataagttcaatttaactgtttctccatctgctccactcagccgagtttccctctcagtccaagggtgagaactgcagctcagccccatccaggagggctgcagatgacccagcgccactgccatactccagatgctggtcaacgaggaagggatcctgaggcctggcagcgggcgctctcaggaaccttgaagccctctaaacgggacccgccatccgtgcctgtcagaactgtagccgctacctgcacttggcgcacaggcaaatacggccaagcaaccccaaactcccctcttcccctctgggcccaggcggcgctgaacctgctgctcagccgcatcctggcgactgcacagtgcccagagcctgcaaaccagcgctcagggcgcgagccaaggaagagcagggcctagagtgggagggcgtgtgccacacggctaccctcaggccgtcgggcccagccctgcagcctctaccgtgggctcagctgcagctggcatttgaaggtggcagcagcggtggcaacccccgaacctgtccgcgccaccagcaggcgaaccccagggtcggacaccgccactgcgcctaagtcaggcagtgggacctcagttgcaggatcgtgggaacctgccgcaaagcctcatcgccgcagctgtacagggcccagtggtggcaagcctgcgctgccagcgcgagccgaggaagagcagagccccgggtggaagggcgatgtactcggcgatgctcagcggtctgggcccaaccctgtagcctctaccatgggctcagctgcagctgccacctgaacatggcacgtggcaggagaggctgcaaccctgaccctgccagcgccaccagccgcgcggatacttgggccagaagcctccaggcgcctaagtcagggatgggtccctggctgcaagaggccgggaaccgacgctcagcgccaccctggaggctgcacgatgcccagcgccagggcccagctcctggatctcaggttgaggaggggacaggggcagctctgtcaagcaggccatgtggcagggagccccccacgttccgctccagggagccccgccagcccgatagcgcctcagtagcaggtgccacctgcacgccgtgctgggcgaagcgcagccagggcggtttcctgcctcgcgtgtctcccaggtctgctgagttgcgcatgcgctgttgcctaacggttctgctcagctgcctaaaggttctgctcaggtgcctaacggttctgctcagctgcctaacggttttgcgcagccattttctcccgggagaggttggagtgtccaaaagcttggcccgactgagatttctagtcttgtcagggcggatgcagggactgaagaagggcgagggcgagcggcggggactggggaag

SEQ ID NO: 24564 - DNA, 2300 bp, Homo sapien
ggtgcattcatttcacagagttgaacctttcttttctttgagcatctttgaaaaactctttttgtagactctgcaagtggacatttggagctctttgtagcctatggtggaaaaggaaatgtcctcacataaaaactagacagaagcattctgacaaactcctttgtgatgtgtgaattcatctcacagagttgtaactttcttttgattgaacagttttgaaacaatcgttttgtagaatctgcaattggacatttggagcgatttgcagcctgtggtggaaaacgaaatatcttcatataaaaactagaaagaagaattctgagaaacttcttcatgatgtatgcattcatctcacagagtttaacataactttcaattgagcagttttgaaaccctctttttataggagcagcaagtggacatttggaggtctttgaggcctatggtggaaaaaaaaatcttctcattataactagacaaaagcattctgagaaacttctttgtgatgcgtgcattcatcacacagagttgaacttctccttagattgagcagctttgaaacactctgcaagtggacatttggagcgatttgaggcctatggtggaaaaggaattatcttcacataaatactatacagaaacattctcacaagcttctttgtgatgtgtgcattcaactcacagagttgaacctttcttttgactgagcaattttgaaacactctttttgtagaacccgcaagggacatttggtgtgctttgaggcatatggtggagaaggaaatatcttcacttaacaactaggcggaagcattctgagaaacttctttgtgttgtgtgcatttatcttacagagttgaaccatacttttgattgagcagctttgaaaaactcttttttagactctgcaagtgaacattttgagctctttctgtcctacggtggaaaaggaaataccttcacataaaaactagacagaagcattctgtgaaacttctttgtgatgtgtgcattcatctcacagagttgaacatttcttttcattgagcagttttgaaacactgtttttgtagaatctgcaatggacatttggagggctttgaagcctatggtggaaaaggaagtaacttcccataaaaactagacagaatctttcttagaaaattctttctgatgtgtgcattcatctcacatagttgaacatttcttttgattaagcagctttgaaacactctttttgtagaatctgtaaatggacatttggagtactttgagggtgatggtcaataacgaaatatattcacttaaaaactagacagaagcattctgtgaaactactttgtgatgtgtgcattcatctcatagagttgaacatttcttttgattgagcagctttgaaacactctttttgtagaatctgcaagtggatatttggagcactttgagacctatggtggaaaaggaaatatcttcacataaaaactatacagaaacattctgacaaatttctttgcgattggtgtattcatgtcacagaattgaaccttccttttaattgagcagttttgaaacactctttttgtagaatcggcaagtggatatttagagagctttgaggcctatgttggaaaaggaaatatctttacataaaaactagacagaggcattctgagaaacttgtttgtgatctgtgcattcgtctcacagagttgaacctttcttttgattcagaagtttggaaacactctttttgtagattctgcaagtgaacatttggagctctttgaggtctatggtcaaaaaggaaatatcttcacacaaaaaaaagacagaagcattctgtcaaactactttgtgatatgtgcattcatatcatggagttgaaccttccttttgattaagcatttttgaaacaccctttttgtactatctgcaagtggacatttggagtgctttgaggcatatggtggaaaaggaaatatcttcacataaaaactagacagaaacattctgacaactttctttgcgatgtgtgcattcatctcacagagctgaacctttcttttgattgaatagtttggaaactctctttttgttgatctgcaagtggacatttggagtgctttgaggcctatggtgaaaaggaaatatcttcacataaaaactagacagaagctttctgagcaacttctttgtgatgtgtgcattcatctcacagagttgaacatttctttgtattgagcaggtttgaatcactctttttgtagaatctgcaagtggacatttggagagctgtg

SEQ ID NO: 24565 - DNA, 2300 bp, Homo sapien
catcctggccagtctagtcttgaactccttaccgcgtgatctgcccacttcggcctcccaaagtactgggattacaggcttgagccaccacgcccagcctgcgagcctttttgacatgaacttttcaatcattgacagatgcataatgaaaaaatctaagtaagcataaataagcatgtaggaaatttaaatagcacaattaacaagtctggtgaaaatataaatgtatgcatatccctctgatagagaaaacgcattgttttccaatagacacagatgtcacaaaaattaacattgtattagatcaaaaataaaaatgttcctgaactcgctttttaaaattcaagtatgtcaaattaaatcaagtaatccttcaacttagagcaatatataagaacatcaaacatgtaaacatcaaaagacagaaataagccaaaagaattgcactgtccctttatgtgccctaagttgcaatgtcaagctatagttggatattattcaaccatttcctgcccattgcctagaggtaggggtcttcacttctctgtctaatctaggactggaactgcctcacgacccctacagcttgagggtgcatggaaaacggaatgccagccagatattccaaacagagcctctaccagcaggaccaggtgaccattcctaggagagagattgttctcacccattatcagggctttcctccaggctaaaactgtgggtctctaatggaattcttattcaattttcccaccccattagagtacacaaaattgtctttaatagaaatcttaattttttttaattttattattattatactttaagttgtagggtacatgtgcacaacgtgcaggttcgttacatatgtatacatgtaccatgttggtgtgctgcacgcatttagcattaggtatatctcctaatgctatccctcccccctccccccaccccacaacaggccctggtgtgtgatgttctccctcatgtgtccatgtgttctcattgttcaattcccacctatgagtgagaacatgcggtgtttggttttttgtccttgctatagtttgctgagaatgatggtttccagtttcatctctgtccctacaaaggacatgaactcatcatttttatggctgcatagtattccatggtgtatatgtgccacattttcttaatccagtctatcgttgttggacatttgggttggttccaagtctttgctattgtgaatagagccacaataaacatacatgtgcatgtgtctttatagcagcatgatttaaaatcctttgggtatatacccagtaatgggattgctgggttaaatggtatttctagttctagatccctgaggaatcgccacactgacttccaaaatggttgaactagtttacagtcccaccaacagtgtaaaagtgttcctatttctccacatcctctccagcacctgttgtttcctgactttttaatgatcttaaatcttaaatgcaataacataaagtaaaataaagcctaagtcccaacaaggggaaattttcaaaaataatctgaaaacttcccgcgttttcttgttatgttgtaatgagtactcctgcaattcccctattaaggattcagtcaatggttgttaattcattctgcttcttctgagactaggaaaaaaattacagggctatgttatatcgcaagtgtagattatgcagtgtcttcatcaacagaaacaaaacatggtgtggggcggggatggaactatttaagtgaattttaattgaaaagtttcgtggttttaacattaaaagacatgcctataaaataagaacctgtaaaagtcttcactaaaatggtaaagtgctcatttccaagtagtaaaatattgaaactttttcttttcatcgttgatagtgatttaacatttcattactttatcgttattatgattgtcattattttagacgaatgcacgaagtcaaaggacttccaaatgcacggacgtcaaaggctaccttcacccgggtagccttgcgaatggccactgctgcgagtggggctttctggggattgtagtccataggcctccttgcgcaagcgcgtggtaccagacgcaagctaggggcgacattgtttggaatgctgggttgagtcccggctggaccgcgcccctctcggaagtgtagccaggagtaggggtgtaggatgtgcagctgtgacccgtccctgtggactgaagtaggaggagtggaggaggggactggtgaccaatgaaaaggcctcgtgggtggggtaggctggggaagttc

SEQ ID NO: 24566 - DNA, 2300 bp, Homo sapien
acagggccctgcagttttagcacttagacatctaaggatcagtctttgggaagttgtttaataatgtttataaagagccatgatgaaataggtattcaagtgttagaaaaactgaaaattaggcagttgctacaagaaaaagtactgctggctggcaggcacaggatacagtatatctccctgcccccaccacccctatactcttctgctaatagttgccgaacacagaaccagattgggggtgtagaggtcgggaaagattggctgcagactcccccattccagccccataaagcggcgtgaagaatggtgggtttggagatgagacaatatttattaaatgcacacatgaatcatttagttgtatttttattgatttctagccaaatttcactgtattcgaaaacatagtatttcagtattttgaaatcccatatcattttactcatttgtacaaatcttatgtgctcttgaaaagatgtgcattttaatttttgctagaatctttctttcccccagcttcatataggtgtcaaaagtgctgcagagattctaggcttttcagatcctagactagaccatcatccccaggagaaaattagccccaaatgcatgactctcccaactgtttctgaattttggcccaccatttctccattatcttgtcttttgatgtcttttgacatttaaaaagtttgctcacctttcctctgctacatgtttgttccaaatcactcattttattattactagaagtggaagtatacaaagtattattctgtcccttttatttttaaattttcctttcatttttttcaaaaaaatcacctattatcagattgatcctctttaatatgtaaaccgtatggattttcaaaaacatttccttggaaaggagttaaataaagaatcaaatagtctcatctcttaatagtgtcttttaagccactgagcgttttcacagattggtcgttatgtctttttattttcctcttccttttctggattgagtcaacccattcaccgtcctccctgagtcatcctccataagacaacttacaatatttgctatatcaagagcagggtgaaaataggtgatagatttttctcaaagaagaaaaaaatttcaaggttttacaagggacttatcccttctcataataataacattttgtctgtatcagtacagcccttctatttgccttatgacttgcatttcatcatcagtagttaaagcagaggaaacgtgggaaccgcttgctgtttctgtttatggcctcatcaacggttgcatctgtttttttttgtggattcttggcatccacgttcttgtggatcttgcaacaaacacattatggtaggtagcagcagcactatcagtttcagacgcgtccacaccaaaatggaataaaaaagtaatccagtcaaagaaaggttgagatcctgtattcctcaaattcggtgtccagtacaaatcagcccaatttcctttgagtacctgcatttttagagcacacatcccttccattctgtaattctttttttttcttcctgtattgcaagcttctccgttctctcctttgtgggatattttcttggtaggtaggtaggaaggtaggtaaagtccgctttggttgagtttatttgggtttgtgtagcgtttgaaaaaaaataaattcaaactctagggggaagggagtagagcttgactggcagtataaaattagacggctaaccaaaagagaatagtgactatacaaatactgactatccaaacgagaaagagacgacttaaggggaagtgctgccctgcaagaaattccgggaattgtccagaagatccacagggtcagagacacacgcgccaaaaaggcgcctttcatgcacggtcctccggggaaaacagagaaatatatataggagctctctgcctttggaagcatttcggttccaggaagggagagttaaggaattcctttgggaccggcacatgtgaaatatgatccaggctctccgcttggcaccctgcacttgcgtcctaggcaggcagagagtggagagtttttctaggaattctgggaagtgtagtttgggagccccgtgtagtcgggtaacttccgctctaggaggctgaggccgtctccctgatcccgtcgagaattctgggaagcgtagtccaggaggtctccgtagggagagccacttccgcccaaggtacgctaggccgcggccttcttttctcccagaaaggtgaccctccccgccctgcgtcctgctccttccgtccatactgatgtttg

SEQ ID NO: 24567 - DNA, 2300 bp, Homo sapien
atgctttgcccagtttcacattgggttatatttttcctattgttgatttttgagagctatttatatattctggatataagtctttttttagatgtgtgatttgcaaatatttcttctcagcctgtagcttgtcttttcattctcttaatagtgtcttttgcagaacaaaatttctaattttaatgacatctgatttatcgatgttatcttttttggattgtgcttttgatgtcatatctaagaagtctgcctagccccaggtcatgaagattttctcttgttctagacgttttatggttttacacttaaatctgtgatccattgtgagttaacttcttaataatatgcgatggttaagttggggtttatttctttacatatgaatgaccaaccatcccaacaccacttgtttgggtttatttctgtactatgttctgctaaattgatctatgtgtgtatctcttcaccagtagcaagatgtcatatttactgtagcttgatagtaaatcttaggatagtttgattcctccaaatttattctttttttccaaaattgtttttagctattctggttcctttgcctttccatataaatggaatgcatgcctttccatgcattttagaatcagcttatttatatctacccaaaaattcagctggtattttcattgacattatgttaaatcagaagatctgtctttctcacattgagttttccagttcattaatataacaagtcccttcatttaagtgttctttaatttcttgctttagtgtttcatgattttctgcatacagatctatacgtgttttgtttagacatatgcccaagtataatcagccaactggtcttcgacaaagtaaacaaaaacataaagtggggaaaggacacccttttcaacacatgatgttgggataattggctagccacatgtaggggaataaaactgcattctcatctctcaccttatacaaaaatctactcaagatggattaagaacttaaacctaatttctgaactataaaaattctagaagataacactggataaacccttctagacattggcaaaggcaaggatttcatgaccaaggacccaaatgcaaatgcaataaaaacaaagataaatatctgggacttaattaaactaaagagcttttgcatggcaaagggaacagtcagcagagtaaatacacaacccacagagtgggacccctgaccttgaccctgaaccctaaccttgacccctaacccctgaccctaaccctaacccctaaccctaacccttaaccctaacccctaacccctaaccacaaccctcaccctcaccctaacccaaccctaacccctaatacctaacccctaacatctcttaacccctaactctaaacgttgactcctaacccctaactctgaccccaaccgctatctccaaaccctaaccctaaacttaacccctaaccctaacaccaaccttaaccctaggttcgttgctacgttggtattgactatgtcaatgttgattattatgatctctgtcttaggactgcacggcagcgaggggattgcggatcttatattaatatttttgtattgaggcagtgcattagcattacaggtgcttgttacatgagcaatggaggtgtcatattttgggtgtcatgtctgcattaggaatgctgcatttgtcttccgaggctgcggtgtggatctcgcactgcggccgcctcgccttggctggggagaacctcggtgggcaggattcagaggggattttggtttcccgttttccacattgaacccctctaactggtctctgaccctgattattcagggctgcaaacaggaaggattctattcaccgtcgatgcggccccgagttgtaccaaagcgaggcagtgcccccaaggtctgtgctgagcagaacgcagctccgccctcgcggtgcccccggcccgcccgcccgggtctgtgctgagaacactgctccgccttcgctgtatctccgaagtctgtgcagaggagaactcagctccgccctcgcgatgctctccgggtctgtgctgaggagaactcagctcagccttcgcaaaggcccagcgcccgcgcaggcgcaggggcaggaaggagcccagcagcgaggcaggtggcaccaccaggggggccctcaagcctggcgcgcacgcattccagacgacacccagaccatgctccgccgcctgggcgcccaagctgcagtcgccctctgtgtgcaggcagcagctgcctggcaacccccgagcccgctcgcgctcccagca

SEQ ID NO: 24568 - DNA, 2300 bp, Homo sapien
aacaaagaaagagaaaacatgaaaggcacatatgaagctaattttaaagatccagtggccatacagcattttttttttctcctagacagcattaaaatcaaataatccttgaggtcatcagacaatagctccagtgcactgtgcagaaagtacagtcctggccgggcgcagtggctcacacctgtaatcccagcactttgggaagccgaggtgggcagatcacctgaggtcaggagttcaagagcagcctggccaacatggtgaaaccctgtctctactaaaaatacaaaaaattagccgggtgtagtggcacgcacctgtaatcccagctacgcaggaggctgaggcaggagaatcacttgaacccgggaggcagaggttgccagtgagccgagatggcgccattgcactccagcctgggcaaaaagagcaaaactccgtcccctcccccccccaaaaaagtacagtcccatgtttctatgtgcaccattcaggatgaatttcctaagcacctactgcattcccagaattaggagtacaaactcaggggtcagactgatctggattaatttccaagtctgtcactaaccattttttaaaaatcatatatatttaaggtgtgcagcatgatgttttgatatacaaagtgaaatgattaccacagtcaagcaaagtaaggtgtctgtcatcttccacagtgactttttgtgtgtgttgcacctaaaatggactctctctgcaaattttcaatctacattgcaacattattaactgttgtcctgtggctgtatgataaatctgtagacttattcattttgtcctttgacctacatgtccccatttcctctccctcccaggccttggtaaccacctttctactctttgtttctatgtatttaactttattttatattccacatctgagtaagaccttgctctcactcactcttttatggccttggggaagcataggtcctccagacagcagaattgcttcatctttaaaatgattgcatcgatgtggcgattgggataattcagagatgttttcagcacagagggcttgtgctaggcccctagaatgtacagataaaggggatccatgttcttcctttgaggcagaggttctgactttgactttgccactccctggcaaggggcatttagcaatgtctggagacatttggctgtccctatggatgtgtgtatgcaggtgctaaacatcctagaacgcataaggcagccttcctcccccttcattgctcattccctctgattgtggaattaaaagacgaaaatgggtccattcgagggaaaaggtcatgatccttaatgctgtttttacatgacggccttgtcagagccttcagctcctcctgctgtcttcgacgttctaggcacagctccctccggagggcatgcttcccacctggggcttgctggcggagtgccatcctcatccatatacatgtccccaattaaaagacgtcccgctgccgggaaagcggctgcaccttggagcgaaactgaaagaagagaccccggggtcttcgcgtccctccgtgggaaggcgaggcagggccctgcgcagaacaccggcaggctctggggaaaggcagggattctatagtgaatcctgcaagcctgcttggggccgacttcctggagcagcggctgcaagcagcgcagagcccagctgtccttggcaaacaccccacagaggaggcgagggcttgctggctcctctgggacgccccggtcaagccaccaccaaacgggccgtgacctcgccttcgaagggggcccccagggcagcggtggacgtgggggcagtgcgggcgagaggaagtttgtctttctcccagctcgggagggtcgccagcttccccggggctgcacctccttgggacgcttgtcgggttggagcgccgcagctgcctctgcggctgccgcctgggtgacggagggtggggcgggggtgggtcgctcgtagctcgagagccacgatctgatttcagggaccgtgcctatgtgctgagtcaaaccccgccgctgggctgggtctgcagccgggccgctgagcacaatccgctgtggttaatgattaatcgctgaccaccccgcctcccgcagctcgggagagggtgctctgggaatgtggaccggggctctcaagtgccggcagctggaaaggaagaggagtgctgcgaggcggagtgcgccctcggcgaagaggggcagaggcggagcgccaggtgctgcggtctcactcccagccagccaggagtttagaacgttct

SEQ ID NO: 24569 - DNA, 2300 bp, Homo sapien
aaaatgaaactaggctcttatctcctaccatatacaaaaattaattcaaaattggataaagatttaaataaatgcaagacctgaaactataaaactactagaagaacacataggggaaatgcttcaggatgttggtctaggcaaagattttttgggtaagacttcaaaagcacagacaacaaaaaataggcaaatggaactatatcaaactaaaaagcttctgcacagcaaaggaaacaatgaagtgggtgaagagaaaacctgtagaatgggagaaaatatttgcaaactatacatccagcaagagactaatatccagaatctacaaagaattcaaataactcaaaagcaaaaaactgaataatctgatgtaaaatgggcaaatgatttgaatagacatttctctaaaaaaaaagacacaagtggccaataagtatatgaaaaaaattcaacatcactaatcatcagggaaatacaaaccaaaaccacagagatcagagacctttttagcctagaatggcttaaaaagagaaaaaaaaaaaaaacaaatgctagtgagattgtaaaggaaagagaactctgacatactgttggtgatcatgtaaattagtacagctatatgaaaaacagtatggaggtttctcaaataactaaaaatagaactaccgtatgacccagaaatcccaatactgggtatttatccaaaggaaaggaattcaggttatcaaagagagatctgcacttctgtggttattgcagcactagtcacaatagccaagatatagaatcaaccaaaatttttataaaaagatgaatggataaggaaaatgtgatgtatatatgcaatggaatactatttagctacaaaaaaataaaattctctcattcactttaacatgaatggaactggaagaagttaagtgaaatatcgggcacagaaaaccaagtaccacatgttctcactcatgtgggagataaaaaaaattgacatcatagaagtagagaatggaattgtggtgatcaagagtctgataaggggaggagaggatctggagaagttggctaatggatacaaaattacagctagagaggaggtatgagttctagtgttctatagcagtgtaggatgactatagttaatgatatatcgtatgttttcaacaagctggaagagtggatttggaaagttccctacacaaagaaatgagaaatgtttgaggtgataagcatgctaatttccctgatttgatcattacatactatatacatgtactgaactatcactctgtatctcataaatatgtacaattattacatgtcaactaaaaagaggagaaaaggtgatcacaaagggtgtacatttgtgggcgtgcgtgtgcgaaatgggttactaaaatccactgaagtcaggagctattcaccaaaagctgaaaatgtcaacattctttttaagaaaccattttcatgcctccagcctttgaaggactcaaggccactgacttatgctaaggacagaaaagacactgtgttatttaggcctgatttttaaacaatgcattatagtgatggcagagtgcagggtgtggggagtgggagggacaggaaaatgtatgtgcacatttgtggatgtgaacatgtgtgtgttcatgtgtgtttgtgctgactgtggaggtttgcataaatatacttcacaacccaaccaaggactcctacctccaagatccttttccttaaccgagacatgcttgccctactgtgagtcccaggttgttccaagcatgtgtgagataacctatcccacatgagaaggtcaggtctggctctcagttctgtacaccacttcacaaggtcactagtcttgtcattttcttaactttctccttctgtcttccctcagcaggcaactcatatctgggcacatgatagatgtctatccccttgccagaatgatttaaaaaaaaagaaaggcaagttctttgtttaaactaccgaagctctgagaactgcctatcagaagccatggctgtggagggtattcattatcaccaaagaaatctttgagttctgagctataagggcataaaagacactggccttggcatcacacaagccaacagacctggggagagaatacaacctctacacagaaggatccaattaaacacagcatacagtcccatgctgggtactgcagacaaaaagacggttatgacttgtctcttgagaggtctgctatctgatggcagagacagacttttaaacaactaaccataaagcagaaggataagtgctgcttttat

SEQ ID NO: 24570 - DNA, 2300 bp, Homo sapien
ccagacatttctttagattgtcttttacttagtgcttctctatgatcctgaatattatttgatttttatcttcttgctctttttattaaaatctgggcactctaaaaatgaaaacaaatttctatttgcaatgttcacttttaaaaataaaattaatggtgctacgaagaattctttttaatatccttttttttctacaaagactgtttatatgtaaggataaattctattttaaaggttatgtgtattttttctagatgtgaactatttataattacttatgtacaggagcttgtaaactaggcccaatagaaatatttttaggatctatatggctactttagcacataattgtttctttaaagagtattgtatgatcagtgttatttggttaatttgtgcaatttgttttattttatcttaaatgaaaattatgtaaaatgtccttgtctttcagactttaaaaaatctttttgtttcctttctgaataaaagttatatcacatttgcaccctctgaaaacagaaaataacttgctcaaggaccttttggcccagtcagttacttgaatcatgactcacacgtgctcttacaatgggttcccagaaggaataaataaattggcccttttgctccagagatagtaatttagccaattgtaagatcagagtctgcagacaggtgagtaatggtcaaagcatttcagtctccccgaggggttaaccaaatagaaatgaaagaagggggagagggagggagggagggagagaaggagcctgaggcagatatggaacgatctctgcagaggaattacaaagaaagtcatttaagcccctttacagaccagctctgctgggaggatgcagaaataaatgatcagcgtcccggcgtgagagagctgcccccagaagtggccgggggagaaaagggtgaagaggagctaaagcttaggaggcgatttccacggaaatggatgctccctaaggatgtgcggaaaggggatgggaatgtgcggattgggggcgggggcaccaacgcactccggcgggcaagcggtctcccgcaccacctgctgcaaggctcgggaaggaaggcgaagatagcaccggggcatccccgggagtccgcaaggtgggtcacttggactttgcggaaagaagacgaatttgaggggtgtggggagcagccagaggccgagtccgaggctgggatggcctttcaggagaggacgtgggagtatgtgctaataatcggtggctttggggaaagcagaatggagccggctggcgtttgggagacaaggaatggaggagaacaaccctcttcctcaccctgatttgctttctggtaggacctcacggcaggtgtccccgggacggcgttctcctaggctaggcgaccagggcggtgtcaatgcaccctccagcggtgcgcgcaggcgggagaagggagggcggcccgggcaagtgagacagttaaggcagtgtccccaccacacccccacccagattggccacgccgagctggttcttgacagaaggccttcgcggaggaagagggggcacagctgcacaggacaccctacggagcctgcgggcgtggaactttgccaggcgcacgggaacgcgcgcccttcctgtcagcctcccggggcgccaggctcccgcggcccgcagcgggacagcctcagttgtgtgggctggacccagtcgctggggtaccgaccagtcctggaaggcgcagaggacgtggagtggggaggctgccttcctatgtgcgaagggccagccgggcacgcagtcctcagaccctagtccgcacccggcaggtccccacggcacctgctgcgccctcctcgccgctcccccaacctccccatctcagaaaactaccagttctctcccgccccccggcgcccctttcccaggaacgtgcggaggcgggagaagaggaagacaggaagggggtggggatgtgaagcgaccgtcccagccttccccgcccgccacccccaccccaactcggcagccgtcacgtgatgcctggagtgggaggtggggagaaaaggcgagacttttgtgggtgctcccgatcgccagtagttccttcagtctcagccgccaactccggaggcgcggtgctcggcccgggagcgcgagcgggaggagcagagacccgcagccgggagcccgagcgcgggcgatgcaggctccgcgagcggcacctgcggctcctctaagctacgaccgtcgtctccgcggcagcagcgcgggccccagcagcctcggcagccacagccg

SEQ ID NO: 24571 - DNA, 2300 bp, Homo sapien
cagtgccccaagagtcagactccagggtcacggtcaaggcctgccattgagtctagtgacagtggagagccccccacgagggatgaacactgtggctctgggccggaggcaggggtgaaatccccttcccctccgccccctccaggcaggtccgtctccctgctggccaggcccagctatgactattcaccagcaccttcatccaccaagtccgaaaccagggtccccagtgaaacagcaaggaccccattcaaatccccgctgctgaaaggaatttctgctccagttatttcttctaatccggccacgacagaagtgcagaggaagaaaccttctgtggccttcaaaaagcctatcttcactcaccctatgccctccccagaagcagtcattcaaacccgatgccctgctcatgccccctccagctccttcaccgtaatggctctggggcctccaaaggtctctccgaagagaggtgtccccaaaacctctcctcgccaaacacttgggaccccacaaagggacataggattacagactcccaggatctctccttcaacccatgagccactggaaatgacgtcctccaaaagtgtatctccagggagaaaaggacaattgaatgatagcgcctccacaccccccaagccttccttcttaggggtaaatgagtcaccatcatctcaggtcagcagttcctcatcatcctcatcacccgccaaaagccataacagccctcatggttgtcaaagtgctcatgagaaaggactgaaaactcgccttccagtgggactcaaagtgctcatgaagtctccccagctgctcaggaaaagttccaccgtgccagggaaacatgaaaaagacagtttaaatgaagcctccaaaagttccgtggctgtgaacaagtctaagccagaggactccaagaatccagcaagcatggagatcacagcgggtgaaagaaatgtgaccctaccggattcacaagcacagggcagtttagctgatgggcttcccctggaaacagcactacaagagccattggaaagtagcatccctgggagtgatggaagggatggggtagataatagatccatgagaagatccctttcctccagcaaaccacacctaaaaccagctctgggtatgaatggcgccaaagcccgcagccacagcttcagtacacactcaggagacaagccttctacgccccccatcgaagggtcaggcaaagtccgcactcagatcattaccaataccgccgagagaggcaattctcttacccggcagaactcttccacggaaagctctcccaacaaggccccttctgctcccatgttggagagtctccccagtgttgggaggccctcggggcacccctcctccgggaagggctccctggggagctcaggcagcttcagcagtcagcatgggagcccaagtaagttgcctttgaggatccctccaaagtctgagggactcctcatcccacctggaaaggaagaccagcaggccttcacccagggagagtgccccagtgccaatgtggctgtacttggggaaccaggcagtgaccgccgcagttgcccacccaccccaacagactgccctgaagccctgcagagcccagggaggactcagcatccaagcacttttgaaacaagcagtacatccaagctagaaacttctggaaggcatccagatgcctctgcaaccgcgactgatgctgtgagttcagaagcccccctctcacccacaatcgaagaaaaggtcatgttgtgcattcaggaaaatgtggaaaagggccaagtgcaaacaaagcccacctctgtggaagcaaagcagaagcctgggccttcttttgccagctggtttggttttcggaagagtagacttccagctctgagtagcaggaaaatggacatctccaaaaccaaagtagaaaagaaagatgcaaaagtcttggggtttggaaacagacaactaaaatcagaaagaaaaaaagagaaaaagaagcctgaactacagtgtgagacagaaaatgagcttatcaaggacaccaagtcagcagataatccagatggcggtttacaaagcaaaaataatcggagaacaccacaagacatttacaaccaactgaagattgaaccaaggaatagacacagccctgttgcatgttcaacgaaagacaccttcatgacggaactcttgaacaggtaactcactggaaaagcaggtagcaatgtagaggggtccctccaccacctttaaaagagttgtttgcttcctgtgcattaaag

SEQ ID NO: 24572 - DNA, 2300 bp, Homo sapien
aagaggtgaaaactgatagaatatgcctgctacctagttagctctcaataaatgttagctgtcttctgaatttttatttgtacttataaatcaattttttccataaggctggttcttagcattatagatgtaaatgatcactttgggaggtggacgctgataaagagtattgactgggttctgtggctttgcttcccaccaaaatgcctcttgcaaattatgcaagacagtaccttgcataataaacatttgaatatttgaataaacaagacttcaatttttaagatatctatgtttggaaatacccacaaagaacagggctcatattgaagtgcatggagaaaactcttgtcataattttccattctctctatcctctattagcatacttatcgtcttcttcaatctataagtaaatttgaaaaataatggaattcagatttatttatgaaaatgaatctgctttttcgtttagcccaatgggctcagttggtaatatttcccaaggggtccttttaagattcttaaagtaaacatatagttaaaactcgcaccaccttgaaaaataagcataagagccttaattgcctttttcttggcatacatcaatttctacacataaaaatgcagtactgaataacagcagtaagccaaatttctttcaaatagcacatctatgtgaatagtagctgtccattatgtttcttaaaatctaggaggctaaatcatatttgtgaaaagaaactttataataaaatttaaaaagcctaattcgtgtgcaaagaaaaaaggcatagaaatgtttctttttaaattaatacaaaaccttcccacatgctccaaaacagtaacaatttgatgttaaaataattcattgtatagtcttttatgataaaaattttagaaaaaaaataatgaagtgtaaaatataagcaagataggagaggaaatttggggaaattttaactgatctattttttaagtagaaatggacaattcctgagatagccctgttttctctttggccccctttcacaaatagtctcatggactaatactacctttaaaatacaactgcaatatagactctctgaaacccaaatgctgggggtagggccaggagagaactgagaacacaatggaatcttgaatgggatcttgtaccccagtaacgttaaaggacttctgaattctatgaccactgaaggtactcagcactttaagacctgtgcatttcaccacccgataattttatttcaatacaaatgagatagttttgtaaatctgatgggtcactgagacgtgaatgctgctcaaggccatcagataaaaagcctatcaggaggaagtgtgatagccctggatatgtgtgttttgtggcttcatccttagagcaacactgctgtatgatgacatcccagaaagatcatagctcttatcctaagtgtctcaagaggcaatctaagatattgccagaactcagccagccatcaagtaaagctatggccaaaaaaaaaaaaaaaatgcctattgcataccttctatttcagcaattaggcctctaagtattcatctaaggaaataatctaaatgtttatttaaaatgtgcacaaatagaagggtgctcgctgttgcaccagacatgtgatgaacctaagaccggatggaccatttgatggatctgctagacttgtggctaagggcatccagtgtctccttcctgagtttatatcatggggaaggaagtctgaatggtgaacagtggcatactgtgcagagctgtatcagatgagaagacgagaggccgtcctgtgtgctgcatggcctgacctggtgtgattcctacagagaaaggagcaggaggctaaaggggatgaggctgtttccaaacatgatttgggaactgctgctctagtcaccaaaatcccactttggggcccaggagggaaaggcatgttcccatcattttcttggacaggaagcaaggtgattgcaaaccaacaggggctacatcctgggaacaaggcactgcagaactctcaggataagtagttctggaacactgtaaacacagaatacagcccactggttggggcatcagaattcctgtgggggtgccccgagtagcagtcacagagaggggccttcgctaagctgctttcaatccaggtttgtgtgtgaggatgtgtcagtcacaaatggaagaagatgtttttatgactgtacatacgaatgtcctgggaacttctgaaataactagggggaagtttcttgtggggaagagtgagcagagcctctgt

SEQ ID NO: 24573 - DNA, 2300 bp, Homo sapien
ttcacttatcttctccaagttacattccagtaactaagcttcagaagcttcttatgaattgtttattctgtgttttaaagctccatcagctgttaggatgatttgcaatatttttctttttggttaagcaggattggtgagcattactgggccttttggtggaatccttgctatttaaaattcctgctgctgggattaatggagataatgtctttgaaagccttttgtaaactgtaaagtcctagtcaaatgtagtgtgctgttatcacattaaccatcatagcaataaccataaaccagctgtaatgggggctttaaaatgctgaaacccatttgggtcttgtctttgctccattcccacccccgggggcctacaatggtgcccaacatatgggagcctctgaaggaagttttgtttggaggaacaaatcagtgactcagaaacatcacatggttttccaaagtaatgtccataggcaaaaagaagctaagtacgacaatttaaataatgaaaatactctgccaaaaatattggggtcctggaaagaaatgctacagaacaaagttcttctaaagagaattgatttgataatgaaatctggtcctttacagtcagactgggaaggagaaggagtagagacaggtgcagaaatttattagtccagaaaatgttagtccaggatggctcagagaaggaggctgccatcccagaaaagggaagggaggctgcagtttgagagggagtatcaaacagaaaacaaaaaacaaacaaaacccccacaaaataggcaaaagctactcctgcaaagaacattataaatgcaggctttttatctagactgtgtctttaaagtggtggaaatgaccaattctgtgtcttaggagggaggtggcatgaagccgggaaatgactgaggaagggatactgatatgaaatgatttatttctggaaaatgctcttgtaagcgtttgcaggaatagttctggttactagaggggtagtctattttaggtacctatgtataaggaggagtgaacgagtgaacaagttagtggggatgaaaataaaaagggaagtggtagcgtccagcaacacgggcctcattcataaaactcagaagcctcaaggataagaagagaaattccggggtggctgcctgttactcagcaagaaagcgaacactggcttgctggctcagcacttaacctgagatgaggatgtcctaacagccctttttctctaaggggtagtgtagggtggggtggggccaaaaggagaggaggaggaaggcctgccacccgggaggtccctaggactcagcagcagagagggccttgcaccagcgctccgctctgttccagaaaatatcctatttctgaccatcaatcagcattaagccagtttgggggctgagctttaggcacaggcagttgccagtagcaacagggcacacgctcctggtgagctgggcgggaggtggcaacaagggaggggccgcctgggcaagtggcctgcagctgggcagacaaggtcagggatctcccctacacgcgcaagggaggcagtgcggagggtgggggaggggggatcgtggcattaggtggggacaggcgcgccctgctggggccgggccagggagtggcccaggcctctgacctcgctggggagcagggagggagttttcccagtggcacagctatgcccctgccaaacccaatggcctcccggcccgggaaaggcgccactccagtggcccctagacactggagtcaaggccaagcgacaggagaggcgctggccctctgcttgggaggaccacagaactcaagatctgcccctcccctgcagcccctttacgcccccaccctttaggagtctctggaagatgccaacgtggaagtgtttctgcacgtgtgtgtgttttcatttgtgcttcccacacaaaagcgaggccccacaggtggagaggagggcgtgtgtgcgcgcctgtagagcggggctcgggctgcgtgggagctgggcggggatgcgcacacacggaccgactcccacagactgtcccccttcaggtgtcctggtgcaggctttcagggaagggagagcccctaacctcgccccacctcccaaaacttctccccctgccgtcgggctatggtaaaggggaaaggacaggactcaggaccttgagggaggcattgagtcagagggcagagaggggtcaaggagacccaggcgggaggcgcggaagcatacagtctgcggggacaaggactgaacggggtagtgggagccaggtgcc

SEQ ID NO: 24574 - DNA, 2300 bp, Homo sapien
ccttccctttcttgtattttgtaaagctgagtacacaagagataaatagaattcattttaaatattctcttttgaaagttgaagtttcttatggtttacttctggaaatgttagttgtatttgctagttattttccatgagctgatagttatctcaccagtcacgacatgcataatattatttgaaaaatttacttcatgtgggctaaaatttactaaaactgcctttaaaaaccaactaaaggtcacatagcaccttgtccttctagtgggattgcaagataaatgtcaaacatccattctaattggatccagaagtccctgggcatttggcaattagtagtaacaattccccaattaataacatataatattcctaatgccaagtgtgttatatgttagtaagcaaaaagggttctgaataagtcttggtttaaaaaaaaagaacaggcttgactgaggtgcagcttcacttcacttcagtttcatgacgattcaacattcaatgcgaatgtattaatgggctgaaatcaaactgtgcttccaggatgtgaaggagaggtctggagtgtcattctgcttacaatcactgactggctcaaaacggtcttgagccacaaccaagaagcaggcattagctatgggtcatcagttttcactggaatggtggcaatgtcagttagtatttgtcaaaaccctaaataccttgtagtaaaatattgcaacagactgtaaatgttcgtcttggaaacacttggggaagtgtgcatgtggaactagaaaattgtctgagaaagtgactaataaagctgcttccatgcagagaggctcctgagcttggaacatgtcccaaattagatgtattgagatccccaggctgtgttttgcaattcaaatataccgggactttccgtggcagcctcttaggcttcccggtggtggggtcctttgaatgttcacacataaatgggggtctttgttctctggtgcatgaaactgcagtaagttttggtagaaaagggattgcatgggtacatttgagagccatgctttggtggtaaattcaaccttaaaaaaaatcccaaagtgaatagcttttgaggcttctgatcacagacgaagttaaaggctgcagttttagtgatgccaagtggttctgcatatctatctctattatttaaaagagccatcaacacttcattaagtgtcaggaaatgttgccttagaaaagtcatagagagattaggagggcatgtgagagatccctgtttacctttggccaagcctgtttgtaccagattaattcctttgaccagagaaaaatgttactctgtgacctgaattcttcttttcttggtcctgaaaatgggtcacagacacttcctttattcactgggtttatctgctctctcggctcttggaagaatccccctcgatttgtagcaccaagggatctataggatacagccagctttcactgttgagacatctttgttcaggacacaacttaccaaaaaacaaaaaaacaacaacaacaagaaagggctgccctctttgatttaatattctgcactttgccgtggcatttatgtaagcaatcctgttcatctgtaggaacatagagcaacctgtgctgggagtaagctccttgaggacagaggccatgtatgcatcatccttttgtcttcctgatatagcctggtccattagagatgtcactctaagtgttgccatctttgggaattctctggctttgtttgctccatacctccccagccagcctggaatgggagtgtcccctgcactctgtgctctagcacaatagcacataccacattattttgtctgtttcctccactagaatctggggagtggatctttcagttctctatccccaatgccaaatgcagtaggtgctgagtacatgtggaaagaaatgaatgagtggaaggcactagataaaggttagctgagttgaattgaatagagcaggcacaccctctagctatcactgggtgggatttagtgcaggtgatgtaatgtgacttgacagcgtagttaaatattgacagacaggaggaagcacactggccctgttcagaaagaggaaagtaagggctgactgaggctgtcagatcagagagctgaggctggaagtggctacagtggtcctgatgacccagctgaggtcactggttggctcttgcttcagtagaggtaagatttggatcctggctgggaagataatggattgtgatgtgagtaaacgcaggctgtgcctgtggcttggagatggcttgt

SEQ ID NO: 24575 - DNA, 2300 bp, Homo sapien
tcaaatataaggggaaaggggtgggtccttggatcagaaatgaaaactagtgcttgtgtcttcctcttctcaaccctattccactcccacataccattgcatcctgggagaaacttcatcaacattcattcaatcaatacctctttcttgagcacctactataggtcagacatttagtgaagaaatagcaatttttctttttgaggcttattttgaaaatgtaccaccaagtctttttattattatttctaataacaaaaatgaaacatgatcattgaaaaaaagtcaaaccacacacaaagcatacaaatgtgaaagttctttccaccttttttcccgagggtaaccactgttaatcatttatataattcctctcatcatatgcaaagttctttttcgtgttcaatatgccaccttctacgctgcaccttgctttatccactcagtaagcaacaacctacttctgtccacatcagtatattcacagttacctccatttttgttttcttgtattgatgaatattagtctcccttttattggcttacaaataatgctgcaaagaacttgtgcttatatctttgtgctcttttgtgagtgtatttgtgggatcactatggaaaagtggaattgctgggtctaagggtctgtacttgtaaaatctttaggtacatctaatttactttctcttaacatggggctcattgaagacccatcagtgacatacacaatttgtgttgtctttaactatttcccacatgaaagtagcatatattggggtcttgggaccctaccaaatcaataaccaattgctactctttgaggaaataattttcagacatgcaatgagcatctgctgggggtagtgagatgtgaggtcattgttttccaaggccagggagagagcttaatctaaacatacactccatgccacagaatcagctaaccttgttcctgcctccaccctcaatgctcaccccccacctcccacatttctgtttaggattcactatggcaagtgatttaggtataaacaaataacacttacaaggcagccctcaaagacctttcaaactgagttggggagacagaacacagatggctaaaaaacaaactaaaaatactagtcagtatataaaaagcagcaagtaaatataaatagtaagcatcgttatagcagtccagaggaaggaaggaaaacagtgggctggagtgttcgcgcttcgtggcagagactaggtgttggatctgtggaatttctctaggtgggggctaggggttggaggggagataactgtaaaaactataagaaccaacggacagaagagagattccatgagagagtggaaaataggggagaaaaggcccacttttattttgatagttgtgagtgggatttacagtgttctgtgagattattagaaagacttggcacagattcttatttatttgttttttggagtgtcgggggtggtgcaggtgggtggttaaaattttaagaatcagaagaaagcctccagcactcttctcaggaaaagaaaaattgcatatttgcaaatgcacacaaaatgttgctgtgatttcaaggatcccttccttctactccaagctgagacactagaatgtatctaaaaggagttgcacccaagacaatctatctaggaaaaatgtcggccaggtgtatatatcacagtaaaagtaattaagcaatgtaagacacaaccagtattcatatattcatgaatcatcaggctctgaagttgactcgaaacaggtgggtaaacaatttggtagggctgtgctggcacttcaaacttttcctccaggtctccagctattccagtgtaagctggtggaggcgattctctgtctttttcagacctgaaagaagccatcctctcaaaaatgtgaatcaatgggattatttacgcatgtataactggaatccactccaagatgccgattttgctgcagaagagatactcttcctccccaccccctcctttctttttgacagtcagttaataaagactcaacaataagcagctgccagtgatgtcatttgggactttgtccacggagcttgtatttacaagctcgaagcaactacggagccgcagcccagggagcaagtctccgcaaacttgctccgcattcacggcaggacttcccagccgctgtggatgttcaggaaaaccgagtctgttctgttagcgtggcctttgaatgcttcaaaaataaacagaggataaccaaccgcgggaggaaatttttagctggagagagttgtagttcctgtgtc

SEQ ID NO: 24576 - DNA, 2300 bp, Homo sapien
ttcatgatctgtgggaagtttccagagcggtacttggtatcttccataagtattagtcagaaaggatttgtgtaaagtgctatgaatgagtgataacctgtgtctttaaagtatgtcttctggaagacagggagggagcttccttttataaatgagattgggatatagtcaatgaaacacctaaaatgttaaacctttagtatccgtgaattttgagggagaagagtgtttatagcttttacttaaacactgtggcccccaaatattaggatctccggcctgggttatttagaaagcccttgagagatttgaaatgataatgagtgatctgaaagaaaaggataggaacacacacctgtttcttttaagaataaagcctaggcacttggagttacaccagtctaggtctccaaaactatgacatccaaaaaaagctatggtagagagttttctgcctgtaccaattcttacctcttagggttgattgctaatagaccgttagacgcttaatggaataaaagacaaagatcactgggtgccttaggaatttccaatctaggccaggcatggaggctcatacctgttatcccagcactttgggaggccaaggtgggaggatcacttaagcccaggagttcaagaccagccagggaaacatggggaaaccccatctctacaaaaaatacaaaaaattagccaggtgtggtgttgtgcacctgtagtcccagctacttgggaggctgaggtggaggattgcttgagcctgggaggcggaggcttcagtgagctatgatcttactgcaagccagcctgggtgacagagtgagaccctgtctcacaaaaaaaaaaaaaaaaaaaaaaaaatgcggtggaaatcgggggggaatttccaatctcaaggcaccgcatcaggctctgtcctctgtgacaagagctctgctaactcaaggaatgtggtgtccactgcaaggaacaaaggtggttatgggttcccactggtgctcctagatcctttgttctcaagggtgggccaaaaactggcagtttcagcaacacctgggagcttgttagaaatgcagtctccttaggcctgctgattcagaatctggatgaccagatcctcacacgagtcacacaagagtgatgttcaaggagcagttataggctcagcctgtttcatgggcagcagtggtggccacatcttagagggattgtgttgtgggcatggtcttgccgtgttttagtttaagttctgattttctatcatttttttgataaattctaatacaaagtgatctagttatatatccatatgtcagtatgtgatttggttttttacctttctgtgggtattcacgttcaagtgtatagatcaggaaaagaattctttattatcttccatgaggtctcaggatgggaagataacagtgcctgttgtatacagtcattataggacatgctggagatagaagcagtaagacactgcttctacatttgataagtctggtccagggagataaatatgtaaagggaaaactttatctcaataaactacatctcgtgatagcataagggaccagagagaatagcctgtagttctttatcccactgctggggtgtcactaacagtgtactaggatagatggacaactttatatgataaagacagttttagagctttacgagacttttgacctcttctgggagctgtcctgattcctcttcaaaccgaatgatagcaccttttgtgtgttaagtagcctaaacagtcatttgtttagttaccacctgctggtgtgtagccttaggagaagagtgtttactgttgagtggttgttctgctctgccccttggctaaggattcctgctttccattaaatggaatgactaccctctctttttgtctttgaactcaaatggaagtcatgttatctttacatctttaaagcttttccttccaaattgcctagttgatgcatggtcactaatccttgtagtagaattaaccctaattgaagatttagcaggtggattttggctctcataatgcaagatgtcttaagaattttgcagaagagagatgcaataaccatataacatatctcctttttgtccataagtatggaacaaagactatgtgggaaaccagagtgtttgcaatcagcctattgccttttcttaaaaactagaagttctttttctatatttctctctgcttgcttttactgtattctttttctatgtttctacttgcttttacatactcctttgctttggtgtcataaacttgggatgaaatt

SEQ ID NO: 24577 - DNA, 2300 bp, Homo sapien
aatcatgcaatatgtgtttttttgttactttttttgcttagtataatgttcttaagagtcatctatgtgtagcataatcagttcattcctttttatagccagataatatttaattgcatggatatggcagttttgtttccatttcctcagttgatgcacattaggctggttttacttttgtttattatggataatgctgctgagtatggatactgctgctgagtacttctgtgtacaagtttttgtgtagacacgtattttcatttctcttgggagagttcctagaagcagaattgtttggatcatacagtaactccatgtttaactatttgaggtactgccagattatttcccacactggctgcgccatttgatattcccaccagtggtagatgagggttccaatttctccacatcttcaccaacacttgttcttatctgtatgtccttatgagtgtgaagttagtatctcattgtggttttgatttgcatttcctctaatgactaatgatgttgagcatcttttcatgtgctttttttttctttctttcaggagaattgacacatttctttgccagagatctctaaccatctttataaaggttgaagatgattttgttgtgttgaggcgtcagtgggaaggaacaaggtgattgctactcttttagaaagtaggaggatagaggggatgcatattgaggtggctaattctgcaaacagacttggtgcaaacttttttctggaagtgaattgatgaagtcacggccatgagctgacattactctggttggcaacaaggtcttctgagatccactgtatagtcccactgtgcccattggatgacttagctagaggacacagccgttagaaggtctggaggtaggcatcttcttagctccagcaacaacttcttgatcactgttagtctagggcttcctcattaattgtctggtcattcctgatgatcttcattgtcattttgtggcaccaagactatgaggatggctgttcattttcctcctcattgtccacctgttactgtgagagataggggtgtctcctgaataatgcttttgaaaagtcttaagttctgtcatcttaataggaattgtagagatgcattctgtgattctctgtgtgtgctgtgtgtatactgatattgtttctattatttcaagctctaagtaccactggagaagagaagtttcctggcacttctatagtcacttaaaatctgggccctcactaatcagaactgtactctgaactccgcatagctagggattttcacttcaaatttgcatgtctctgaactgggataattttacctaggctgagattttttggccatctctttgcgcctctgatacaccatctggatgtgtctgaccttctccaaggcaagggcagagaagaagccttctaccttctaaggaagctattgttcagttcctagcccttgatctttcctttgttttaactccatagcttgagcagcctattcagtagggttaattgaggaagtagagtggggtttcctgtctgaaagtggacagctaattcctaccagtgattcgggctctttactaaaatagtgaaagaaaaatcaccttttttgatgtagcacctcattggcttgctctaggaaaattccttcagccctggttcaaaattaagtaatgagtaatgagtatgggttatcaaaaaaaaaaaaagccaattcccttggagctaggtgcagcacctagttcgtaatgtggctgtcagagtgtaattctgatggggtggaaactccatcttgttcactgttcagtcaccagggcctgatggccgctcatgctcaatatagacttggcgcggagcggagtggaggaaggaaagagggcaggtgctagttggctggcctgcagttagaagggctgaataaagtgctgtagtgccctaggcgacatattcatttagcagatactttattgtgccactgtggtcagtgcctttctctgagaaggtgtgtgtgtggggaggggctccctaaaggatgtcatagagtcccacatagaaactttgaacaatccaaggtagacaggtgtttttaactcataatactcctttattccctgttttaaaaatttttttaaatttgatacaataattatacataataatggagtaccatgtgagattcaatccacatatacattgtgaaatgatcaaattaggatagttagcatgcacatcacccccaaataattattacttttgtggtgagaacacttaaaattgtctcttttagaaatata

SEQ ID NO: 24578 - DNA, 2300 bp, Homo sapien
gctcatatccagttctcaaataccccatctatgatgatctttcaagcacacaagaaacttttaaattagaatattctgcatacaatgaatgtttttaactacacagatcctgatccagttggcaaagccagactggtggagctgtaatcaggatggcctcagccatcattttgtgccattgtatgctcctaaactgataacatttctgtgttagagcggatctgtggttgcaactgtggggacagggccaagctcgtggggctggcactgcagaggggagtgacggcagggcctgcctgctgggctgggggctcagggctcttcatgtggaatgacggattgggaaggccctgacatttggagcaaagtggcaggtggccactgactcggtccctagtccctgtgtgcttgatccagcatcctcaggcagactctcaagaagtgaagctgaaatgagtcaggctctgtcatcacaaaaggtgagccgagccaggcaaggcagagtctcctcctagaagaagcagcaaacatgtgcccctgccaccagcctctcagctgtggggtgtcggggaacacctggtggacctgctgtcaggaatagcaagctgggccggccttggtgctggctggcagagcgggtgacttggtggagctgagcagacatctagtggctgtctggggaacctcacgcttttgcctcttttctgagcagcacctggcttgggcttgcttctcctggggtgactgtctgcgggagccaggcaggggtggcgctcaggctgggcccatgcctgcctgcctacttcctccttcgtgtggtcacttgttaatgcagcggtcatttgcacccctgatgaatgccaggccctgtcctgggacttcgaatactgcaaggagagacaaagttcctgtccttaagcttaggtttccagtgagaggaggggggcggttaaaatggcaaagctcgcctgttagctggaggcaggagggagtggtgggtggaggggaggaagtttaggggctgagggctgaggacagggctgggagggaggccctgggtgatggtgacaagcccagtggccctgaggggagggcaggatggctgttgcagggttgtgtggctggatgtgaggggtctggtgggatttgagcccgtgacgggggctttcctgcgggagagtctggctgctgctcaccgacagagggtccctctggctgtggcggggtacagggagggccacaggtggccaggacagagcagggatcagcggggagagtgagaatgaatttgggggggggtaacatctggcaaggggctcgaggggcaggttggtggtgtaagggaagatgggctcctagaatcttggcctctgcagctggtggccccatctacggagcatgcagcggagggcgaggtggcgctcagggctttgtcatggctgtggtcagtctgagatgcttccatgaggagcctgtgcctgaggtcaaaggtcaggacaaaagctgggaattgaggggagcagggctcatggattggcagagggccagctcagaggacagagcctgggacactcaggtggggatgcaggggaggacccagcaaaggggacaggaggagcctggggaggggggtgtggggctagggattgacccccaccaaaagggggcctgtcaccactgcaggtagcaggatgaggatgactttgactttgggaagggctgggggaggagggaacccgggcagaaggggggtgtgagtgtggaggcagcaggcagactcttctgcgggttttgtgaaggccagtagcagatgggggaggcgtggggtggaagaagagttcactggggatgggaaggtgggttaatcccagtaggagcaatccaatccaatctgggaaggagggagggaggaacatcgcaagaaccagcccttgttcctgttacaggaacagttacaggtgggtggtggatgtggtgtggggaatatgaggtatcctcgaccaaacctcggtgtcctgagcacaggggagagaagggcgtgccaccaagtgcgttgtagggtccaggccagtccctggggtgcccttgcaggtccgcggttcatcttccattcctgtgagcggccattgcatccctgccttggatcctgagtagatttgctcaggtcatccctgcctggcaatcttcctctgccccaggggaagccaggcctggcgtgggaggttacgggcctgcacaaacctaccagcagggcctccttgggcagcgtggacctggagcttctcttggggccaccagtg

SEQ ID NO: 24579 - DNA, 2300 bp, Homo sapien
tggaggaaaaaagtggaggagatgactctgcaaatatatctgaaggatgttctaccttagaggatagaaccaggattaatgggtagagattttcattgtctttatccaagtaatcatagcatttttctttttctttgcagcaggaagggatctttgaaatgacgtagttcaactctttcaatttgtagttgaagaaattagtggtcaacaaggtaaagtaagttggtcaaggtcaactcagatcttctcattccaatccagcaacaacaataataacagcagcaacaaaataaagtaagacccctctccccatttctggtgatatttccagtgcaccacaaaggcatttaaatcctactctcatttcaatcacaagcaaagcagacaagaaaaaggaaaagggtgactcttcaagaaacgaggaggactcctttaaatgaggaattgacattttggagtacccggattaaattcagagactgaatcaatctaaagacgaaagccggactctagagcttggatgttgataccattgaaacggtaggggcagaaaaggtgtgatactttcctccccatcataaggggcacggcaaacatgcttataacaaaagataggctaataagagaaaagcgtaacaaatttattgaatcaaagttttatgtgatacaggagccttcagaaatgaagatgcaaagactcagggaaaactgcctgtttttatgcttagattcagtgaagaatggacagccttatagaaatgtgattggacaaagggtgtgatctaatggtaatagactgagggttgaacccagcgaggcctgttcagattcttcttggcctctctgtgcagcatgtatagagcaggacctcttctggaatgagggtctcaggatctactatcagacaaggtaggtctgagtatttcttcatggccagctcctacacagaaaggcagaggaccagggaggttggagtactatttctaggttgtatgaccaccgtagggaagaggaattctggtttctgtgaactgcttagtggggagaaagtcgggggggagacagactttgtttctaaggcggcttcagaggcctgtttagttttttagttcaaacttagcataccaaagtgccatacgttggggtatacttttctgagcctcaacaaatccaagctgaatttattaaacagcaggtcctcttttgctcctctctgggcatcaagagagctggcgtgtgccctgcggtggactctcactggtgagatcagccccaccgcacaaaatgaattaagagctgcaggggtcagagtaggggagacttctcgtagaagggaggcttccatggatttctgaagatcacacaagacttagatgagcaggggagcgaactgtatgggacaaaggcccaggaagagtcgaaatggggaagcctcggagttcaagcatcttctatagcgcccgctgtcctaaagataccccatccctggctaaatgggtgctccagggagaaactgggaggggagttaaagctccgagaaggacggagagcgacgggcttggggacagatgaaccctttttccctggatgagcagtgagaatggaggcccaggcgaagaccctgtacagcctctgaagcctgtgcagctccagaagagaaagatgccaaattaggggcgctgtctgctacccacgcgcggccgcgggcttcgcggaccccagaggaatccagtgggaggggtcccctctgggcaccatcccgcggcgcaggtggggcgggtccccgctacgccctagccaagctctgccagggccgcctgtgggtcctcacgctggttcctccctctcgtccgcctcggtgcgccggctcccgcgcccgggccttggggcgggtccctgccgcccgcacctgcccccaggggcggagcgcggcggcaacaacgcggccccagcctccgccaccggccgcggagccgagcggctctccgctcgtccccgcccccgcccgtgcacctccactccgcggcgcccgcccgccctccctccctgtccacgcggccagtccgtccgctcctgcccccgccagagccgcggcgcctcgcacttctgactcgagtccccgccgcgcttgtcgtcgccgccgccgggatccgcagccccgcgccatggagccggccgcgggcatccagcgccgcagctcccaggggcccaccgtcccgccgccgccccggggccacgcgccaccggctgccgcccccggcccggccccgctgagctccccggtgcgcgagccgccccag

SEQ ID NO: 24580 - DNA, 2300 bp, Homo sapien
atcattcttttccataacagtgtaatgttccattctctggcatagatgtaccttggtttgtttaactaattccctagtgatagacaggttatatctagtcttttgttctacaactttgactatacatctttgcacacaggtactgttcatctgaaggatgagctcttagaaatggaatgcagggccaaagagtagatgcacatttattctgatattgccaaactcccctccaaagtggatcatacctactcttaccaaccgtgtaggagtctgtttgctcatggccttactaaaactttgttgttaaattttttatctgtgtcaagctaatagatgaaaaatgatattatgttgttttgtgtgaggctgatcatcttttaagtggtcatgagccatgtatgtttatagttagatttctgtggatttctagtcacggttggttatttttaaacattgattccttgacctctatttaaaattgatgtagaaatactctatgtattagggaagttaacctcctaatatttattatgcaaatatgtttccagtctgcagttcgtgtgttttaggtatttgttgccatgtagaaaaaattttaattttatcaagtcaaatgcatcaataacttcctctatggtttctgggctttgtgtattctttagaaaatcactctgcattctgtattttacatattctcaaattctgttatactttattcgaatacttttataatttctttttttaaaaaagaaaaccaggtgtatggtttttttttttaattattatactttaacttctagggtacatgtacacaactgcaggtttgttacataggtatacatgtgccatgttggtttgctgcacccatcaactggtcatttacattaggtatttctcctaatgctattcctccccccaaccccccaccccacgacaggccccggtgtgtgatgttccccaccctgtgtccatgtgttctcattgttcaactcccacctatgagtgagaacatgcagtgttaggttttctgtccttgtgatagtttgcttagaatgatggtttccagctgcatctatgtccctgcaaaggacgtgaattcatccttttttatggctgcataatattccatggtgtatatgtgccacattttctttatccagtctatcattgatgggcatttgggctggttccaagtctttgctattgtgaatagtgccgcaataaacatacgtgtgcatgtgtctttatagtagcatgatttataatcttttgggtatataccctgtattgggatcactggatcaaatggtatttctagttctagatccttgaggaattgccacagtgtcttccacaatggttgaactaatttaccctcccatcaacagtgtaaaagcgttcctcatgatgaacagtggttacctctaggggaaagattaggacagaagaaactgaacttcaatactctacctcataaattacagaattgccagaacttttttttacaatgagcatgtattatgtctataatagaaacagcattttaagcccatttaaaaggatatcaggtattgtaagtatgttatgttaccataaattaatctataaatataatgctctcccaatgaaaatataaatagaggctttttgagggtaatataacaagctgattttattttcattaaattaattaattaattttttttttagggatggcatttcactattttgcctggctggtcttgaactcctgagctcaagtgatccacccgccttggtggatcaaagtgtgttaggattacaggtgtgagccaccatgcccagccaacaagctgatttcaagttaatatgaaaaaataaacacagtagaataatcaggaattttgtgaaaaggaagagaaattaaaagagataaaccctagcagatactaaaatttactgttatgaggtgttcatcctacaaggtgctttcaataagcacatttgtaattatgcatacacatatatttaacatgtgtatattttcttttttagacacagggtccttgctttgtcacccagactggaatgcagtggctcactgccacctcaaactcctgcactcaaaggatcgtcccgcctcagcctcctgagtagctgggaatacaggtatctgctaccgcacatggctaattttttaattttctttttttgtagagactgagtcttgccatcttgaacagggtcttgaactcctaggctcaagtgatcctcctgccttggcctcccaaagtcttgggattacaagtatgagccaccac

SEQ ID NO: 24581 - DNA, 2300 bp, Homo sapien
aaaactcattagcctcctttgtcctgtccctctttgcacacatctgcatacctttctgcttttctaccatgttgtacctcagcatgtggccctcaccagaagccaaacagctcctggtgcaatgttcttggactttccagccagcagaactgtgagccaaatgagtttcttttctttataaattatccagactcaggtattctattaaagcaacactaaattgactaagacagggtgggaggaagtaggtgagtggtactttaactaaaatcttagtgggtgaccttgaatagtaattctcaaagaaattctcagagaaaattgttatttcttctctttttttcccctcatagtgaagacaggtttcattacagactccctctttttggccaatggatttttttcctagactactttttccctgagggtctagatccttcaagacttttagtgtaatgagggcatttcagttttgtacaagcccatattattatctcccattcccttgtgggatattaaccctgaaatctctaggagtctgaagccacattttctggattctaattccagttctcccacacactattgtgtaaccatgaacaaggtacttctccgtgcttcagtttcctcttctataaaatgaatattggtcctagttcttcccccacaggaatgttatgagtaataagtgaaccgactttattaaaattcatggaccagtgcctggcccattgggagtgctctaaaaatgcttgcacttacttactcagtattagcaagtgcctccatgttagtttaaggcttactcattcagttttagctcactgaacttctaaaaaaatggatttcaaggatttcctttattttctttcaagctgtctgttataatttatccagaatctagctgaattacagaaggaagctttttgactactcaatttatgtgttgtggagtctgagctgaaggcagcaaccaaggcaggtttaagggtttgccaggggacctggggtcccttgaacattttaagctgttcaggaagaggaaagggtaaacacagaacaatcaagggctgttttgttccaggctctctttagaggcatgaccatataagccccactttctgctatattggaagccctccctgactgctctgataatgctaaatggaaatggctactatcttcttttccctacactttaggatatgtatcatctttctctcagtcaaccttacatcgtcagcatatagcagttctccataaatgtttgttaaatgcatgaatgaagctgggtgcagtggctctcgcctgtaatcccagcactttgggaggcaaaggtgggtggattgcttgagcccaggaattccataccagcctgggcaatatagtgagaccgcatctcaaattaaaaaacaaaaaaaaaaggaaaaaaatgcatgaatgaatgagtccaagacaaaggcactggaggaaaaaacatatatgaagagtggactctttctgtgatttaaaatgtgaaacctccccataacttttcaacacgttaaattttcatgaacaagacaactgttaaatattatttaaagatatgggagtaactaactgaacaaaaagcaaaatcataaaaactggctgcttctgaatagtgcaaggaaaagtaagaaaaggtgagtcagggatctatcctttttctgtaaaagccctctgcatggttttatttttaactacaaactatttaattattaactatgtacaactaagttaaaatatttaaaatgaaaaatcagtcaatttttgacctgctgtaagtcaaagcatcctgctgtgcttttgacctcatacagttgagtacagttgtttttttgtttttgtttttgtttttgtttttttaagttttgtgccaagagtcctgactaccaaactgtgttgacccaaagcttgattaacaaataaagcttggttaaccaaagcttggttaacaaataaacagaactttgaactttaataaagcagttctaatggacctagactgggttgggcaggcctactgactgctgcctgaaggttgctgtaaagggactaagtaaatcaattaactccacagttttcacaaaggtctcttgatatcaaaacttctttccttgcatgcttctctgatcctgtggagatgaaaattgacatccatagtcatattctaccaaaagaatggccagatctaaaaaaggtaatggtaattaatttgctgaattatttctgaaacttctccagggtttctcaatgcctttctcttctttgtggaa

SEQ ID NO: 24582 - DNA, 2300 bp, Homo sapien
ctattagaactgatcaacaaattcagtaaagttgcaggatacaaaatcaacacacaaaaatcagtaacattcctatatgccaacagtgaacaatgtgaaaaagaaattgaaaagtaatcccatttacaatatctacacataaaattaggtacctaggaattaaccaaagaagcaaaatatctctataatgaaaactataaaacactgatgaaagaaattgaagatgacacaaaaaatggaaaacattccatgttcatgagttggaagaatcaatattgttaaaatgtccgtattacccaaagcaatctacaaattcagtgcaatccctttcaaaacatcaatgacattctacacagaaatagaaaaaacaatcctataatttatatggagtagcagaagacccagaatagccaaaactatcctaagcaaaaagaacaatcctggaagaatcacattacctgacttaaaattatactacagagctttcagcaccaaaacagcatggtactcacataaaaacagatacatagaccaacagaacagaatagagaacccagaaacaaatccacacacctacagtgaactcatttgtaacaaatgtgccaagaacatacactagggaaaagacagtctcttcaataaatgatgctgggaaaactggatgtcagtatgcaaaagaatgaaattaggcctttatctcttgtcctataaaaaaataaaaatggattaaagactttaagaccttaaactatgaaactactacaagaaaacattggggaaaatctccaggacattggtctggccaaaaatttctgagcaatacccaacaagcacaggcaaccaaagcgaaaatggacaaataggatcacatcaagttaaaaagtttctgcacagcaaaggatacaatcaacaaagggaagagggctgggcagggtggctcatgcctgtaatcccagcactttgggaggccgaggcgggcggatcacgcggtcaggagatcaagaccgtcctggtgaacacggtgaaaccccatctctactaaaaatacaaaagaattagctgggcgtggtggcgggtgcctgtagtcccagccactcgggaggctgaggcaggagaatagcatgaaccgggggggcagagcttgcagtgagcagagatcacgctactgcactgcagcctgggcgacagagcaagactgtgtctcaaacaaacaaacagacaaagggaagagacggcccacagaatgagagaaaatatttgcaaactacccatctaacgatgtattaataaccagaatctataaggtgctcaaacaactctgtaggaaataaaatctaataacttgattttaaaatgggtaaaagatttggatagacatttctcaaaagaagacatacaaatggcagacaggcatatggaaaggttctcagtatcatggatcatcagagaaatgcaaatcaaaagtatagtgagatcatctcaccccagttaaaatggcttttatccaaaaaacaggctatgacacatactggtgaggatgtggagaaaagggaactctttgtacactgttggtgggaatataaattagtacaaccactatgaacaacagtttagaggttcctcaaaaaactagatctaccatgtgatccaggaatccccctgctaggtatatacccaaaagaaaggaaatcagtatatcaaagagatatctgcacttgcatatttgtggtagcactgtttacaatagctgagatttggaatgtaagtgtccatcaacagatgaatggataaagaaactggtacatatacacaagaagtactattcagccataaaaaagaatgagatcctgttatttgcaacaacatggatggaaccagaggtcattatgtaaagtgaaataagccaggcacagaaagacaaagattgcatattctcacttatttgtgggatctaagaatcaaaacaattgaattcatggacatagtagaaggatggttacccgaggctgagaagggtgggcggagggacttgtggggatatggggatggttgatgggtacaaaaaaagaaagtatgaatgagacctatttgatagcacaacagggtgaatataatcaagcatatcttaattatacattttaaaatgactttaaaaatgtaattggattgtttataactcaaaggataaatgcttgaggggatggagatcccattctccccgaagtgtttatttcacatcattgcatgcctgtatcaaaatatctcacataccccgtaaattatatatacctactgtgttc

SEQ ID NO: 24583 - DNA, 2300 bp, Homo sapien
ttgctctatcacccaggctggagtgcagtggagtgatctcggctcactgcaacctctgcctcctgggtccaagcaattctcgtgtcccagcctcccaagaagctgggattacaggcatgcactaccgcacccagctaatttttgtatttttagtagagacaaggtttccccatgttggccaggctggtattgaactcctggcctcaagcaatctcccaccttggcctcccaaagtgctgggagtataggtgtgaaccactgcgccctgcctagatccatatctaagtacaggttgagtatccctaaatctgagaatcagaaacactccaaaacccaaaacttcaagcccccacatgacattcaaaggaaatgttcattggcgcatttcagatttagaatttttggattaggatgctcaatggctaagtttataattcaaatatttcaaaacctaaaaaaacctgaaatccaaaacacatctggtctcaagcatttcagatacgtgatactcaacctgtattactttgggagacggtactattgtaaatggcatttttaaattataaattccaattgttcattgctggtgtataggaaaactgacttttgtattcaaccttatatcctaaaattttacagaagaagttttatgtcttccttcccaatatgtatatacttttaatttacttttcttgttagctagaacacccagtaccacgttgaaaagactggtgagaggggacatgcttgccttgtgtcagactttaggtggaaagaatgtagtttctcacaacagaaacaatctattgttagctgcagaatttttgtagatgctctttatcaagttgaggaagttctcctttattcccagtttgctgagtttttatcatgaatggatgttgaggatgggcacttcttttatttgtgtgtgtgtgtgacaggatctcactctgtcacccaggctggggtgcaacctcacctctcaggttgaagcgatactcccaaggagctaggactacagacgccaccacatccagctaattttttaaaaaacttttgtagaggtggggtctcattatgttgcccaggctggtctagaacactttggcctcccaaagtgctgggattacagccgggaaacactgcacctggccaagggtttgcacttttaaaatgttgctttaaatcaatctattccagaaattgtaagcaacataaaacgtaaagcaagggaagtgagtatgaaatagcaactgttacaaaaactgcctactataatcaatattcttgtgcaatgcagtatgctgagcgtgggagccccataacaatcacttgcctccatggtctttggcaaatagatattactttattttttattttcgagacaaggtcttgcactatcgcccaagctggggtgcagcagcgagatctagctcaccgcagcctccacctcctgggctcaagccatcctcccacttcagcctcgggagtagctgggactacaggcgcgccaccaaacctggctaatttttgtatttttggtagagacggggtatcgccatgttgcccttgccctcgaactcctgacctcaagtgatcggcccactggacctccccaagtgctgagattacaggcgtgagccaccgtgcccggcctccaaatagttaagactttaaacttagaaaccctattcacaacacaaactccgagtgaagctcagtggcattttcttacaggaagaaatacaggagttaatcaacaggtatgtgggatgttcccacatcaaatcctaaagataaaattttaactcagttcctcctgcactatctgattctccccaaccttgtctcgcagaaaccacagcgcagcctgaaaacacgccccgtctagattcaacacctcatttagaaattcaatttctcgttgctagttggatagcgtttgccaagtaatttgaaaaaataaaaataaaccaagtggtctgggatttaaacaagataatgtagggtgaaaaaagcactcaggtgcggacagccatggagcgtgacttcctgtgcactctttccccgccagctcaacgccagagccgcgcgctaggcggagactgttggtggcggaggccggagtcgcacgcctacgagactgcgcggacccgcccaaaaggaaaatggaagtagtggcgtgaggctgcgacagtgaaggttatttttctctttttaaagggccgctagacctcccgtctaaaggaagcgcccgacgggcctccgaagtacacgcccaggcccccacagcgcagccg

SEQ ID NO: 24584 - DNA, 2300 bp, Homo sapien
gtataggaaaactgacttttgtattcaaccttatatcctaaaattttacagaagaagttttatgtcttccttcccaatatgtatatacttttaatttacttttcttgttagctagaacacccagtaccacgttgaaaagactggtgagaggggacatgcttgccttgtgtcagactttaggtggaaagaatgtagtttctcacaacagaaacaatctattgttagctgcagaatttttgtagatgctctttatcaagttgaggaagttctcctttattcccagtttgctgagtttttatcatgaatggatgttgaggatgggcacttcttttatttgtgtgtgtgtgtgacaggatctcactctgtcacccaggctggggtgcaacctcacctctcaggttgaagcgatactcccaaggagctaggactacagacgccaccacatccagctaattttttaaaaaacttttgtagaggtggggtctcattatgttgcccaggctggtctagaacactttggcctcccaaagtgctgggattacagccgggaaacactgcacctggccaagggtttgcacttttaaaatgttgctttaaatcaatctattccagaaattgtaagcaacataaaacgtaaagcaagggaagtgagtatgaaatagcaactgttacaaaaactgcctactataatcaatattcttgtgcaatgcagtatgctgagcgtgggagccccataacaatcacttgcctccatggtctttggcaaatagatattactttattttttattttcgagacaaggtcttgcactatcgcccaagctggggtgcagcagcgagatctagctcaccgcagcctccacctcctgggctcaagccatcctcccacttcagcctcgggagtagctgggactacaggcgcgccaccaaacctggctaatttttgtatttttggtagagacggggtatcgccatgttgcccttgccctcgaactcctgacctcaagtgatcggcccactggacctccccaagtgctgagattacaggcgtgagccaccgtgcccggcctccaaatagttaagactttaaacttagaaaccctattcacaacacaaactccgagtgaagctcagtggcattttcttacaggaagaaatacaggagttaatcaacaggtatgtgggatgttcccacatcaaatcctaaagataaaattttaactcagttcctcctgcactatctgattctccccaaccttgtctcgcagaaaccacagcgcagcctgaaaacacgccccgtctagattcaacacctcatttagaaattcaatttctcgttgctagttggatagcgtttgccaagtaatttgaaaaaataaaaataaaccaagtggtctgggatttaaacaagataatgtagggtgaaaaaagcactcaggtgcggacagccatggagcgtgacttcctgtgcactctttccccgccagctcaacgccagagccgcgcgctaggcggagactgttggtggcggaggccggagtcgcacgcctacgagactgcgcggacccgcccaaaaggaaaatggaagtagtggcgtgaggctgcgacagtgaaggttatttttctctttttaaagggccgctagacctcccgtctaaaggaagcgcccgacgggcctccgaagtacacgcccaggcccccacagcgcagccgcccgaccgcctctcttcacaccggccagagtccaccctctcccactttcccctcccctcccctccccgccccttccctccccaccccttcgccccgccaaccctagacccggcatgcgctgcgccgaccttttccttccgagccgacctctccaccttcggcgcctcccaatgacaagcggcgcggagcattgtggtcccgtgcgcaagagcgaggccgagggcagaaaaagaaagcaaaagactagggcgagtcggtagagcgggccccgcgcatgcgcaagggcggaggcggtggtgaaaaagggtggtgcgtggtctacggcgagcggagtggggcggggtcgcgcgccttggcggggagtccgcgagccaggaggggcggggggtgaatgaaggagcgggcggaggaggaagtgtcatggcgtcgggccgtggagcttcttctcgctggttctttactcgggaacagctggagaacacgccgagccgccgctgcggagtggaggcggataaagagctctcgtgccgccagcaggcggccaacctcatccaggagatgggacagcgtctcaatgtgtatcctttt

SEQ ID NO: 24585 - DNA, 2300 bp, Homo sapien
tatttaacaaaaaaaagaaagaaagaaatgcaaaatattgcatagttccctgtataccctttagcttctcctggtactaacatcttacataacaatatatgattatcaaaactaggaagttaacattggtacaatactgttaactaaaccacagatgttattcagtattccatatttttccctattctaggatcccatgttccatttagttgacatgtcccttcaagtcttctccagtctgtgacagttctccaatctttccttgtctttcataacactgacacttaggagaataatggtcattttatacagtgttccttagttggggtttgtctgatgatttctcattattatgtcgaagttatccattttgagcaagaataccatagaagtaaattgggtcttgcttggtgcatcatatcaaggggtacagtatgttgatacgtcttataactggtcatgacaaccgtgatcacttggttacagtggtatccttaaagtggtttctgcactttaaagtcactattttttttctctttgtaattaatacatttcatggggaagatacgttgggattatacaaataacgtttttcctcaaacttttgtccactaattttaaagaatcttttgatagatcttgtctgtgacaaaaattattgtggtgtttgcctaatgaagattttttttttattgggggggtgattatttttaatgctactagattttctagagattctaattaagcaagtaaaatcaagagggaaagtaatcgttacaaaaggattcagctttgaaaatgccggttgagagttgtgtgtacttctgtgtatgctgaggatttaataggagggtaaaagtgaagtagatgaactcctagcattcctttttaatactgcccacttaagagaaatttaaatcctaaaggcaccttctaagtttcaaatttaaattttatttttagagctaacacatgagtttctacaaatattggagaaaacgcctaataggttgaagaagattcgaaactggagggtaagagaattgacagggtttaacagaatttcagtcttttatgtaacatttacatagctaaccagtttgaatttttgtggttaaataatctttgcagtattcctgaataattcaacgtatctcaagttacatatactcacatattcaactactgagtccagtggactttgctaaagtacattatacttttaaaaaattttttgcagtgattatgacaaaagtatcctcttcattttacaaatggggaaactgaagcctagacaagttaaattactttctgaagtgctgggctaggatttaacttgtatctgattctaaaatgggtgttttcaattttttatagccttttatgcctctaaggcatttatttactgacaacataaaatcttgaaccccaggtcattttatttccatatgtttaatatataatgtttttaatatataacttttataagacaagaaatttgcattaaattattttgctatatcactgcttcttctgtgttttattttaataggctaatcaggcagctaggaaaccaaaagtagatggacaggtatcagagacaccacttcttggttcatctttggtccagaattccattttagtagatagtgtcactggtgtgcctacaaacccaagttttcagaaaccatctacatcagcattccctgcgccagtacctctaaattcaggaaatatttctgttcaagacagccatacatctgataatttgtcaatgctagcaacaggaatgccaagtacttcatacggtttatcatcacaccaggaatggcctcaacatcaagactcagcaaggacagaacagctatattcacagaaacaggagacatctttgtctggtagccagtacaacatcaacttccagcagggaccttctatatcactgcattcaggattacatcacagacctgacaaaatttcagatcattcttctgttaagcaagaatatactcataaagcagggagcagtaaacaccatgggccaatttccactactccaggaataattcctcagaaaatgtctttagataaatatagagaaaagcgtaaactagaaactcttgatctcgatgtaagggatcattatatagctgcccaggtagaacagcagcacaaacaagggcagtcacaggcagccagcagcagttctgttacttctcccattaaaatgaaaatacctatcgcaaatactgaaaaatacatggcagacaaaaaggaaaagagtgggtcactgaaattac

SEQ ID NO: 24586 - DNA, 2300 bp, Homo sapien
aggagaaaggaaaaactagcttagtttgaaactagagggcaaaggagaaaggaaagccatccatttgcctgtcatccacaaaaatgaaattttgtacatttcattcacaaactaattcagcaaaacgatggtgagtagttgtgtttcggatatgaattctgagttagtcaataactggtaatttttgaggtattttaacagcaattttaaactgttttcagtgggatttcaaaaatcttaaatcaattctatggaaagtaaaaagaaaaaagaagagaaataaaatgcttcttatcttaaatttttaccatttacattatagggccttcatttaaaaatatataaccatgaatatttacatctataataatcctggttttaaaacgtgttgttttaaattggttctaaaaaaaatattgggaatgaggttttaattttaaaaattgtgatctttccaggcatagtggctcatgcctgtaattccagcattttgggaggcagaagtgggaggattgcttgaggccaggagtttgagaccagcctgggcaacatagagagaccttgtctctactaaaatttaaacattagccgagcatagtggcacatgcctgcagtcccagctacttgggaggctgaggtgggaggatcgcttgagcccaggaagtcaaggctgcaatgagctgtgattatgccactgcaccccagcctgggtgacagagcgagatcttgtctcaagaagaaaaaaaagaattgtgatttccaggatagctttgaactttaaaagccttccttaagaggatattataatctctttagactactttaaacgagttagcgtgatatttatatatgtttctgcattcacagctttttctgtcttccttttagttccttctgccaccactgtcactcttgcccacgcgatctggtgtccttactatcccccaaaatcacaagtttccaaaagaaaaagaaagaaacattccaagtctcacatcttttgtgcctaagctctcagtgtctgttcgtcaatctgatgagctcagcccatcaaacgagcctccgggagccctagttaagtcgttgatggatccgactctcaggtcttctgatggcttcatttggtcaagaaacatgtgctcttttcctaagactaaccatcacaggcaatgcctggagaaggaggaaaactggaaatccaaggaaatagaagaatgtaacaaaattgaaatcactcactttgaaaaagggcagtctttggtgtcttttgagaatttgaaggaaggcaatattcctgcagttagggaagaggatattgactgccatggtagtaaaacgcgaaaacctgaagaagagaactctcaatatctttcatcaagaaagaatgagagttcagtagccaaaaactatgaacaagatccagaaatagtatgtaccattccaagcaagttccaagaaacccagcattcagaaataactccaagccaggatgaagagatgagaaataataaagctgcttcaaaaagagtttcattacataaaaatgaagcaatggaaccaaacaatattttagaagagtgtactgtacttaaaagcttatccagtgtagtctttgatgaccccattgataaactcccagaaggttgtagcagcatggagacaaacataaaaatatcaatagcagaaagagccaaaccagaaatgagtaggatggtgcctcttatccacatcaccttccctgtggatggaagccccaaggaaccagtgatagccaaaccaagcctccaaacaagaaagggaaccattcataacaaccatagtgtcaacatacctgtacaccaagaaaatgacaagcataagatgaattcccataggagtaagttggattcaaagaccaagacaagtaagaagacacctcagaattttgtgatttctactgaaggtcccattaagcctaccatgcataaaaccagcataaaaacacaaattttcccggctttgggacttgtggaccccaggccttggcaattgcccaggtttcaaaagaaaatgccacagatagcaaagaagcaatcaactcaccggactcagaaacctaaaaagcaatcatttccttgcatctgtaaaaatccaggaacacagaagtcatgtgttcctctctctgttcaaccgacagagccaagactaaattacctagatcttaagtatagtgatatgttcaaagaaatcaattcaactgctaatggacctggaatctatgaaatgtttgggacccctgtttattgtcatgtgcgagagac

SEQ ID NO: 24587 - DNA, 2300 bp, Homo sapien
agatcagccagttgggcttaccaaccacaaagccaggtaaagaggaatgaaaaggccatgtgggggctgggcgcggtggctcacgcctgtaatcccagcactttgggaggccgaggcaggcagatcacgaggtcaggagttcgagaccatcctggctaacacggtgaaaccccgtctctactaaaaatacaaaaaaattagccgggcatggtggcgggcccctgtagtcccagctactctggaggctgaggcaggagaatggcgtgaacccgggaggcagagcttgcagtgagccgagatcgcgccactgcactccagcctgggtgacagagcaagactccgcctcaaaaaaaaaaaaaaaaaaaaaaaaaagaaaagaaaaggccatgtggagaggcacactttggtttttatgacaagattgctccactcatccaagagaccatgaaataaaagtatcagcttaattttaaagagaagattctatgccattccaccattttgaatcataaaagagctagctgttagcattagaaaaaagaaatatcaaaaaagtcagcagttagcttaattattgaaaagaaaaaaatcaagtgagctatttggaatgataagacaatcatttatcaaaatgttttaatccttatgactcattgaaaaaaatttaaaaatataaaaaaaaacaacaaaagatgtttttatctttacttgattttatgtacccttaaagaattataaaaatttttgtccaaagttgggaattctctgcaaacctcagaatgtttttagaatggggatgggaataaagatacacagcaaattccttttatttaaaatcttgtaaaattgtcatcctctattcacacattttgaaatcattattattatccccaaactacataagattactttttatttatttgatgtaaatgtttccctctcatattagttttcttttttcaacagattcaactaaataaactttaatgttgattctgttcttcctagagatcctaaactttgtgattttagtggaaaatcagcaatacattatgtgtcacaaatagagagttcaaagaaacagcagcttttggacattttaatgagttctatgccaaaaccaggtaaatactttcactccacatgcataatttcccaacccaaaaattcctgttagatctctttctttttctacatctgtttgatggatccatttaaagaaatcaagtccacggctatttatggagcagtgactctgtacaaggcccacgactaggtgctctgggggatgcaaagaagtctaacgcaaggtttaaacttttgaaaatatacagcatggtcaggggcacatcacataagtcagagagagcttgctgtaaacttgaaaggggaagagggacttatagtggttcttgaaggctggataacagtgggaaggtttgatataggtaggaaaagagtccaaacaaagacaaagaaacagccacagcaagaagtataatgaaaagtgtgccactgagcagcgtgtgactttgtgaaagctgcctgactttattgtttgattcgctttctgtttgaagcttcgggggcagaggacaaagctatacctaagaaggtttcatgaaagaggtgagacttgatctgacctttgaaaaaaggatgcaatttgattttgtggagcagaggccccttgctgggagtgagcatagcttatcccaggggcaaacaagaaactagaactgaaagttcatgtcagggaaaagagaaacagaaggtcagatacataaagaaactgggcccatggaggggagagccttagatgtcaggctgaaggacatcacttttttttttcaataaaacagacactaaagaattttaagccagagaatgatgaaggccatgttttaggaatattaacctgttcctatcgtgttggctacatctgagggaaaaggcagggatctctattaagaaattatagaagtgcccatatgtatggtggtaagaactagggaatgtgtccttgggtggggtgtgagagtgagcctaagagatgctgggagtggtgggtctaggagacattgtgaaagaacaattcacagaactgcgagatgtgatgttgacagcggagacacagagacaaccgctgagaaacttgagtcaaagatgactaaattttaaggcctggaaagtgcaggagatggaaatacaaccaacaaaatgggagcacattggaactttcaagtagcaagtttctgtaggactgggcttgtgggaaaggaccggttgaaaggttagtt

SEQ ID NO: 24588 - DNA, 2300 bp, Homo sapien
attactaattatttcagaaaacactgtcaatgtctgaaaagcaatttataatagtgttttcaagttatcttaaaattactatatgtcaaatgctcttttaggagggaggagataaacaatgcactttttttttaaataagagggttaataagcaatctcttatgttacaattgcagtttcctaaagctgttacttagttatcttgtcatcaaataagaacagatggcctgagctctttctcagtacttcatatgaattttgttttgaaaaaaaaaggaggagggagcttcaagaacaaaattatagtcaagaatacaagatattgtaaaaggatcagttagtataatggaatgaaaagggaattttgaagctacttcagcctagtgttgagaaatagtttggccaattgataaaagtggagattcctggacgtcatcccagagatgttcagtaggtctggattggggtccagaatactggaaatcaaggtatgccacttggagacaccctaatctaggcagatgaggagaggccccaatgagtttatctttacttgtttttatgcacccttaaataattataaaaatttttgtccaaagttgggaattctctgcaaatatgataagtggcttgcttaaagccatatatcaaggtagtggcaaccccaattctcagtcctatgctatttcttttgaattacaatctttgatgaagaaaagtccataagagaatattactgtggctcatgacacattaccctgtcccatagcaacgaagagattcaaattcaaatgttttaggacagagaccatgatcaacttgctccttgtcctagaataggataagtaaagcaagtttcatcattgtttccctcactgtaatctattaatgggattctcatcatttaactttggatttctctgagctgatatctaatgcaagggttcagtacaacataggataagaagagacttgtgctgtcataatagagaggataagaagagacttgttctgttgtaaatggtcctaagatcagccagttgggcttaccaaccacaaagccaggtaaagaggaatgaaaaggccatgtgggggctgggcgcggtggctcacgcctgtaatcccagcactttgggaggccgaggcaggcagatcacgaggtcaggagttcgagaccatcctggctaacacggtgaaaccccgtctctactaaaaatacaaaaaaattagccgggcatggtggcgggcccctgtagtcccagctactctggaggctgaggcaggagaatggcgtgaacccgggaggcagagcttgcagtgagccgagatcgcgccactgcactccagcctgggtgacagagcaagactccgcctcaaaaaaaaaaaaaaaaaaaaaaaaaagaaaagaaaaggccatgtggagaggcacactttggtttttatgacaagattgctccactcatccaagagaccatgaaataaaagtatcagcttaattttaaagagaagattctatgccattccaccattttgaatcataaaagagctagctgttagcattagaaaaaagaaatatcaaaaaagtcagcagttagcttaattattgaaaagaaaaaaatcaagtgagctatttggaatgataagacaatcatttatcaaaatgttttaatccttatgactcattgaaaaaaatttaaaaatataaaaaaaaacaacaaaagatgtttttatctttacttgattttatgtacccttaaagaattataaaaatttttgtccaaagttgggaattctctgcaaacctcagaatgtttttagaatggggatgggaataaagatacacagcaaattccttttatttaaaatcttgtaaaattgtcatcctctattcacacattttgaaatcattattattatccccaaactacataagattactttttatttatttgatgtaaatgtttccctctcatattagttttcttttttcaacagattcaactaaataaactttaatgttgattctgttcttcctagagatcctaaactttgtgattttagtggaaaatcagcaatacattatgtgtcacaaatagagagttcaaagaaacagcagcttttggacattttaatgagttctatgccaaaaccaggtaaatactttcactccacatgcataatttcccaacccaaaaattcctgttagatctctttctttttctacatctgtttgatggatccatttaaagaaatcaagtccacggctatttatggagcagtgactctgtacaaggcccacg

SEQ ID NO: 24589 - DNA, 2300 bp, Homo sapien
tttgctcacagctctgaagactagaagcccacgaccaaggtatcagcaggttgggtttctcctgaggcctctctccttggtttgcaggtggccacctactctctgtgtccccacatggcctttcctctgtgtgtgcacatccctggtgtcctaatctcttctcataaggacactagtcagattggattagggcccactctagcggcctaattttaacttaatcacctctttaaacaccctgtccataaatacagtcacattttgaggtactaggagttagggcttcaacatatgaattttgagtgagaatccaatcgattaccaccaaactggttgcaaatacaaataagctcctaacagggggcagagaaagtcttcacagaagagcaaatatccaagctgaaacttgaaggacaaattttaccaggtaaactatagacacaaggacattgcagattctaaacgacagcatgtccagaggaaagagaaagcacaggatgtcgaaaacattgtaggtgcatgttaaaagaggctgtctattaaaagagagtggcagacacaaaagatgtgctgctcagacctcccttaaagaaagactcactgcccagctgtaaggcgtgtggttagatgaacagcctacggctgttgggtttatcaggtttgtctaactgttgagccaaggacctgctattcttggagtgcttcctccagccaaaaactgagcaaacagtgatagccaaggccactgttttcttggggagatcctggccaatgattgacggagcaaggcagtagtacaaggggctacgcatttcctgatgcataatttttgccctagcacttccagttggacttcagagacttcgccagcttggaattgtagtgtctgcttttttagagcaccagtctgaaaaaaaaatagtgaaaaagcaagctgcagagtgggagaaggtatttgctacatatataaacaatataaagctcagatgcagaatatatataaataacttgaaggtgttaaaataaagacaaggccaggcacagtggctcacacctgtaatcccagcactttgggaggccgaggggggcggatcacaaggtcaggagatcgggaccatcctggccaacatggtgaaaccccatctctaccaaaaatacaaaaattagctgggtgttgtggcgcatgcctgtaatcccagctactcgggaggctgaggcatgagaatcacttgaacccaggaggcagagattgcagtgagccgaaatcgcgccactgcactccagcctggcgacagaaccgaggtgggcagatcatgaggtcaggagatcgagaccatcctggctaacacgatgaaacctcatctctactaaaaatacaaaaaattagccgggcgtggtggcgagcgcctgtggtcccggctactcgggaggctgaggcaggagaatggcgtgaacccgggaggcggagcttgcagtgagccaagatcgtgccactgcactccagcctgggcgacagagcaagactccgtctcaaaaaaaaaaaaaaaaaaaaaaaaaaaaaaaaaaaaatgaagcgtttgttgaacaccatgttgctcttcccagaaaccaggtaactagtatgattttatttcaggacaatcaactgagcaacttcttgcagggtcaggggcagagggtagaagtggtattacagcacctagtttattgccttacaatcaataaatagagggtgaatgaaaagaaacccaatagttaaagtgtaagctaattggtactaactacaaatatgggttgaatgaaaacaaacccaacatgctttaggttttttaatacaatcttatccacatgagtttagggtcttgtcctatcaccttggcttctgttccctttctgtattcatcacaggaaattttcaagttttatgaaaccagctagagcggagttttattaaccagctgagggcggactaaagacttaacagacctgggcgaagaagcagcactcctacttactagggcaagactcatgaacagggggcgggggctccgggggcggggacgcgccccgttctctttcgctcttcttcccggcagccttagcgccaggcccggcgctcctcaagatggctgccgacagtgaggtgatttctttgctccctacttaatccttgtcactatctaaattcgttcctcatgtcttcgccttggggcttaatttctttttctctccttccccttcccgcagcccgaatccgaggtatttgagatcacggacttcaccactgcctcggaatggga

SEQ ID NO: 24590 - DNA, 2300 bp, Homo sapien
agaaggaaagtaaatagtagttgtgataccatgttgcatgtgagaaatctggcaagggggctgtgagagcacagcaggggtgcatttgtctctgtctgggcagtgggaatcagggaaggcttcatgaagagggacatttgagctgaatcttgatgaaaagaaggctttagaagcagaggaatagcagaggttcgagagcatgttgaacggttgatattttgtagggtgcttcccagaccatgaccagggttgaggctggagaagtagcaggtaacctgccatgctgaagcactggcttttatcttgcagtttaagtagaagatcaacatgattagaatttttttattttttattttatttatttattttttttgagacgaagtctcgctctgtcacccagactggagtgcagtggtgcatctcggctcactgcaacctccacctcctgggttcaagcaattctcctgcctcagcctccctagtagctgggactacagtcacgtgccaccatgcctggctaatttttttgtatttttttttagtagagatagggtttcaccgtgttagccaggatggtctcgatctcctgacctcgtaatccgcccgcctcggcctcccaaactgctgggattacaggcgtgagccaccgcacctggccccggaagtatatttttgaaggattgctttgacaacagttgagagaaagcttttagtgagaatgagagggagatgaatagagagctaaggtggctcctaggtataacagagtggaatggccccagcctgggggccatccacaccatggtttaatgtctgcatgacttactgcatgactttgaataagtcacttcagtttcctcatctagaaaatatggctaacaaaaccttgcgagattgttgtgaggattaaaggatcttctgtgacactgcctggcatatatgggtctttgataaatgatagctattcttaactgtaattgtggttaaaatcatactcccggaaatttgtgcattaagacaatcttgggaaaaaccttcaagaaaagtgttgaaaagaaaactggaaacttaatgttaatcttatcccctgccatttatctgaacaaaactcttagccaactttttagcttgtacatcgtaagatgtaggtagtgatacttagctcaaacagttgtatgagaataggataatgctggtaattgtgccttatggcacttggcacatagtagttcatctaatttttaaaagtctattggacatgttctataatgtgtggcaaagtatacatagtaagagggattactaatcagcagtaccacaaaacaattgagaggaacagtgataaaaggactgtaaataaatgtctatagagagcctccttcttaagactgtattcttaaaagaatgttattcaaatcatgtagctcagttgtcatgtacactggatttttttttgaccactcgtacatgtacatataaacagaaaccacatggaaaaggtacattggttattataggtttagactgcttcctactttccaggggtatcataaaataaagctgtgggtcttgaatatcatctcttagtagtctatatatgaaagcctgtggatgatgtaactcttcagatcctcatgagtacatgagtgtttttaaattgtcttttgtggttttgttttttagatagtagtaacactaaaaaaatgtaatggccttgggtgagcatgaagtcacagtgatgagattttgcttttgcacctttcagcttacagaatcaagtgattacttttaagaaaaaaattctaatttctaaaattggctagtcactgaaaccttgtatattttcaaagaaaaatagaaaaaatttgagagtgtagaacaaactggccaatacaactggaacatttctattgttagagcagcaaaaccattaaaaagttaaataatgtctatatgagttataaaaatcaacaaaataggaaatgtggtctaaaatgtgattatttttttcctttccttcaagttcttattccctgatgctgtttctgagaaaccattagatggaactacttcaacagataataataatcctccatcagagagtgaagactatgtaagttgatgtggagttcaatgttaaaatgttttaaatgcactgaatttctagaggttctatatatttctagtttaatagcttactatatttttattttaaaaatcaccttgggaattttggatggcagatcgtggtttccacttagataactagcacagatacatattttgggtagcaagaattt

SEQ ID NO: 24591 - DNA, 2300 bp, Homo sapien
agctcaaaatgtgccattaatcagttgcctcttcactgaaaaataatgactttatatagttgcttcataagaattcgaacatacttctgtgttccatttatgtagacttaggtcacaacataaaatacatggctagaaaaagtttgaagactttaccccaatatactagagccagggctagaagaaaatgtccttacccagtggattggaaccaagctagtaattctttttttttttttttttttttggtgacgggattctcactgttaccgaggcctgagtgcagtggcgtgatcttggcttactgcaacctctgccttctgggttcaagcgattctcctgcctcagcctcctgagtagctgagattacaggtgtacaccatgcttggctaatttttgtatcttttttttttttttttttttttaagtagagatggggtttcgccatgttggccaggctgggctcgaactcctgacctcaaatgatccgtccacctcggcctcccaaagtgctgggattacaggcttgagccatcacgcccagcctcaagctagtaattcttaaagtcagcattaaactgatgtcctagattctcttttctgtttgctgcttggtagttttgccacttggtgatcctgggcaaggcgctttatctctgcacctcattttcatcacttgcaaaattcccttacccctctcagtgatcccatgggtccatgaatataagaatgctttgggcatattcagaaacagtatatgtgaaaatgtatggcccacatgcaacttgctgcttattctcctctttatcatgttcttctccatttataagtggctcaaatttccaagtgggagagatagtcagtgtcctctcagtatctatttccttccttcccatcctgtgatttcagggctgtaggccaatgaaatgtagccccttcttaatagaaagaatgaaggcctctgctcttgagtatactccttcatgagagattgaatataatttgtgaacttgactgaaatattttgagaagtatactgacccttagtcaaagagaaagtatgaagcctataatataacctaagtattttatctttaattgctagtatctatcgagcatgtgccaggatctgttcttcacaacagtgagtcacaatgagggttgagtgattgcccaaggtcacaaagctgggattcaagcacatagcatatagtttctggagcccaagctcttaaccattatacaatactacattacaggttgttattcaaccctaaatctcagtgtgagattcttgcttggtacttgcaggataattaaaagtgatgcatgttcattgtagagaaaaaataaaaactcatagttttataaccagagatgatcattgttagagcaatttttttttggagacagagtctcgctctgttgcccaggctggagtgcagtggctcgatctcggcttgcagcaagctccacctcctgggttcacgccattctcttgcctcagcctcctgagtagctgggactacaggtgcccaccaccatgcctggctaattttgtttttgtatttttagtagagacagggtttcaccgtgttagccaggatggtctcgatctcctgacctcatgatccacccgccttggcttcccaaagtgctgggattacaggcatgagccaccgtgcctggccctgttagagcaattatttctatatcaaaccatttctattacttataattaaaattttgttgcagctagtgatgacatatataataatatcattaggacttcatttctttatcactaataggcaggaaaatgttgctcagtggacccaaattcctctgtcttttactatcaatccttgtcaagggaaacatggtaatcttatctgtgagggggaggaggcctgaaagtggtatttatttttcttaattcttttttatgtaagttctaaaaaacttatgcatttctctgaatttttaaaaatactcatcttgtgactgctatagctgaaatgactgttgtctttattctatttttatggtacttctttttctaaaaagggctgtttatgagccttgtccttttgtgcttcacaggaaccagcacctatgacagaagatctgctagaagagcagtctgaagttttagctaaattaggtacatcggcagagggggctcaccttcgagcacgcatgcagagtgcctgtctgctctcagatatggagtcttttaaggtgggtcacacttgcagagctctggggtctattttgagctattctgggatgaaactgtg

SEQ ID NO: 24592 - DNA, 2300 bp, Homo sapien
gagattatacttcttaaaatttttattgatgtaaaagaattgtacatatttatagggttatacttcttttatctttactgttgaataaggagcctaaaggtagggtccatgttttgtacatacttctctgtattcttataataagaattggaaaaaaaataaaccaaaacaactaaaaccaaaaaatgtgtgggaagtcactaacaatgtttagaaatattaagtgagaaaagcaggttaaaaggcagtattttacatatttaatattagtgcccttagtacgtgtattctgcgtcttaaaatgaaaatgctccactgtcaatggttgttttctcttggtattgtaatcagtcggtagtttttattttctttgtattttccttatttgtgtgtattacataagaaagcagaaaaaaatagaatatttataattattaaagattgaagttcttaggtgctttcagtaacattatcctcacctttggggtcgtggctgcctatctggagtgctgtcttgttaaggattaagatgagtggctgaggatttgcacttctgtaagtggctgcttcatcctttgacacctgcgctgatcatttgtgtgcgctgcacctccttcaggtgctgcactatctggcaatccagaaacctgcagaccttgctcggcacctgttaccttgtgtgattcatgcagctgtactcaaggtaaaggaagaaggtaaatgtcatatttaactagtcattagtcatttccaaagtgaaagtatattttgcttaatttatttaatgctggcttcaatcttttctaaaatagaaagtctcgaaaacatttcttcagttaagaagatcataaagcagataatatcccattccagtaaagttttgcacttccccaatccagaagacaagaaattggaagtaagtttgatgtagtgtcagaatcttgccaagtgttctcctcagttggcaaaaataatttttaagatgcgttttcaaagggctttgcttttttgccatctcgcaatgtatgcctcttccttttctaccgccaggaaatcattcaccagattactaatgtggaagctctcattgccagagctcggtcactaaaagccaagtttggaactgagaaatgtgaacaggaggaggaaaaggaagatcttgaaaggtaattgctatttggctaattcagttttgtctgcagtaggaaaagccaccactctcttaagaaaaattgtaataggatattaagactcttttgtggtaatcatatattatttgaaacaagcattgtctagagacagaaataattatcatagcatttgacctctcccgtatttctgagtctctaccaggtgtttccattcttcccacttttagaaacagtctcccagagcctccttttctagggattccttggtttgctcttggagatgtggtgtctggaatttcttgtggaggagctgttaactgtgttgctcaccctgccccaaaactttgttttcagctgttactattccttgaccacagggtgcaggtgctgaaaccatttctgcttactgttcctagttgtttattttaaacaagatttgtgatagcaaaggtgcacatcctatgtgccttgcgattatgttttgaaagattgaccagatggcttttctcagatgaagcaaatgattggggcattctctttatgagactcggcaccattaccaatggagcttagatcagtgtgaggccctgttcattttttgcccatgttatttggaaggacaatattgttttaatgtgtgataaagtgttcacaaattagcttgttcagtggcttaaatttgtcatcatttaaaaattttcattagcctttccataataaatggcattattgatgctaaataattaatattgtatggcaaggcatttgctgtcttttaacaagtttgtgtttgaattttatgtcttttgttaggtgaagttttctcccacactgctttgctcttgaaaatgtcttccttttaaatgagaagaataagctctaatcaagggactcgtttctaaaatagtagagtatgaattagtgagcaggtggtgcaggtttggtggctttgtgccttcaactctgttagttccaccatacgttatctgtgacatacttggaagttcagtgtttccagcatctaatggcacagtttacaattgcgactttgcccaacacaagtattttaagcatatgtgcacgtgtgcgtgcacacacagacacataccccttaaaaaaaacaaaaacaaatatggatcattgctttta

SEQ ID NO: 24593 - DNA, 2300 bp, Homo sapien
gtcaggaccctcagctgcaggtctgttggagtttgctggaggtccactccagaccctgtttgcctgggtatcagaagcagaggctgtagaacagcggatattggtgaacagcaaatgttgctgcctgatcattcctctggaggttttgtctcagaggagtacctggccatgtgaggtgtcagtctgcccctactgggggctgcctcccagttaggctactcggggttcagggacccacttaaggaggcagtctgtccattctcagatctccagctgcatgctgggagaaccactactctcttcaaagctgtcagacagggacatttaagtctgcagaggtttctgctgccttttgtttggctgtgccctgcccccagaggtggatggagtctacagaggcaggcaggcctccttgagctgtggtgggctccacccagttcgagcttccaggcactttgtttacctactcaagcctcagcaatggcaggcgcccctcccccagcctcactgcagccttgcagtttgatttcagactgctgtgctagcaatgagcaaggctccatgggtgtaggaccctctgagccaggcgcgggatataatctcctggtgtggcatttgctaagaccgttggaaaagcgcagtattagggtgggagtgacccgattttccaggtgccatctgtcacctctttctttgactaggaaagggaattccctgaccccttgcgcttcccgggtgagtcgatgcctcgccctgcttcagctaatgctcagtgcgctgcacccactgtcctgcacccactgtctgacactccccagtgagatgaacctggtacctcagttggaaatgcagaaatcacccatcttcagtcatgctggaagctgtagactggagctgttcctattcggccatcttggctccatcccccgtttttttgtgtgtgttttttttttgacagggtctcactcctttgcctcagctgaagtgcagtggcacaatcacagctcactgtagcctcaacctccgaggctccagcagtcttcccacctcagctccccgagtagctgggactacaggtgcacaccaccactcctggctaatttttgttttggggtttgttttttgtttttttgtgtttttttgtagtgacggggtttcaccgtgttgcccaagctagtcttgaactcctgggctcaggcagtcctgccatatcagcctcccaaagtgctaggattatcggcatgagccaccgcacccagcctaattaacagcttcctggtcaagaaaacattttcatatgaataacattatgtgtgagcattgtgtttatattttaggtgtgaaagcatttttttaggtccttgattgacctgaaatatttgaatacacagttgcctttttttccgtgacatatatttagggtaatgtattaagtatatttttgttatataactgctctaaccaagttatcttacctctctaaagctgcagtttcttccgaaatgttataataatactagtattgacttcatagagctgatgtgaggattaaatgagttaatatatgttaaatgcttggcacacaataagtgctgagaaaaaagttagacacaggaagtacatggatatgttttacatatatatatttatatatgtatatatgaagagtcagagcataatgaattcatttccaaaaggtatttaaaggataaggcaatatggttaattaaaatattttgttaagctcttttatgtaagaagaacatattagattgcttcttactttgataactactgtttgcttttcctagttcgaaaaagaaaaacagcatgatattcgatcattttttgtaccacaacctaaaaaaagacagttgatgacctcctgtgacgaatcaaagagattccgggaggaaaatactgtagtgtcatcagaccctacaaaaacagctgcaagagatatcatcgattatgaaagtgatgttgaacctgaaacgaaaagattgaaattggctgcctcggaagaccactgcagtccgtcggaagagacaccatcccagtccaagcaaatccgaactccactcgtggaaagtgtacaggaggccaaggcccagttaaccaccccagcctttcctgtagagggctggcaatgtagtctctgcacctatatcaataattcagagttaccttattgtgaaatgtgtgagactcctcaaggcagtgctggtgagtatatagaaggtgaccatggaggtaagggctgttagtggtgtcttcagataacctgtgcttttagagac

SEQ ID NO: 24594 - DNA, 2300 bp, Homo sapien
aatgtgcagcctaccaaggaacaacattttcagcaacaacagatattggaagaaacagaacaatgcctttaaggatttgagaggtcaggcatggtggctcacgcctgtaattccaccactttggggggccaagacaggtgaattacttgaactcaacagttcaagaccagcctgggcaacatgttgaaactcaatctctgcaaaaaaatacaaaaattagccaggcatggtggcatgctcctgcagtcccagctacttgggaagctgaggtgggaggatcacttgaatccaggaggtcaagactccaatgagctgtgattgcaccactacactccaacctgggtgacagaggaagaccctgtctcaaaaaggaaggattcaaggagaatcgtatgcccagcaaaactactgaataaagatgaggacaaaatcaactcatttctagacaggcaaggacagaaagtttacctctatcagaaaaacagtatggtttaactagaaatagctgatagaatttgtgcatgtttgctgaacatttgctagtattttcaaaattctgcaagctctctttgctgttttattgtgcagaatagaatattttctttaaatgtttaattctatttgtttctttgttaccattttgtttttaagagacagggtcttgccatgttgcccagactggtgtgggactcctggactcaagcaatcctccttcctcagcctcctaaagtagctaggactacaggcgcacgccaccatgcctggctaatttttctgttttttgtagagacaggatcttgctatgttgcctaggctggtctagaactccttgcatcaaacaatcctcctgtcttggcttcccaatgtactggactacaggcatgagccactgtactcagcctgttacctttttttaaaaaacaccaaacttcatcagtctattaatctctctgctttcctccaccctttttttttttttgacatggagtcttgctccattgcccaggctggagtgcagtggtgtggtcttggatcatgcaacctccacctcccaggtttgagcggttcttctgcctcagtctcccaagtagctgggactacaggtgcatgccaccacgcccagctaatttttgtattagtagagacacggtttcatcatattggccaggctggtctcaaactcctgacctcgtgatccacccgcctcagcttcccaaagtgctgggattacaagcatgagccaccatgcctggcccgctctttctttaatttccctcacgcattgttttaaaaatcgtgtcttgtggttaatgatttcattctctatatttatctgaattctgtatatttcacaactaattagataactttttgtagtatttgagaacgtataaattagcagccatgcaaaataagagttctacattattgggagtagtggagcaggggagagagctttttccctatgataacatgttttaattttacaaatatgggaacagcctaaattttccttccttattttttcgcttccttttttttttgattttttatactgtggtaaataaaatttgtcattttaaccatttttaagtgtacagttagtgtcattacattcacagtgtgttgtgcacccaccaccagtatttccaaaaattttccattaccccagagagtctataattatgtagcaatcactctccatttccccttcccctccagcctctggtaaccactaatctttctgtttttatgaattttataattctttcttatatagtaccactaagaagtacagataatattcattatgtaaaatatcatttacaatatatggtattttgctatcattatctacagggtctgtcttagttatctattactgcataacaaattgctccaaaacttagtgtcttaagacaacaatagccttgtattatttcttatagtttctatgggtgcagtattcaaccagggtacaacaggaatgacatgtctcctccatgatgactgtggcccttgatggaagacacccatgccaggggctgaaaacttctctgaaggcttgttcactcacatgtctggcaattggtgctgtctgtcacctgggagcttttctggggctgtcaactggaacaccgcaggatttctccatgtggcctgggtttcctcataccaatggtggctaggttcccaaggcaagtgtcccaagagagaaagaaagggagagacagagggccagccaagttgaagccatattaccttcaatgacctagcctcagaagtcacacagcattggc

SEQ ID NO: 24595 - DNA, 2300 bp, Homo sapien
tgtttgaagacaattgtgtgttgtctttgccagcatgtagcagtcataccaaaaggcctccagctagcatactgcacacctgtacaatgtctcatgtaagtggagagtgtgcttaagaatccattttaatggcaaacactgcattttcaacaaaataaaacaaaaaccaccacctaccaacttcttcccaatattggtagttctgaatgttagattttttttgtgaccgtgtgatcaaagtatacctaagtgtatgaatggaaaaataggtgcagaacaggtattggcaagtattttcccatttttattagtgtgtgaatttttaatataaatatggggacatgatgcattaaaggaagtcaaaaaattttaatgaacaagtttcagcaattcaatttataacaattataagcaaatccgttaaaaatttttatatagtgacagcacttagattttttaaacaagtaaatttcttattgatgacaactaaatggtatgtgtataattttatcatacagtagattccattcattcactatacttatgtaattgactctacatgcaagtatatatatatatatatatttttttttttttttttctcgagacggaatctcgctctgtcaccaggctggagtgcagtggcacgatctcggctcactgcaacctctgcttcccgggttcaagcgattctcctgcctcagcctcttgagtagctgggactacaggcacacaccaccatgcctggctaaattttgtatttttagcagagacagggtctcactatgttggccaggatggtctcaatctcttcacctcgtgatctgctcgccttggcgtcccaaagtgctgggattacgggcgtgagccaccgtgcccggctacaagtatatctttttaatattatgtgtattgtttatgtttaatatttattttttaaaaagctaatgttaacgagttccacatttctcaaattgacacctatttgtgctaaaatacacccagtattttttatccagtaaaatgatagttacttaaattattaatattagtaatcataatccaacctaacaggaattttttatttgttaattattctctaacagctgttttcagtagtgggtagtatggacccctaggagatgattgggaattttatgggctggtattttggttgtcacattgatagggatatgttattggatcggttgtcctaatgtgtaagttcaattgatccactagatttcaacccttctgttaacatttgttcacagtacttggtgctttgagcttctaattttctgaaaggtctagagaataacttgtcttttgcaagcagtttaagttatcgcttcctttcttttgccaagtcagttaccacttttctatctgcattatgccttctaaatatttcttcaaagcacttattctctgatgtctcctctcattctctctttcatagtaattttgtgttcttttattttatccctttgctgtcaatccaggaaagggttagaaaggaagaagtatttcaaaggaagaagagaccaccatgtaatcaatctgctatgctttaacagccctattggagataatatctcctcctagagggcacagaaaatgttctgggtggttttggttattataatgactggctgatgcactggcagttcatgcctactttatggatagatctgctaaaacaccaccatgtgtgagcccactcaaaatgccaataacacccccatttacaaacagtgacctagtgcaattcacagtcatcagttcatcacagccttgcattaactcagtgtaaacagtatgcttagacactaacatcttctctagtttaaagcagtgtcaaatcttattcattactgtttttcaggctgagctttttgaaactaatattcattcagaaatatcaatgaaaacagtgtcatggctccttatcattaaaaggaagagcacattggataaattattttcttaactccagcattcaattttgctacatgttttgtcttcattttaacagatattttggtaaaagacctcagtgggattgtagaggggcatcaaatcttaatgaacttcaccagctattaagtgacataatgattagaagattaaagactgaagttttaacccagctaccccctaaagtcagacagcgtattccatttgatcttccatcagcagctgccaaggtgagaaccgttgcttgatttaaagtcttactttaaataattttgaattacactattaaagattatacgtatttcatatttcacagaagg

SEQ ID NO: 24596 - DNA, 2300 bp, Homo sapien
aaatcagggccttacgtgctaagattattaggctgtgggctccatgtggccgatgaataaaggcatctttttagtgatgcctttattcatcggtgtattatagttggcaccctgtagtcacacgttttttgtttttgtttttgttttgagacggagtctcgctctgtcacccgaggctggagtgcagtggcgcgatctcgggtcactgtaaccacttccgaagttgaagcgattctcctgcctcagcctcccgtgtagctgggactacagatcctacagatctctgccaccacgtccggctaatgtgtgtgtgtgagtttttagcagacacaagatttcaccatgttgcccaggctggtctcgaactcctgacctcaagtaatcctcccgcctcggcctcccaaagtgctaggattacaggtctgagccaccgcgcctgtctgccactcgtttaataaatggtcgttactcaaagagtggtgatggggccactcttgattatcaatccttcaaacagaaaagcccttttctgtgactcttttccttccaagctgactttagaagtgtgtttgtggccgggcgcggtggctcacgcctgtaatcccagcactttgggaggccaaggtgggcggatcacgaggtcaggagatcgagaccatcctggccaacatggtgaaaccccgtctctactaaaaatacaaaaaattagctgggctgagtggcgcgcgcctgtaatcccagctactccggaggctgagacaggagaatggcgtgaatcagtgagccaagatcccaccactgcactccagcctggggacagagcaagactccgtctcaaaaaaaaaaaaaaaaagtgtgtctgtaaatgtagttcagaacttcggagccctgtctttacagttcaaactgaccacgcgaagactaaaggcagtagaggtactttctacaaatttagccgtgcaatctaatagcgagcaggccgagacgcccgcgattgaaggccggggtggagaaagtaataagggccctggaaattacccccatcccatgtcacccactctttcttaaaatgccattaaattccgttcaactttttatctcccatgcaagaaactagcgacttgccagccacgccacttccagccagtcacacctggcgtattcgccgcagaatctccaactcccgccacaggtttgggacgtgtccgcccctaagcggaagtgacgttcaacgggacaacgtgaaagtagatgagtttaaatacgtactaataatttaaaacccctatggtattttgaggaaactcttccggctacccttcttccatcacttctctcccgttagggttgcgaaaagggctctgtacagcctcgcgacaactcgttctccgccctaatttcaagtcattcaaaactctgtcccttttcattggctgaagcggcggcatgggtacctctcaggaactacaattccagccaagcaccgcgacaagtgaacggaggagaagttatgagtaggggaaaagcatgttgggaatcgtagtccgctccaggccgaaaagagcaatcaccccgccctccgccactgaagctggagaaaccaggtgttcgtttcagaacccgttagcgctaaggggaggagccaaccccttaagcagcatgcctcacttcgccccacatggaggataattttcctttacccctaaaaagcactataaatacccactgaggagatctggttgtcttttaaatacctcgagtcagtaaaaactcacgaaactccgcacctcaggctccaactcgtgggaaaaggtagctcttttacaagtgggcaaaatggctgtcctcctagttttaccattggttggcttttgcgtccttcaagggcggttacttaccacggattggttctttttctcttgaggttggaggaagatttggcacggctctccgcggcctgggaggaggtaaaggggtggagagaagacagtttttttcaagcttgattgggcaaaactcatgtcactccggggacgtacaacctatgaatagtcggctgccgctcaaagagaacgaagaggcggggctagtgcgtggtgggaaggggcgggattctgccagccgcggctgccgctggagccggtgtccgggctggtgatggggttaattccctttcgtaagactcttacttgcacccacccagccccgccgtcgccccgccgcgccgcgctccaaccgcctcctcctcctcagtaacgcgggtaagagatgcccttccctcccccgtccagctccccggg

SEQ ID NO: 24597 - DNA, 2300 bp, Homo sapien
gtgatgaagaaatcataacagaatgccctaaaaatagccaaatatgccaaatttttagaaattgagacgtgtccaattattcctgtcagactggtatcctattacttagaagatcttgtttcacatattataaatgggtagactttcagtttgactttaatcatcttttcatttaaaagtttttgtcatcaatgatatttaagctaaaaaaggtttcttacagttacaattaggtaaactataaccatgaagatatatatatatatatttagaaaattttattagaaaaaccatttgctgttcactaatcctaatttggaaagcacctcttcttcaccttttacttaactatcccaggacaattacacacggagcatgatagtcccaataatttaagtttctttataaaaacaagctcaacagagtcaccctttgcacctagtcacagcaacaaaagaaaacaaaacaccaaaaaacttcaaagcccacaaagatttgttggcagcctaaggctcaggaatcaaaacgtgtgtaaatctgatcccgggggaccgtggcactgacagtcattcaactttctttttaatattcccattgtgctttttctggtaccacagggaaaatgtacctacattttaccaaccggtcgaagctgaaaattctcttggtgcaaggccaggggatgcggccgtggggcggccgggggagcccggggcaccggcgccagccacacgagagagcagtaccacgctcttggcaggcctgctgtggctggctcccgagtccctggggctgcaagagcagccgcggaggcagcagcagcagccatggcagggactcggaaacctttcccctgcctcctccgctaggcctcgaggggtttgcttttcacatggcccccgggtgggggcggtgggcacaaggcagtggctgcagctgcagccggagccgcagccgcgggccaggcgagcctggctcactcggaacccgacctaacggcgggctggcagcagcgggacgtcagaaggccctggctgaagcgccgacgacccggcggggaaggccacctttccacacaccacatctctcccctgcctgcctccttctccgttagcgctaccggttggcgggcgggggaggggagcaaggcgcgttattcccggggagctggacgggggagggaagggcatctcttacccgcgttactgaggaggaggaggcggttggagcgcggcgcggcggggcgacggcggggctgggtgggtgcaagtaagagtcttacgaaagggaattaaccccatcaccagcccggacaccggctccagcggcagccgcggctggcagaatcccgccccttcccaccacgcactagccccgcctcttcgttctctttgagcggcagccgactattcataggttgtacgtccccggagtgacatgagttttgcccaatcaagcttgaaaaaaactgtcttctctccacccctttacctcctcccaggccgcggagagccgtgccaaatcttcctccaacctcaagagaaaaagaaccaatccgtggtaagtaaccgcccttgaaggacgcaaaagccaaccaatggtaaaactaggaggacagccattttgcccacttgtaaaagagctaccttttcccacgagttggagcctgaggtgcggagtttcgtgagtttttactgactcgaggtatttaaaagacaaccagatctcctcagtgggtatttatagtgctttttaggggtaaaggaaaattatcctccatgtggggcgaagtgaggcatgctgcttaaggggttggctcctccccttagcgctaacgggttctgaaacgaacacctggtttctccagcttcagtggcggagggcggggtgattgctcttttcggcctggagcggactacgattcccaacatgcttttcccctactcataacttctcctccgttcacttgtcgcggtgcttggctggaattgtagttcctgagaggtacccatgccgccgcttcagccaatgaaaagggacagagttttgaatgacttgaaattagggcggagaacgagttgtcgcgaggctgtacagagcccttttcgcaaccctaacgggagagaagtgatggaagaagggtagccggaagagtttcctcaaaataccataggggttttaaattattagtacgtatttaaactcatctactttcacgttgtcccgttgaacgtcacttccgcttaggggcggacacgtcccaaacctgtggcgggagttggagattctgcggcgaatac

SEQ ID NO: 24598 - DNA, 2300 bp, Homo sapien
tctgtggggatctcaggggacttgccttccaaggctgtgtatttatttctttatttttttgagaccatgttctgctatattgcctaggctggccttgaactcctgggctcaagtgatcctctcacctcacactcctgagtagcagggactacaggtgactactacatgactggcaattttcatttttttaatagataccacaaatttcctccaggacctgaatgtatctatgtcaattctgtaactaggtgtactagttatggaatacagaagatcattaagccaccatagtcttctcaaaccctgaagaaatgatcaaaactcagatgtttcctcagaacccaagtttattctgctaacaagtaaacctcagaaatgggcctagaattttatctctgatcacagttatgtctactacagactatagaatccatgatttaaagacatattcttccaggcataaaagcagagtggtatttgaaaagacgagcgtactccatcaaaatgtgatgaagaaatcataacagaatgccctaaaaatagccaaatatgccaaatttttagaaattgagacgtgtccaattattcctgtcagactggtatcctattacttagaagatcttgtttcacatattataaatgggtagactttcagtttgactttaatcatcttttcatttaaaagtttttgtcatcaatgatatttaagctaaaaaaggtttcttacagttacaattaggtaaactataaccatgaagatatatatatatatatttagaaaattttattagaaaaaccatttgctgttcactaatcctaatttggaaagcacctcttcttcaccttttacttaactatcccaggacaattacacacggagcatgatagtcccaataatttaagtttctttataaaaacaagctcaacagagtcaccctttgcacctagtcacagcaacaaaagaaaacaaaacaccaaaaaacttcaaagcccacaaagatttgttggcagcctaaggctcaggaatcaaaacgtgtgtaaatctgatcccgggggaccgtggcactgacagtcattcaactttctttttaatattcccattgtgctttttctggtaccacagggaaaatgtacctacattttaccaaccggtcgaagctgaaaattctcttggtgcaaggccaggggatgcggccgtggggcggccgggggagcccggggcaccggcgccagccacacgagagagcagtaccacgctcttggcaggcctgctgtggctggctcccgagtccctggggctgcaagagcagccgcggaggcagcagcagcagccatggcagggactcggaaacctttcccctgcctcctccgctaggcctcgaggggtttgcttttcacatggcccccgggtgggggcggtgggcacaaggcagtggctgcagctgcagccggagccgcagccgcgggccaggcgagcctggctcactcggaacccgacctaacggcgggctggcagcagcgggacgtcagaaggccctggctgaagcgccgacgacccggcggggaaggccacctttccacacaccacatctctcccctgcctgcctccttctccgttagcgctaccggttggcgggcgggggaggggagcaaggcgcgttattcccggggagctggacgggggagggaagggcatctcttacccgcgttactgaggaggaggaggcggttggagcgcggcgcggcggggcgacggcggggctgggtgggtgcaagtaagagtcttacgaaagggaattaaccccatcaccagcccggacaccggctccagcggcagccgcggctggcagaatcccgccccttcccaccacgcactagccccgcctcttcgttctctttgagcggcagccgactattcataggttgtacgtccccggagtgacatgagttttgcccaatcaagcttgaaaaaaactgtcttctctccacccctttacctcctcccaggccgcggagagccgtgccaaatcttcctccaacctcaagagaaaaagaaccaatccgtggtaagtaaccgcccttgaaggacgcaaaagccaaccaatggtaaaactaggaggacagccattttgcccacttgtaaaagagctaccttttcccacgagttggagcctgaggtgcggagtttcgtgagtttttactgactcgaggtatttaaaagacaaccagatctcctcagtgggtatttatagtgctttttaggggtaaaggaaaattatcctccatgtggggcgaagtga

SEQ ID NO: 24599 - DNA, 2300 bp, Homo sapien
tgggaggcagaggttgctgtgagccgagattgtgccactgctctccagcctgggtgacagaacgagattccgtctaaaataaataaataaatattaactcaaatttctgttattgaggatttatttgaaagttttcattacctgacctcggtagcatgtttaagcacagttccacaacatcattagaaacctaaacctgtttcatatttgtgttttaacatttgtaaggtagagacacagccaactcatacaattaccagtgtagcatccaaaaagaatattaaaagataagattctgtcttactaacaagttgtagattattcctaaattaacggtttattatcactaaagctcactattaacagcgaagttacttcccttcataattagaggaaggcctctacttgacagcaataaaactgtattttaagatatttttaattatgacttttcactaattcacaattacttgagtttataaggcctacctaacaatttccaaagcttggagagagagagaatcttttgaaatgtagtagaaaatattcatttgtttttgctacagtgtaagtgggttgcttcattattctgcattttagcttgtccatctgtttcataacaagagtttctgttacagtttttaagaaaagctgccttgaaatatgtttctcataagtaacaaagattttatctgagaaaaaaatcatttataccctttggcaaaagcagtagctctttatggaaaaaagttaggagcttggatatttgtttcttgggtacctaggctggcacttgatttttaccagaaagttcagggtgcagtaaaagattgtacactggagaaattttaggtaaatcagcgggaagcttctcagataagtctcagtgttgttagctgcctcatcacctttgttgtttgaagatttaggaagattttgtggatttctatgtatttttaacaatctacttctagggccgagtctatttttggaaaggtgttaatattttttcacattatactataaagctggtatcttttagtgtttgtcaagttggtataaagaaactgctggtttattaatccgtaaggttgtgtaaactctacatgacttaacattttagtgacatagaaaagtgggatttctggttggtgtacagatctttcttcacatcgtgcaggtaacgtatgagcattgtctgatggatccttacaacattcctgtatgcttttggaaagtatgatctttgtttaacaaaatgggaaacagaggcacatgctatacccagctatcacagaaaacaatagttagaatccagaaaacatactcatctggtttagtgtgttgcccaatagatgcaattagtattctgttttatcttatttgtttgccttataattattaaacattgttttttaaatttggttttggttgattccttttcttctaagtccgccacttgagctaatatagccaacaagcatctgacatgaggcagaattgtcctcggatcacagttctattgctatctccatctgttggtatgaagaagtaatgctcttgccagaataagcaagcttcttttaattttagcaaaaacagattaagaaataaggaattgtgctgttaattcattttctttgtgacaggtaaagtcagttggaagatgcaaaactgtcacaggaagttagctattacagacaaattgcctttttttaaggctttttgttagtaatactaaaagtgtcaaagagagtaatttaaaaatgatatattaaccatacctaaattatttatggcttgttctttaaggaattatagaaaaatatggttgtctcaactttttttcttcaacctgggatcaggcattgttgtgcaacaatattttaatagcgagaaatctcaaaaatcctgacagtctttgcatattcacagtttcatgggcttttgcatcattgcttctgaattgctaatgaagagctcaatatagcttctgatgcatttcagatattctgggtggtgactggctagagtgttactgacatcacaacatacagctgttgactttctattgtctgagtcctcctcggcaagtgctttagactgctctagcaggcactcccaatgccagactaatcagctggatgtgtgcagtgagctctatagaggagcaatgcagagcatcagtttacaggtactatggaaagaacatctccttaactctgtatgatgaagcaaataccaatacaatgaaggtatgtgactcaattcttttgctaaatttgtatagaatgtaatct

SEQ ID NO: 24600 - DNA, 2300 bp, Homo sapien
aattctgccaagtctgtcataagaagttattattccagtctatacagaacccaaattctgatgctgcaatagacgtgtatgtgttgaggtggcatttccaacacaaaaaaaggtctcatgttcacatttcatttccattcctgtgttattttttaagggtggaaatttgtcattgtatgttttaatggtgtttggaatttggggtataaatttgaaatacttgtcatttgatgaactgaaaatagtgttaaatgttaattgttagattaaaaaggaagaagtttattctgttctctgcctttacctgcctgtaagtttaagtagtataggaaattcacaaggaataaaggtttagaaaacagcatattatcaatcactttattacagatgagaactagaatacacagtattctgtttttacaaagttagactggtgagaaggaagtcattggaaacatggccataaagtagttttgccatagaaataacatcattttacaaaaacccttcactgttaagggattcactataactgaatttttactttggttttggtttttttctgtgtttttggttttttgtttggttggttggttggttttgtttgtttgttttttgagacaagggtcttgcgctgtcgcttaggctggagtgcagtggcactatcttgtatttttttgtggagacaagatttggccatgttgcccaggctggtctcaaactcctgagcttacccacttccatccacccaatccatccatctcccaaagtgctgggatcataggtgtaagccaccacacctggccaagatttttagtttcttaattttaatgtgttgctttgttactggatataccttgtggttatatttttaaagaagatagatgctagattttattcaattatttagtccctgagcagaattattaaggctaccagacaactacagtgatgctgctgtctataatcaatacttgaaattgccatgtctgttgctttaggaattagtgaggatataaatgaaaactgataacaaaatgtatttatggtattatcagggaaacaatttcattgccctttagctgttaaagtctgtataggtggtattctagttcagttcatctttgtaaaaacttttcagtactctgaagctagatgattatttttatctagttctttaaaaaataaaaaactttgtgggtagcatctagtaatttacatgagtctttagctaattagtatacctaaaagaatcctcttaggatcaggagacaaaatacaattcgtattctctacttagagcttatcattgtagattcttgttaagtaaataagtttacttgataaaagtaaatttgtgcacttaacttaccacttaaattaccaacattcagtttaggtgtttgctttgtgaccttgagcagattacttgagttgtttaatgatttgtcaagtgaccttaatcatacaatgaagaaataatctaaaaaattacagtataactccatttgcctgtgtctttgacacattcaaaagtggctctctcccctgccttttttttttaatccccagcagggacagtttcatgggaatggaacctctgcagatgcatagagccccatgcttgtgttaatattctgttgttaccaacttgaaattcttaatagttgttgtttttttttttttttaacaaagggccctacatattttccatttactctgggctcatgttatgtagcaactcctggtcctgagaaactagttatcataatcgattgtaatatgccctgaatagtaattgtcctatgttatctaagtgtgtgaccctataatctttgcaattgtagaagaaatctttgtaggcagattttatttcaatatattttagtgagggaatgtaggtaacttgggctaaaatgttatttcataatagatggttttaggggcttaccatttaatcaaaattttatcattttagagcataaaagtactcgcttaaatttttttttaaatcttactagatgaaatgaattcagagcaggatttaactcattgtaccattacaggttatcaagttatacccaaccagcagcaaaactaccaaggaatagttggagttcagcaaccccagagtcagagcctagtcagtggccaacccaacagcattggaaatcagattcaaggagtggtcatcccctatacttcagtgccaacatatcaggtatattgtctcttttatgtactttgggtagagatgatttcgaataaattaagtgcacaactacaatacatcttctatg

SEQ ID NO: 24601 - DNA, 2300 bp, Homo sapien
ttatttatttattttttgagatatagtcttgctctttcgcccaggctggtgggcagtggtgccatcttggctcactacaacctccacctcctaggttcaagcgattctcctgcctcagcctcctgagtagctgggattacaggcatgtgcaatcacgcccagctaatttttgtatttttagtagagatggggtttcaccacgttggtcaggctggtcttgaactgctgacctcatgatctgcccgcctcggcctcccaaagtgctgggattacaggcatgagccattgtgcctggccaactcttctgtttaaaatttttcaatggctccctgtaatccttagaaaaatgtcttaaaatttttaacatgattttcaagactctgtatcatctgatccttgcctagctttccagcctcacttgtaccacactcctctttctatgttatagccacactgggcattttttagttctgcaagtgcactgtgtttgcttgcttcagagcctcatgtggaatagccttctccttcacctacctagagttccccgacacgtcatttcctcatgaaggccctttctgactccactagcccatgttcggtcccatcctcatacacttctgtagcactctgaattacccttctgtgacatttatcatcactcataattacttattcaatgtctgtcttcctgactagactgtacagtcacaaagacagggccttcttctgactgcctcacctccttatcagtgccaggcacaatgcctagctcataaaagatgagtgataaacacttgacaaatgaatataaaactatgaaggattcttatttaattctaaaattagagataattaaagacatagctctattggaataatttctagattgatcaaatttccagaagtccattaaagttgatgttaaaggtcaattctaatttttctgtaggattgttgtcctatagaagcaactgtccctaatcagcattatgtctcagtttataataacactatatacgagaggcctgattgggaaaaaaagtacaaaaatcggagtgcaaataattagctatttttagggaaaatatctgtaggaaaggtggtatattcagatgtatcacttcctttatcttgcaaagattgtcagatagatgtactgctggaggataaatttaattgatgtagaatttaacataatagtatatgcaactttaaataaaccatgcaagcctttagctaatagttattacagaccatgtgatttcatgaaagtattaaatatggatcagttttcatttaatggcagccaatcacaaagcgccacatcttgattataggacattctcccagaaaattggaaaataaatcactatctagtctcttttgtattaccatggaaagtagctggaaaagaaataatctattctctgctttgtgttactttaaaaagtagctgtggcaatagcctaacgcgttttgaagttttgaaatgatctctatccagtgtctaggaaattgctgaaggcctgcgttctaccaattcctccgcttaggcacatggactacaggttattaaagaaggtgacttgcggtttttatcccgtttttctgcaaggttgggctacgttcagaagaaatcaaagcctcggagttaatcccgacaaagcccatttagttccatgcgaggactatttcctccacactgagagtctcaacgaggccgagaatagcatatgccagttggagtgacacttatttctccctctcccctttatagaatgtgtagtggccctcactactgccccctttagctgtgcctcagaacccacagttacatgctccacaatatggaggcgaataagcctaagtggactacaattcccatcatgcctcactgcaggcgccgccgacgtgtcttagcggttagtcatccctcttaccgctttcctccacttcctggactgcgcgaccggaggcctagcgggcgcgcgcccgcaccatcgactcgccaacgagagaaggtcctggggcacggacaccgacgggttgcgactgtgacgtgaggtgttctcgcgcgcgctagcgcgcgtctccgggtgccgctgacgggcgtgcgcgcttgtgcggagccggaggtgggggccgaaccagccaaggttgcgggggccgcagagccggacgaagacggagggcggagccggcttcgggactgcggagactacacaccgagcgagcgcctgggcccgaagggagcgatgctgtggttccagggcgccattccggccgccatcgcgacggcc

SEQ ID NO: 24602 - DNA, 2300 bp, Homo sapien
cttttcttttttttgagacagagtctcacattgtaccctgagctggagtgcaatggcatgatctcggctcactgcaacctccgcctcctgggttcatgcagttctcctgtgtcagcctcccgagtagctgggattacaggtgcacaccaccacacccagctaattttttgtattttcagtagagagggagtttcactatgttggccagactggactcgaactcctgacctcataatccacttgcctcggcctcccaaagtgctgggattacaggcgtgagccaccacgccaggccaatttttgtatttttagtagagacagggtttcgccatgttggccaggctggtcacgaactcctgacctcgtgtccacctgccttgacctcccaaattgctgggattacagatgtgatccacagtgctggcctgcctttttttgtgattgcataattattcagtttttattggtatatagattgcttttaatcctttgttattatagagtattacattatcacatgcctaagtaagtcgtaggccttatgtcttcgtgttccaggttaagatattgtattcaggtatacttgtctgctgaggaagcagcatggcagataccaaattaattttttagctaccagatgcagccactagcttgtgggttgtaagagcaaatagttctttctcttttgagatgaagtctcactctgttgcccaggctggagtgcagtggcgcgatcttggctcactgcaacctctgcctaccaggttcaagcgattctcttgcctcagcctcctgagtagccgggattacaggtgtgtgccaccacgccgagctaatttttgcatttttagtagagaccagatttcaccatgttggccaggctggtctcaactactgactttgtgattcacccgccttggcctcccaaagtgcttggattatacctgtgagctaccacgcccggcctttttttttttttttttttttttgagacagagttttgctcttgttgcccaggctggagtgcaatggtgcaatcttggctcactgaaacttccacctcctgggttcaagcgattctcctgcctcagcctcccaagtagctgggattacaggcacttgccacaatgcccagctaatttttgtatttttagtagagacggggtttcgccatgttggccaggctggtctcgaactcttgatctcaagtgatctgcctgcctcggcctcccaaaatgctgggattacaggcatgagccaccatgccaagccacaaataattctttcatttgaaaattataaaacaaaccagaaaaagtcttaatgaaataagaattatatttttctccttcaacctgattgctgtgaaagaaactggtagttgcaggaaaatacttgtgattggtacagtaaattttattaaaacaactcagtatttagaaaatacttgcattcatctagtgattttgtttgattttgttttacagtgaagcctgcctacagttttcacaaatctgtatcctttcagtaaagaatggcttatatatatacatttatttaccttccttttggttaatttatgaaatttagaaattattcatttttatttaggaaatcatacattcttttttatggaaactttattactaagtgtcctcatttaaaaaaaatgttattataggaaatttcaaacatatataaaagtaactcaatggtgtagtgcaccccatacattgagataatatattgcagctaaagataggatagggagtttttaaaatgtgaatatctgaaaaacaatatagatcagttgggttggaatgttacaagtagcttgcaagaggcagctggcagcaagatggatagaaaaggaagttatgatagaggagaatgtagtagattcttcactagaatatacctcataaattaacatgtcacatgtattaatactacaggtataatgatgcagtacttgaaattatttaataaatgttagattatattgtgaaaatcacaaagatcatttgttttcctttgttaccaatagtgtttcgtaaaactatcctttcgtttcacatgaattgttagacttcattaaactgtacagatcctgtagtgtgtgttccatccagtttctttattggagacagtggaattcccttggaagtaatagcaggaagtgtttctgcagatgaacttgttacaagaattcacaaggtccgacaggtaagaaggaacagaactgttgtttccgtaaatggtacgtcaggaattggatttttttttttgagatggagtct

SEQ ID NO: 24603 - DNA, 2300 bp, Homo sapien
taataatgaatgacgctggcagttacaaatgccccctacggatgactactgtgtttaatcagaaaagattccagaaacactgagtcaaaagtcatatctgcaaagccatgggcaggaagtaactggcagatgggaaaattattattattaccccttctgaggtgagtgattcttgctctttcatggttaaaacaggaacaatgctactgttctctgtattagattgcccttgaatattgtcttcagtgttagtaccatactttattcttcttataattcattatttgtaaaacatagctaataataacaatgactccaatttattgagccttgattctgcgctggccactgtaataagaatggatgtgtattatctcatttaattttcccaacaaatttatgagatgggtactacaatgatttatcctcatcctacacaggaggaaactgagactaaaagaaacgggggctgggtgtggtggctcatgcctgtaatcccagcactttgggaggccgaggcaggtggatcacgaggtcagaagttcgagaccagactgaccaacatggggaaaccccgtctctactaaaaatacaaaattagccaggcgtggtggtgggggcctgtaatcccagctactcaggaggctgaagcaggagaatcacttgaacccgggaggcagaggttgtggtgagctgagatcacgccattgcactccagcctgggcaacaagagtgaaactccgtctaaaaaaagaaaaagaaatggaaaacttcctgatttcagggagccagcagctatttatcagctggtacagaagtacactgatgtggaccagttgaatatcagtcctggctactgcttcctttcttcatgctgcttggatttctgacataatggcaggagctcaagcatccatcctgaaccatgaggtagaaaccttgttaaaggtgacaaagcaacaacaaaggagcctggattcctggtgattatgagtaacttctccttgcacacagcttgcaggtggtggagcagattctgtgcttttaacctcatacacatacatgtttatgtgcatgtatatgcatgtacatatgtatatgcatatgaaataaaacatcacataaaagtgcatgctgcatttatacaaaatgtggtctgatttttctattttattctagtccattttcctccctcccactctcctttcctcttttttctttcttttttttcaattgtgattgccaacttctaaattgagtcatgtcatgcaggcaggaaagcatgcatgctgcaaattacagccagcagaggtcggccttgaggagtgtggcacatgcctggggaaaaggacgtggagtacaagagcatctccctgtcacacagccatcgtgtggagagccgatggcacctataccaggctggcccacagcgcagaactgggagaagtgacaggaacactgcacagggatcttcctctcaaaaagcgaagcctggggccgggtcacccagcaggaggcgtcttccgaacctaagagccttctgtttcactcagcatcaactccctgacatttgctagattagggggaaagggaaatgatcctttccttcgtagatgatcccaaaacatatgcgactgtggatcgcagctggggatgtgtcgcgtcccctcggtgctcagcctctgcgtatccacggtgcccataaacacagcgtccgctgctccgaacctcgctcttacccagccctcctggccctgactgtcctcctggattgcatgaagagttttaaggaaacaaataaactgccctgggatgaaacagaacttgctgtacaggcttggagctgggaaccctgggtttgccggccatggagagggatttagcacatgacggcacctcaggctccacacccagggctcctaagttctcccttttttagggtgcagtgctgtgtgtctcctgccacattctcatgtgagagttgttcaggggccgctctgtctcccctataaggtctagaattctgaaggagaaaactacgttagtcatttctgaatcactccccacccaccgcccctgcattcagcgggttctccaaccacatcctcctgagtaggggcccctggctgtccgtttaatgtaagcctgtgttggccctccccttcaggcaaagcaccaccaagcgctgagagaatctccgagctggtgtcacttgtaatcactggcttttcagggaacccattttattacggcttcttgagttttcttttgtgaagccacagccagtccttcttggctga

SEQ ID NO: 24604 - DNA, 2300 bp, Homo sapien
agaattgcttgaacccaagaggtggaagttgcagtgagctgagatcatgccactgccctccagcttgggcggcaacaacaacaacaaaaaaagattcccaggcttcaccctctacagtctatggaaagtcatgggagtctattaaaaaaaaacagacactataaaccaaattaaaagatgggaaaatttttctatcacgttttaatatgtgatatccaaactcccattaagaatttttatatcagtaataagataaaactcagaagaaaaatgcccaattaacaagaagagcttcacctcttaaataatcagaaaaagaaaagcacataatatttacgtcaaagtatcaaaaatgtaaaagttttataataggcattagcaaggcagacggatacaggcacacatctaactctatgtaggatttaacttggaagacaatttgcatttcaatcaatcaaaaaccatttttttttttgagatgatctccctgtgttgcccagactggcctcaagctcctgggcttgagcagtcctacagtctgagcctccaaaagtactggcaaaacaggcgtgattgaccatgcccagcctgtatataaggatattcatttgcagcattgtttgcaacacaaaaatgtaaaaccaaccggtgtttaatatgcaagatgttaatttatggtacattcttgctgtggaaagctatgcatctgttagaggtgggtctatatgttctgatacaggcagaactctaagagctattaagtgaagaaaaggctgaaaatacatatggcataattccatatatgttaaattgttctatattttaaatgttatacacgtttccatttgtatttacgtaataataatgatccctgagctgtactgttgtatacatgctacaagaaagacccatttaatccccacagcctatgatgaattatccacattctacaggtgacaaaatagaggcacaaagttaagtaatttttgtcaggtgagatttaaacccaggcattctgactcctgtataaccattaagatatgcagagaaagaaaactggaaagatacatattgctgaagatacttattataggaagaggaggggggagggtgaaggaatttgcaagtttttcatagatgtttccatattgtttgaatctcttacaaaatatgttcagcatatttttaaagagaaaatttggggcaaaatacttatttttgtattatgtaaacaaattttaaaataatgtgtggctgggtgcgctggctcacacctgtaatcccaacactttaggaggctgaggcaagaggattgcttgagcccaggagttcaagaccagcctgggtgacatggcaaaactccatctctactaaaaatacaaaaaattagccagtcgtggtggcgcacacctatggtcccacctacccaggatgctgagatgggaggatcacttgagcccaggaagtcaaggctgcaggaagctgtgatcgcaccactgcactcccacctgggcaacagagtgagacccggtcaccaaaaaacaaaaaaaacaaaaaaaattggtaatcgttttcttcagacattttccgggttcctctgcttaacttgtataggaagtctgaggtttttgtgttggtctttaccttttttttttttttttttttttaagatggagtctcattctgttgcccaggctggagtgcagtggcatgatcttggctcctgcaacctccgcctcctgggttcaagtgattctcctgcctcagcctcctgagtagccgggactacaggcgcatgccacgatgcctggctaattttttgtatttttagtagagatggggtttcaccatgttagctaggacggtctcgatctcctgacctcgtgatccgcccacctcggcctcccaaagtgctggaattacaggtgtgagccaccacgcccggccctgatctttacatttttaaatattgcattagtgaaccgtgtactgattttgtgatcatagataacccagttaaatattaagtcttaattatcacttagtattttacaacctcagttgcagttataaagtaagggttccacatacctcctaacagttcctagaaaatggagctgtcttggcatgtagtctttattgccctgctaagtttttcatgctgggggtcagactgggagtctgatagaaatttcatttccaccgctggtcctctaaccaatgacttgctgcacaacctgagtggtctcctgggagaccagagttctaactttgtagcaggggacaaagacatgtatgtt

SEQ ID NO: 24605 - DNA, 2300 bp, Homo sapien
gtatttgtacgtatgttaaaataattacttgagcttctgtccactctgtttggcattttaaaatcttttcaggccgggcgcggtagctcacgcctgtaatcctagcactttgggaggccgaggtgggcgaattgcctgagctcaggagtttgagaccagcctgggcaacatggtgaaaccccgtctatactaacatacaaaaacaaaaaaacaaaaacaaaaaaaatcagccgggcgtggcggtgtgcgcctgtagtcccagctactcaggaggctgaggcagaagaattgcttgaacctgggaggcagaggctgcagtgatccgagatcctgccactgcactccagcctaatgacagagcgagactctgtctccaaaaaaaaaagaaagaaagaaagaaagaaaagaaagaaaaaaaagaaaaagaaaaaatttttcaataagttggatttggtggtggcaggaaatcccagctactcgggaggcggatgcaggcagattgctggagaccaggtgttcaaggtcagcctgcacaacatagtaagacctcgtctcaaaaaaagaaaagaaagaaaaaatatttttaatatgcaacaagcctcaaaaaatggaagtggtccccgtttctcttaatgtcttggaggccaaaaaaaggtactggttggtgaaatacacatatagatatcatcagtacccagatgttaattaacgccaagggagtgtaaagggtcgcccaagagagcgactttacgggaaaagaaggctctggaaccagaacatttaaaagactcactgaaggagaggcgcctacaaaggatgctaatcaggaatggccaaagagatggcagaaaaaccaagtgaaatggttagggaaagatgggggaaaaaaacataaggataactcaagccaatagtgcattttaagaagggtattaaggccgggcgctgtggctcacggccgtaatcccagcgctttgggaggtcgaggcagacggatcacctgaggtcaggagtttgagagcagcctggccaacatggcgaaaaccctgtctctactaaaaatacaaaaattggctgggcatggtagcgggcgcctacaatcccagctattcaggaggctgaggcaggagaatcccctggacccgggagctggaggttgcagtgacccgagatcgcgccactgctctcgagcctgagcgactgggtgagacttcatctgaaaaaaaaaagaaaagaaaaagaaaaaaagattaatcaaagtgtcaaatatttctttctttttctttttctttcttttttttttttttttttttgagacggagtcacactgtgttgcccaggctggagtgcagtgacacgatctcggcccactgcaacctcctcctcccaggttcaagcgattctcctgcctcggccacccgagtagctgggattacaggcgtgcaccaccacgcccgactaatttttgtatttttaggggagatggggtttctgcatgttggccagggtggtctcgaactcctgacctcaggtgatccacacgcctcggcctcccaaagtgctaggattacaggttgtgagccaccgcgcccggccaatgtcaaatatttcgctgattttcctcggtcagcaccaccacaataattgtgccaccttacccatgcaaggtttagacatctctttgactcttttacagggttttatactgtggtttccattatttcctctaactagacagcagaagcggcttactcatttttctcttccatagagtcttactccgatcgttcaattaatatcagtggaatgatttaaagaacatttgaaaaaccactcggacaaaaccctcagattcgaacttgttccagcagccaaaaatacccgcgggccacggctacactgcgcaggcgcaaaggcagatgggctttctccagaagggctttgcatttggcgcgaaatccctttccgtgggctggggctcttggagaggcgccgttcattggtcaggtttggcgcgaaatctccagctcctgtgtcacgattggttccggccgtgcaggtcggaagagggggcggggcggaagcggcggcggcgcgcgcaaagctgcagcgtctggaaaaaagcgacttgtggcggtcgagcgtggcgcaggcgaatcctcggcactaagcaaatatggacctcgcggcggcagcggagccgggcgccggcagccagcacctggaggtccgcgacgaggtggccgagaagtgccagaaactgttcctggacttcttggaggagtaagtcggcgagcgcc

SEQ ID NO: 24606 - DNA, 2300 bp, Homo sapien
tagtaagaaaccatcccataacagcctctcagggagacagggaagtgagtgggagatggccttccaccctctcatgttccagcaggatcacaagatgtttttccaagattcaggttagctgcagttcccgcccttgcctacatggcttatgtggatcctgcaaagcagccagagcaccatagcagagctgttcccctattctttggtctgtggaataggctaccataccggataaagctaagaggaaatctctaaaagtcactttcccagcccccaactaggataggaaatcataaacaataacatgtccccaaggggaatagtggagatcagtgcaacccttaaagacgtaatggttggtagtctccatcacattcctattgtcaccggtgtggctccagcaaaaaccagacaaattcaggaacttgacagtagactactgcaagttcaaccaagtcacagcctcagttgcagctgtggtatctttactacagcagattcttaagacctcaggcatatgacatgtggccactgatctggcaaatgcttcttttctatcactatcaggaaaggaggccagaaacaagaatatatatttacagtcttattccaggactaaataagaatacttttatcaaggcaacggggccaaagtaagaaagaagtacatggacaggcctcatggacagatggaaaggtaagatcgctaccctagcaaagggataatagatgggatttgtattcagatttctgataaccagtccatacattaggactatacctgattgaggcaatccaagttttaaaaaaaattccaagatgaagcaacttcacagacccccttctgtattcgaatcccatgagtataatgggatgccttttttaacggaatgtgatactgatcatgaatattcagtgttgctccccaaggaatgagtaaattctcctgcccccatgaactcaggaatgacgatgtgacttgttctcgccaataaactaggagaatgtgaaatgtgtcacttccaggcagccattttaagagctaaattctcttcctgactctgtaataatggaagcatgtatcaagatggcgcatctatcagcctaggtacctgtgtaatattaagaacaggaactaggacttatctttttattgccagcacctgatagaatgcctggcacaaagtagatgtttgtaaataatctttgatcaattaaatagggaataaaatttcataccacctgcaattagaaggaaagctacaggcaagcaaggaccatggctgtcttctcactactccatgggggagcctccagagagagcctttcacttgcgctgggatctatgtgcaccccttaacactttgtgccagactaagacactaccaagtcagttgaaacgacggagtgcaaactctggcaggggaaacagtattaaaccaaatctccaaattattttcaatttcgattcaaaactcatgaatgatagcttttttaaaaaatcagttttttaaaaaagcctaacttggggatattcgcccattgggcaaccaacactatgcactgtccctaacactgcaacagatccaggcaatcaatgcaattgtatgcgtttcttgttgtcgttgccactgtatttacacctcacttacacagggactggtaacccatgctgccttggcaagccaactgcactcctctgtcccaacaagcagggcaatggattgcgaagaggcctcctccgtccccaagcagctacgtcgcccaggggaagagagaaggcgggaaagtccaagagaggagaaaccaaggcccgcgcttaggtgggtgttttagtgacgagtctgcggttacagccgagcggagttgaaagggctgttagaagaatggagcagaagtcgcagttgggacgaagctgaagagagctggcattcgcccaggtctacagccagccacctggtaacccctgcccccgcccccagagccaatccagcgaaactaccgcgaattcccgggaattccctccaactccgggaaaactcccggaggggcggggcaagagtgggaggagaccctgcgcgcggccgccagcgctccgggatctcgagatagccgcagctctcgcgatctttctggagccgcacctccacgcggagtccgagcgcgtgtgctgagaccccagggtcgggagggcggagactgggagggagggagaagcccctttggcctgccttacggaagcctgcgagggagggtggtgtccactgcccagttccgtgtcccgatgcccagcgccagcg

SEQ ID NO: 24607 - DNA, 2300 bp, Homo sapien
caaatatttattatgcaaaccattttgctccgagttttctcctctttccctttttggacagatttgggagatctcacctttcaggttttagacatcgtgcagggaggagttttgaggtagggtgcagcttacggtccaggataaaacatactgattctgccactaccaggctttgtgaaaagcaagtcatgaaaacgctctgaaattctagaccttcagtagataggatctaccgtgtctataaaaatatgaagatccttaagttttattaaagattcgaaaaaagtaaaagtgtttttacggttttattttcatttttatttcttaccgttatcgtttattataaaggatattataaaggatacagatgaagagatacgtaatgcaaggcctgtgagaaggggcgtggagcttccgaaacctcttccagccaccaccctccaagaacctggagtttctttttttttttttaattctacaaatgtaatattagaattgattttatctggccattagtgtgtgtcctaactcgttcgtttctgagagtcccatctcccggcccggatatcatctttcctgtgtcagtgaaagtgcagagtagatgagaacctttaaccaccaacattagggaggggtcccagacaaagggggaaagtcatgctctgtagagaaaaggttccctgcctccgaactacctctggaacactccagactgaaatgtttcctcttttgatatagaaaagagggatcgtgtgtagagtgcagtctgggcaatccctctcctcgggaccatttcggggtgggggcctctggggtccgtgtcgcgacgcacgcgcctcggtcccagctatctccgcagcggccaccccgcctgcggacgcagtttctcggccccgccccacactcgctcccccgccccacccagtctccgcgccggagggaagtggcgcgagggggaaagcactgtctgcgcgcccactgcaaacctcagccagtctgagatcgctttaaacgtctgacccccacccccactccgccccgcccagttcttcaacctaatttctgattcgtgccaaagcttgtcctctgctcaaaatcgtggaagacgccgagtatggggaccgaagacctgggttcaagcccggcttggaatccctgcccatccctggcatttcatctctccgggcttatttgctggtttctccgaatgcgggccttgtctggttcacgctggatccccaacgcctagaacagtgcgtggcacgcagttcgtccttctataaatatcggactaaatgcatctctgtgatggtaatacccacacggtgttgtgagaatgaatgagtgattctgtgcaagttcctagtgatctgttacaaaaagtactggtcgctaaattactcttataataaagcatacttttaggataataaagcactattcgcgaattggttaccgctattatgaaattactgagcaatacatatctacatctgatcagtctccagaattatgccaaatcctaccttcttctgaaagtatctcctaattatctgcacctgaccctagtgatgctgtgaatgtgcaagtatagctacatcctccgaaggaaggatctttactccttttacctcctgaatgggctgcgtctgctgaaagcgcggggaatggcgttggaagcttggccctacttccagcattgccgcctactggttgggttactccagcaagtcactccccttccctgggcctcagtgtctctactgtagcattcccaggtctggaattccatccactttagcaaggatggacgcgccacagagagacgcgttcctagcccgcgcttcccacctgtcttcaggcgcatcccgcttccctcaaacttaggaaatgcctctgggaggtcctgtccggctccggactcactaccgaccacccgcaaacagcagggtcccctgggcttcccaagccgcgcacctctccgccccgcccctgcgccctccttcctcgcgtctgcccctctcccccaccccgccttctccctccccgccccagcggcgcatgcgccgcgctcggagcgtgtttttataaaagtccggccgcggccagaaacttcagtttgttggctgcggcagcaggtagcaaagtgacgccgagggcctgagtgctccagtagccaccgcatctggagaaccagcggttaccatggaggggatcagtgtaagtccagtttcaacctgctttgtcataaatgtacaaacgtttgaacttagagcgcagcccctctccgagcgggcaga

SEQ ID NO: 24608 - DNA, 2300 bp, Homo sapien
tggctagaacagggatgtgaggaagaattgagatgattagttgcattagaaccggacccttttgtcctactaaagtgacagatcctcattttagtgtgtggccccagtgcagataacctgcttctctggggatgtatatgtttcttcctaaatgcatgtgattacgtacatgtctactatttgtacaaatgtagtggatgctaatgaaaatatttttcatggagtaattaaacatcatttggggaagctggtcagattcagggaaagagagagagcttgtgtaaattcatatgcctcttagggtctgaagtgccttatgatcatcacagtcctgagacaggggcaaaggtacctagttaagctgataaaacttttttttttttttaattttaagttctgggatatgtgtgctgaacatgcaggtttgttacataggtatacatgtgccatggtggtttgctgcacctgtcaacccatcatctaggttttaagccccgcatgcattaggtattcgtcttaatgctctccccacccttgccccccataccacgacaggccctggtgggtgatattcccctccctgtgtccatgtgttctcattgttcaactcccacttatgagtgagaacatgcagtgtttggttttctattcctgtgttcgtttgctgaggatgatggtttccagcttcatccacgtccctgtgaaggacatgaactcattcttttttatggctgcatagtattccatggtgtacgtgtgccacattttctttatccggtctataattgatgggcatttgggttggttccaagtctttgctattgtgaatagtgctgcaataaacatacgtgtgcatgtgtctttatagtagaatgatttataatcctttgggatcaatcctttatacccagtaatgagattgctgggttgaatggtatttctggttctagatccttgaggaatcaccacactgtctttcactatggttgaactaatttacactcccaccaacaggttcagattacatatttaaataaaatgaaagagaagaaactatttttttcattgttgttgacacaaaatgtgattacttactgtccttgtgaaaagataccaactttctggataaggcctgctggtatgtctgtagatgagatgcaaaaaatatgataaacgtcaatgggcagctccctcatctgtccatttcttggactcttacctacacaaatgaattagttaattaaaagatctggcatattacaagctaatgttggaaactgtacctggatcagtacccatcagaaatcaaaatgagtacacttcaaggattctaggggcagaatttccacagacaattcagtgctgctgcttctcttattaccttacctttcccctgcaccccattgttattttcatgcaattctctctgcaagtactaaccaaaactgaggacaattattttgaaaatgaaaataggatactttggcaacttagggtgttaaacatatctctcttctgagcttcttagagtttgagctgaaagactggaaatatgaaaaattctactttattaaaatcctggctttagggcttttcttttgaatgaaacaccacctcagtggaaagtattaatattgagttagatgtataggctttggaacgtagtagttataatggtaccaatcatttattaaatttgtattgtctacttgacacattgtatcatttatcttcagagcaattctacaagtcggtgcttttattatcttctaccttatataggtgaggaactttctaaggcttagaaagttgaaataattcatccaagtttacattactgatggaatgcttatttcaacaagagtgtccacattctgaaccactaaattatgttgtctctgttccaccaaaattcctaatttcatactgcttgtgttggaaagtgtgttaattgacttctacttacctgtgaattgctgaatgtaatctctgagtaattaacatccttgtttttctgcctgtaggtccgtggggaaggtgtacaggagactgtggtcccggaggagtccagagtcgggcagtgtggtgttttcatgttgacgggtggacaagtcacctgtctaactgtggtgagagcaacaggcctccaaaggaaagaagttgtttccgagtttgtgactggcacagtgacctctttcagtgggaggtttctgactggcaccactgtgtgcttgttccttacgctcgcggtgaagtcaagcctcggactgcagagtgtgtgacggctcagcatggactgc

SEQ ID NO: 24609 - DNA, 2300 bp, Homo sapien
ataccacgacaggccctggtgggtgatattcccctccctgtgtccatgtgttctcattgttcaactcccacttatgagtgagaacatgcagtgtttggttttctattcctgtgttcgtttgctgaggatgatggtttccagcttcatccacgtccctgtgaaggacatgaactcattcttttttatggctgcatagtattccatggtgtacgtgtgccacattttctttatccggtctataattgatgggcatttgggttggttccaagtctttgctattgtgaatagtgctgcaataaacatacgtgtgcatgtgtctttatagtagaatgatttataatcctttgggatcaatcctttatacccagtaatgagattgctgggttgaatggtatttctggttctagatccttgaggaatcaccacactgtctttcactatggttgaactaatttacactcccaccaacaggttcagattacatatttaaataaaatgaaagagaagaaactatttttttcattgttgttgacacaaaatgtgattacttactgtccttgtgaaaagataccaactttctggataaggcctgctggtatgtctgtagatgagatgcaaaaaatatgataaacgtcaatgggcagctccctcatctgtccatttcttggactcttacctacacaaatgaattagttaattaaaagatctggcatattacaagctaatgttggaaactgtacctggatcagtacccatcagaaatcaaaatgagtacacttcaaggattctaggggcagaatttccacagacaattcagtgctgctgcttctcttattaccttacctttcccctgcaccccattgttattttcatgcaattctctctgcaagtactaaccaaaactgaggacaattattttgaaaatgaaaataggatactttggcaacttagggtgttaaacatatctctcttctgagcttcttagagtttgagctgaaagactggaaatatgaaaaattctactttattaaaatcctggctttagggcttttcttttgaatgaaacaccacctcagtggaaagtattaatattgagttagatgtataggctttggaacgtagtagttataatggtaccaatcatttattaaatttgtattgtctacttgacacattgtatcatttatcttcagagcaattctacaagtcggtgcttttattatcttctaccttatataggtgaggaactttctaaggcttagaaagttgaaataattcatccaagtttacattactgatggaatgcttatttcaacaagagtgtccacattctgaaccactaaattatgttgtctctgttccaccaaaattcctaatttcatactgcttgtgttggaaagtgtgttaattgacttctacttacctgtgaattgctgaatgtaatctctgagtaattaacatccttgtttttctgcctgtaggtccgtggggaaggtgtacaggagactgtggtcccggaggagtccagagtcgggcagtgtggtgttttcatgttgacgggtggacaagtcacctgtctaactgtggtgagagcaacaggcctccaaaggaaagaagttgtttccgagtttgtgactggcacagtgacctctttcagtgggaggtttctgactggcaccactgtgtgcttgttccttacgctcgcggtgaagtcaagcctcggactgcagagtgtgtgacggctcagcatggactgcagcaccggatggtgcgctgcattcagaagctgaaccgaactgtggttgcaaatgaaatatgcgaacactttgcccttcagcctcctacagaacaggcttgcctcattccttgtccccgggattgtgtagtatctgagttcttaccatggtccaactgtagcaagggatgtgggaagaaattgcagcatagaactcgcgcggtcatagctccccctctctttggtggtttgcaatgtccaaatctgactgagtcaagagcctgtgatgctcccatttcctgtcctcttggggaagaggaatatacatttagccttaaggttggaccatggagtaaatgcagactgcctcatcttaaagaaattaatccaagcggaagaactgttctggattttaactctgattcaaatgagcgagtcacctttaaacatcaaagttacaaagcacatcatcattcgaagtcttgggcaatagagataggttatcaaacccggcaggtttcgtgtacaagaagtgatggacaaaatgctatgttaaggtaggaga

SEQ ID NO: 24610 - DNA, 2300 bp, Homo sapien
ccaaatatatctacaaagattctgttttcaagtaaggtcacattctgatgttccaggttggaatggtctgaatgtttgtatacccccaaaattcatatgctcaaactgttttttttttttttttgacacagtcttgctctgttacccaggctggagtgcagtggcaccatcacggctctctgcaacctccacctccagggttcaagtggttctcctgcctcagcctctttggtagctgggattacaggcgtgtgccaccacgcccagctattttttgtatttttagtagagatggggtttcaccatgttggccaggctggtctcaaactcctgacctcaggtgatcctcccacctcagcacacccaaagtgctgggattacaggcatgagccaccacgcccagcccatatgttcaaacttgatccccaatgtgagagtattaagagatgcagcttttcttttgggtcggggtggaggtgggggtgattaagccatgaggacagattccccatgaattggattactgccctataaagaggcttcagagaccttggtcaacctttcttccgtgtgaggacacagcaagaaggcaccatcaatgaagcagtgagtagacccctgccaaacgctgaataggaagtcatcttgaacttgcagcctccagaaactattagcaataaattttctcttgtttataaattacctagtctatggtatttttgttatagcagctcaaatgaaccaagacacagatgtacataaatttagggaaaaattattcaacccactatacctctttccttttttactaattcgtatttaattaatgatgcatgtggtttatttagtgacaacaacatctatggtcaatatgtgagactctcagaagaggaaatgtaaccatcagcagccaacagaaagtggggggcaatagaaattctacctcattccccaagttagagaaaaaaaaaatcactgcatggagatatgaaataatgctttgtgggtctgttttcctatagcttctgtatatgtcaatcttctatgctcagctttctttgtatcttattttttaattttagtataaaaatgaatgttttattgccttcaatttaccattattattttttacatcagttgttctttgtgtgtgtgtatgtgtcagatttagttttctggagtgtgaatgcatgtggtgtgtgtgtatgtgtgtgacctaaataagtttatctcctgaaaagaaagcaatatcaacatttaaagattaggttaacagaactcactttattaaatgcctggtatgtgtccaggccttgagctgaggaataagaacaatgatgagtaaagaccatccctgttctcaaggtgtttgtagactacaaaggagcctgcaaccttacagcaaaaataaagtaaataaacacaaaccatggagcatgttgcactcacagaggttcattctcacccattttgaagatactgggagtaattggaactttgttgaagaaaacaaggagatcatttctgttttgtctgtgcatcaccatgactacctagcaccatggagaaagggaccccctttcagagcacaaactctgaccacagagggcctttgtctatccttcattttactctaaacttttctcaaaataaccatggatgaagctggaaaacatcattctcagcaagctaacataggaacagaaaaccaaacactgcatgttctcactcataagtgggaattgaacaatgagaacacacggacacagggagagaaacatcacacaccagggcctgtcaggggttgggggcaaggggagggatagcattaggagaaatacccaatgtagatgacgggttgatgggtacagcaaaccaccatggcacatgtatacctatgtaacaaacttgcacattctgcacatgtatcccagaattcaaagtataataaagtaaataaataaataaccctttgtgaagctgtacttctggagaaaagcccacacaactatgggacattaagtatgcatcacaagtaagattttaaaaataatttaaaaagtattatttctgcttttgtttccttgtcattaaaaaaggtttctgtcttcctcaacccctcaagatcagcgctttagctgcaagtaaatgccttcttgcattggattcttcccataaacttccctgctcatttctcccgtggattgggccttctatgactgcacatatatagtcgcttcagaatagaaagccgctttctcccttagcaaggtatggcttttccgatgtcccctcttgct

SEQ ID NO: 24611 - DNA, 2300 bp, Homo sapien
actgcatattatcacttataagtgggagctaaataatgagaaaatatggaaacattagatgggaacaacacacactggggcctattgaaggtggagtgtgggaagagggagagaatcaggaaaaataactaatgggtactaggcttaatacctgggtggtgacataatctgtaaaacaagccccaataaaacatgtttacctatgtaacaaatctgtgcatgtactcttgaacttaatttttttttaaaaaaaagcacaataagtgaaaaataaagagaatctcaagtaaggtggaaacagtggagacggaaaggaagtcctcactgggatccacatgaagaactggctctgttggagaatatttgacagcaggcaagggaggtgatggtctcagaagaccaagtttcagttaagggaggccttaacagcagctttccaagagaaagtcatgtcaggagtattcctcagcagaatagcaaacagagactcttactaaacttttattcaatagatgaatacattattggccatttttggttttggttaaagtgaaacaaaaacagatagatgttacacatgaatgaatgaatgatttgggttgagctctaaagagaaaaatggaagatggtaatagaagcaaaagtttgtcagagcccatctgaggaaagggaaggctggttggatagagatgtgagtaaagaaccagcaaagaccttatctaaggatgagtgaagggcacaggagctaaatcagggcttggccaaataaggcctgtggccaaacccaaccctaccaacctgatttgtgcagcccatgagctaccaataacttttatgtttttatatggttaaagtaaattcaaagaaggataatatttcatgacatgtgaaaatgatatgaaactcaaatttcaatgtccgtgaataaagtgacgactgtttttgtcattttatatatatatattttttttgcagagggactggcttgcactttttaaacattagttatattattctcagtacaaccctataagataaaattcattcccattttactgatgagcaaactgcagcttatgtttcagccaaagtcagacagttcattaagggcagagtcatccatggcaatctgcctgtccagatattacactttcccccggggtaaaagcactggctctaagaatagtgagaacaaaacatacttataaaagggagttgggggctgggaatggtggctcacgcctgtaatcccagcactttgggaggccgaggcgggtggatcacttgagatcaggagttcgagatcagcctggccaacatggtgaaaccctgtctctactaaaagtacaaaaattagccaggcgtggtggcgggtgcctgtaatcccagttattcgggaggctaagacaggagaatcacttgagtccaggaagcggaggttgcagtgagtggagatcgcaccattgcactccaggctgggcgacagagcgatactctgtctcaaaaaaaaaaagagagttgggaagtgttttgaatgcttagagggcagcttgggaactcaattagaagaagggacggtttaagcagacatatttctaagagacttatatgagttaactcatttgatcctcagcactcctccatgagttggatgctattattaacaacccaatattagataaaggatgaccttcttaaagacctcttcccaggaaaaagactgtgtgtgggtactctgaagctttggctcttctggtggggacaccactgggtttccaaaggctcatccagccaagcgaagtatctatgacctcgtcgtgttcagcgcgcttagggaaggattctatggactgcacttttaccctggtgtcctgcattcttgctccaagacttctcttaccactctcattcccctaaatgcagcttctgacaccttctagctacgagttcttgggctcctccttcgtgacttccttttaagataatttctgagttacaacaaatcagcatttgaagaaatgcagcagataagttgaaaattcaagtgctgaggaatgtaaaggcccaaaacaatcccgtagaaagcacagaggcagatgacagtcttccgttaaagatttcactgctgtagatttctgagagtgctgtgtagctgtcctctttatcctggtgtttgccacttcgaacagtcactttcccacttggaacttacttgtggctttgctgacaaaacaggaagtgatttgaatacagtttgtttttatgacctttcaacctcaggaatttgaaaagttttagca

SEQ ID NO: 24612 - DNA, 2300 bp, Homo sapien
atattggctgtgggtttgtcataaatagctcttattattttgagatacgtcccatcaatacctaatttattgagagtttttagcatgaagggctgttgaattttgtcgaaggccttttctgcatctattgagataatcatgtggtttttgtctttggttctgtttatatgctggattacgtttattgatttgcatatgttgaaccagccttgcatcccaggaatgaagcccacttgatcatggtggataagttttttgatgtgctgctggattcggtttgccagtattttattgaggatttttacatcgatgttcatcagggatattggtttaaaattctctttttttgttgtgtctctgccaggctttggtatcacgatgatgctggcctcataaaatgagttagggaggattccctctttttctattgattggaatagtttcagaaggaatggtaccagctcctccttgtacctctggtagaattcaactgtgaatctgtctggtcctggactttttttgcttggtaagctattaattattgcctcaatttcagaaactgttattggtctattcagagattcaacttcttcctggtttagtcttgggagggtgtatgtgtcaaggaatttatccatttcttctagattttctagtttatttggtagaggtgtttatagtattctctgatggtagttttgcttcaaagagaataaaatacctaggaatccaacttacaagggatgtgaaggacctcttcaaggagaactacaaaccactgctcaaagaaataaaagaggacacaaacaaatgaaagaacattccatgctcatggataggaagaatcagtatcgtgaaaatggccatactgcccaaggtaatttatagattcaatgccatccgcatcaagctaccaatgactttcttcacagaattggaaaaaactactttaaagttcgtatggaaagaaaaaagagcctgcattgccaagtcaatcctaagccaaaagaacaaagctggaggcatcacgctacctgacttcaaactatactataaggctacagtaaccaaagcagcatggtactgcttccaaaacagagatatagaccaatggaacagaacagagccctcagaaataataccacacatctacaaccatctgatctttgacaaacctgacaaaaagaagaaatggggaaaggattccctattcaacaaatggtgctgggaaaactggctagccatatgtagaaaggtgaaactggatcccttccttacaccttatacaaaaattaattcaagatggattaaagacttaaatgttatacctaaaacaataaaaaccctagatgaaaacctaggcaataccattcagggcataggcatgggcaaggacttcatgtctaaaacaccaaaagcaatggcaacaaaagccaaaattgacaaatgggatctaattaaactgaagagcttctgcacagcaaaagaaactaccatcagagtgaacaggcaacctacagaatgggagaaaatgtttgcaatctactcatctgacaaagggctaatatccagaatctacaaagaactcaaacaaatttacaagaaaaaaacaaacaaccccatcaacaagtggcggaaggatatgaacagacccttctcaaaagaagacatttatgcaaccaacagacacatgaaaaaatgctcatcaacactggccatcagagaaatgcaaatcaaaaccgcaatgagatatcatctcataccagttagaatggcgatcattaaaaagtcaggaaacaacaggtgctggagaggatggggagaaataggaacacttttaaactgttgttgggactgtaaactagttcaaccattgtggaagtcagtgtggcgattcctcagggatctagaactagaaataccatttgacccagatatcccattactgggtatatacccaaaggaatataaatcatgctgctataaagacacacgcacacgtgtgtttattgcggcactactcacaatagcaaagacttggaaccaacccaaatgtccaacaatgatagactggattaagaaaatgtggcatataggcctggacgcggagcgagaggctgagagagttagagacactatccacttccatcagtcacgcagaccctgctggagccactgctgctgtggatgatcgagaggatctggtgtaccaggcgaagctggccgagcaggctgagtgatacgatgaaatggtggagtcaatgaagaaagtagcagggatggatgtggagctgacagat

SEQ ID NO: 24613 - DNA, 2300 bp, Homo sapien
ggcttagtcaaaaattacatgtaatttttgctgtatgtcacataccataaagttaacacgggtggacagtgagtatagcaaatcgtttcaactgttctttgctggtgtttggagatggttaaatgtttacacaaatatttcctctctccaccaactctttccccattccctaatgctcacttccacttctgttttttaacttttggagttccttgatctgcataaacattctaccaactcagcccaaggcaactttgaattttatggttacattgctaattttatctttatctgaaaacctttggcacagattttgtcttaaagcacgttttgtcttaaataagtcaacaggattgctaacgtaaggtcaggtgctaatcccagcattttgggaggcagaagtgggaggatcacttgaggccaggagtttgagcccagcctgggcaatatggtgagactctgtttctactaaaaatacaaaaattagccgggctcacgcctgtagtcccagatacttggtggctgaggcacagaattgcttgaatctgggaggtgacccaggatcgcgccactgcactccagcctggcgtacaaagcgagatcctgtctcaaacaaacaaaaagaaaaaagaaataaaaaagacagctaatgtagtattaatttgaaatgagggggatctgcctgtccagtattcaaatcccagtaacctctggatgaattacttgccatttctagttcttgtcgcttaattttaagatggaaatttctacgttgaagttttagagaggttgttgagagaacagagacgatacaagtccatgcttagaatactcagtacatagcaaaataataaatattttccctctgccctctctcttttcttggaaagccaggtaagcaatgagaagttggtttatggccaggtgtggtggttcacgcctgcaaatcccagcactttgggagaccaaggtgggaggatcccttgagctcaggagttcgagatctgcttgggccacatagcaagacctcgtctccacaaaaaattaagattacctgggcgtggcacattcctgtagtcccagctacgggaggctgagttgggaggatcactttagcctaggaggtcgaggctgcagtgagctgtgatggcaccactgcactccagcctgggtgacagccctgtcaaaaacaaaacaaaacaaaaattgctgacgtatgcacagttaaagcaaaaagagttgggatccttgaatgacgttcatgtctgttctggcaaagccgggattgttggtcccccaaacttctttaaagaagtttactcctggtagctcgattaagtatctttgtcccatggccgtggggaataaaaagttcagttgtcaccccctttttaaactaaatgtccgaagagacaaggcaatcccatcctctcttcacacatttgtgcaggtgcagctttatttcccaccgtgcggtcccaggaggccgcctggtcttctgcgctcacttcctaggcatccctggccgcccctcggcagcctctccttctggcctgagacttccagctgagcctcatcccctccacctgaaaactgctccatggggcacttcatctacctggaaagttctcgatttccaactggagcctgtatactgctggttgtgtctcagcagttattacagctctgggcttacaacgggagcttagcaaaagttccaccctggcttcctagactgctacagctccaagaaaaatcctgtgcgcacaaacggccgccgcctttggcgtctcccgcggattagaccagttaggaggtctcagtaggcttttaggcaggacaagttttacgcctggccaaataagggtcagactaagcaaggcgcctccgtgcgcctagccagagcggtgccggctgcggaacctgccccgccgggagcctagtgccatgcagcagcggcggcggtggcggcttcccaagcgcggcggcaaatccgggcccgcccggaagtgcccggcgctgtaggagggagcaagggcccaggagccgccgccgccgccgccgcgcgcacgcgccctcgcgggctggagccggggctggagtcgtaactcggaagccggagcccagacgggcccgcggcgggggggtgggggctgcgcgggggcgggagtggcggaggtggccgcccctggcggcgggtttgtttatcccggggaagaagtttaggagcgggagatagggaaggagggcgggtcggggaggagggatgcggttcggcggaggcggccgccacagggact

SEQ ID NO: 24614 - DNA, 2300 bp, Homo sapien
acttacagtactaaaacttttatctgtaaaatctcattttccagtatgatgaatctgttatacacagtactttcactttgtttattctcaaaacaaaggtaaaattgtagaagttccaaatagacatctgaaataaggactgacctatctgtagcttggtagttagctgccttgaaaatggtgggctaaaaccctgtagttttcaaatcagaaggaattaatttatacaataacaaattatacatgctatctatatcaaaaaaggttgttaaatgtcaaagaataagaaagtagctttccattcccaccttcctgtcttagaattaatctacccacaagccagatcaagtcaaaccaagaagtgatgatagcatttatcagatatttgccctgtgccaggtactgttttaagtactttacttgtatttacttgtgcaattactagcaccatcctgtgatgtcatatcataaccccattttacagctgtaagtatactgaggcgaagaaatattaagtaacttccccaaagccaaagctggtagatggcagagcaagggtttacaccctggcaactatatactagtctgagctctagagaagagttcttaaccactaggcaacatttctcacaagaatgatgaaatggtaatttgaaatattccaccaatctcatcgtggcaggagagatgtaatttttcaaggtatgaaccttttacctctgtcagtttctagtccaagaaacagtggattcaattgcaagtgggaaagtgagtaccacaatgggtcaaactaggcccaagattattcaaaaatagacaaagcatcagaagcctggaaagaatcactgaatgacagagttcagtcaggaaagagacaagcgaaagttaggataagcagatggtgaatcttatttctactgggttgtgtgactgctttgagagagaaaatgctaccttcccttttcttttatgttgaatcaatatacaaatacattgactcaaaaagaattaggaaaaaggagagcagcaggaatacaagtgggctctttgaagacttggaccccgaaccgcgcggttagcttgatgtactctggtataagtgagcaaaaatgtattagaaagcaggttaaagagaggttaaaggcatgaccaccggactggaggtagtgagcggtctgcgaagctgagaactctgcctaaaatgggctaacagggacgagagtttcaagtgtctgtatttgggatgaggaggtatgaaagtggacgctgcgcggtggcagagcatgcagtttctgcctttgggcagcactcaggtaaaaaggggcaggtgtggaggtatacaggtatagaggaggagagaagccagaggaaaagaaggggcgaggcccgggggtaaaactaaaggggatcctggaaggtggaggctgggaaatcaaggagggattgggggcaaccccggggaaagtggtgccgccgcgcgagggaagggcggtccgggggcgtgggaggtagtccccagagcaggccggagctcgccgcccgagcaggggtccgggacccagagagcagagggcgcagtgaggcgcgagcaggaggccgccggtctacggagagccgggggaggggagcaagcgcctggggctgccgcggggactggggggaggggaaggggcgcctacctggacgtgctgggcggcagcggtcagtcctggtggagactcctctcccgctgaggcggtggccgtgtccgccctgggagcccgaggctgcggtggtggcagcaggggtgatggcggcaagtccctgtggcggccgcctccgccgaaccgcatccctcctccccgacccgccctccttccctatctcccgctcctaaacttcttccccgggataaacaaacccgccgccaggggcggccacctccgccactcccgcccccgcgcagcccccacccccccgccgcgggcccgtctgggctccggcttccgagttacgactccagccccggctccagcccgcgagggcgcgtgcgcgcggcggcggcggcggcggctcctgggcccttgctccctcctacagcgccgggcacttccgggcgggcccggatttgccgccgcgcttgggaagccgccaccgccgccgctgctgcatggcactaggctcccggcggggcaggttccgcagccggcaccgctctggctaggcgcacggaggcgccttgcttagtctgacccttatttggccaggcgtaaaacttgtcctgcctaaaagcctactgagacctcctaactggtctaatc

SEQ ID NO: 24615 - DNA, 2300 bp, Homo sapien
atcctcttatttgtgcttttgggacagaataatttactagaactggtagaacagggctctaagccttggtaaagagggaatttttgtagggatgaggagtggaatgggtgagatatagatttggatatgcaaatagtggttttgtttttgagtctgttgcaaggcaaaaggagagtctgagatcaagcagaaatgggatgcagctggtgcatcctttaccatggaacccccagtcaggcttagcaagggtttagggaggatgcatgccccttgcttgccactctccccccctacaggaaatggagttgtactggaaagataccctacctgcaggctcaaggacaacacactctcaaattcacactgggatcccagaacactctggaataacctccctccccatctgcacaatcttggcacactcagtgaaaggaatagtaggattttgccctagtcaaagcaatcctcctgcctttgaaacctaggaccaaggctgctctgcttcaaccgctaagatttaacaaccctccttcatttctattttggggtgggggtggtaagcagaggagaaggaaacttttttttttttgtccaaaaattacaacttaatctgtgctttttgttgggtttattttttaaagcctagaaatcaattgcaattctactcccttgcttcaacatggttttcttctctaagagctttgcgtttctagatgtaagaagcattctcgccttgggtattctgtcggagcaactgcctaaagtctcatccttggagaagtgaatgtatctctctggaccttaggtttcccacctgttcaataaaggagtgacgaatgacgcccaaactctgatctaccgtaaaaacagtgcaggtctgtgagccccattgcctttgatttttccactcgagtgtccagcacaaagatagtaaaaggttaaggatctctccaatggcgagttgttaacacggaggtcgaggctcacaggcatcaggtttgcaccttcgcccgtccgcaaagatacccctctccaatatttctgaagtcggaggctgtggtggggtatcctgcctttattctgcttctccaaagcccgggcagaaggtctgggagcaactttgtctgtcttcaggacacctagctgtctataccatccccaaaccggagtaaaccagacatcacctagctccgtttctcacagttctgctcctggtccctcgaggtccccattactccccaaccccagaaatccttccagccgcaccaggcgcactttgtaccccttacccgcggctctgcgagcttggcgctgcggcagagtagggcactctcccagggcgtcctgggctccagcctcacctccccgccccagccttttccgttcgcagctccccacgccccgccccaggactctgcaatcgccttcccctcctaaactctctgggcgctctccaggcgggcgcactctttcttgcagccacccagggagaaccttttcttcccctcatccccaatctccccagccaaagcgagagccagtcagttggcagggcgcttggcacagtggagcctctcggaccggccttctgctgggcgggggtgggaggaggcacccggcctctcggggctctggggcaccggctggccaggcgtgctcagctcggccaggcatccgcccggcgggatcggatctggagggcagcctcgcactgaacccatcacccaagcgcccgagccgccgcctccctcccgcaggcgccccacgcgctcaccccaagcccggccaagcgggagagtccaaggcgcgactgaagccccccgccgcgtgccggagctcgagctgccccgcaggctctttgccggccccctccgaggaggggcgcgcggggggccgggagaggcacctccggtccgcccaccctcccccttccctgcccgcccacccggccagagctgcgcggcacggcgcagcgctcggattccgggagggaagcgccgcgctgtgtccctggcgtcctcagtcctgccccgcgaagtggagatgcgcgagaggcaggcgagggcgcgcagctcgtgaaaagccgcgccagccggcaccatgcgcctgcggccgctgcccctcgtggtggtccctggcttgctgcagctggtgagtgcccggcccgcgcgccgtcccacacgccggggacgcgtttcggcgggaaaaccgcgcaggcggctgacttggagcccagcctgggcctgcttgggaagtggggttgggggcgcgcggagggcaaggagttttgggttgcctta

SEQ ID NO: 24616 - DNA, 2300 bp, Homo sapien
agagtggaaattaaagtcacatttgtgtgtgaagagaatcaaagatactctagacaccatttcaaaccctttccaaaactcaagctggaataatgaaaaacatttgttctaactataaatatatcataatcagatgctatattatatgttattgcaacataataggatactcacagagagatggactatacccctataacccaggcccacatttacattctttcatagttccatgaaagtagaaagttttggaaataggtcaaacataaagtctgggtaggtggaagatgcagtgttggagcaatctagatctgggagcaaatggcctgatcttgtcatcagaacttccaccttagggataaagcctctgcagtcttcacctattccatggcatgaccagctcacagcagtttgagaaaataaagatcaaaaaaaggtttcttttagtttttagtttttagagttgtttaaatttagaaattgccacagcatttcaagcagtcagaaaaacaaattttttttcttaattgaatatattgagaaatatagtgaatgtttcaacaatattctttgttctcagaggtcatagaaagatggatcttccataaaacttataatgatagcagcaggaggcagacaaattcctaggcagacaggggcgggtgcctggtgaaactggaccttcaagccagaaacagcctgaagcctgaaaaccaggctgctgctggttctggatggagtccacgaccacagtgacaacttctattcctgtttgcctgctctttcctgattgattctttctgaataatgcattttaacccattgaatgctgtcttttccaaggctacctacagcctgcacttcccccattctgagcctataaaaacccaggactcagccacacagggagactacctgcctttgggtaggggtacccactttggattccctctctactgagagctgttccattgctcaataaaactcttttctgccttgctcgttctttggttgtccacgtaacctgaatcttctcgaacatgggacaagaacccaggaccctccgaacagcatgtgccaaaagagctgctgtaacactgttgccctcttgtcctctgctggtgctagcaggctgccccatgggacaggaagtggcagcagggctgggccagctcaggagccacaggccggagcatggcaacaagatcgaatgagctgggacacatccacgtttgccaaagcatatggacagtgagaacaaacaaactgtaacacgaatgagctgtgacctttctggggctcagagctcaggactgctcccaacagagttgtaacatgctgcaacacccactttggaaatccagggtcattggcgtctctgagttttttgggtgccactgtgttcccccatttagatgccagtgcccaaggcagaagccactggcagtacaactggcccagtcacagcccctacagtgcaggctgtaggtagcctgtggagcctacctcatggagccagcacctgtgccagtgcctgaagctacccatcccactgcagcagctggcatgcctggctcgccctcggcgggcatgagatctgggctggtagtgtgagcagagcacagcctgctgggccaagtgggcagaagtctctggctggcaaagtggcaccaacaaaaatcctgtgtcaataacaaaaatttttagataatgtattctgataatatatgattagcttaattgctatatatgtatgattggattaccatatagtccttattctctattttcattttgattgataggtatgcttatcacataaggacttagaaaaactattgagaatatcaaaaattttctgcttgagtttttgaaaaactttgcctttttattatgccctgtcaacatttttattggaaggttcctttttgaaaatatgatctacatatggtatattcaggagctttttctctctcttcagtaaactcgaatttgaacaaagaaaacatttttatcacacttgtctccagcttcttaactcagtattatactttcctttcagtacataatgccaaagcaggtgttaaaaatgaaaaagaggccgggcgcggtggctcacgcctgtaatcccagctctcagggaggctaagaggcgggaggatagcttgagcccaggagttcgagacctgtctgggcaatatagcgagaccccattctccagaaaaaggaaaaaaaaaaaaaaaaagaaaaaaagaaaaaaaataagcgtaaaaatgaaaaagaaaaccaatcattctgac

SEQ ID NO: 24617 - DNA, 2300 bp, Homo sapien
aagaatctggatgtccttagtatggtttgtaagcactcctcattttcttgccaagagttaagtggatacagatctcctaatagctgaccttctagttgactgaatgggatcatgtaagaaagacacctgctacgttgtcccagtgaataagtttgtcatacaatacagaggtctgtggaccctcgagaaagaaacatttattacttggcacatcattcaaatctctctctgtctctctctctctctctctcacacacacacacacacgcgcgcacacacacatattctttaaactctgccactcatttcaaagtttgtgaattttcagtatgaagtaaaatatgtaaaaaaatctttttattctatattgtacactatattatgaaataataaaaacatctaggaaaaattagacatgtaacaactttagaagaaaagaagcatacacttctctactaaaagtacaaaaaaattagccgggcatggtcgtgggcgcctgtagtcctagctactccggaggctgaggcaggagaatggcgtgaacccgggaggtggagcttgcagtgggccgagatcgcgccactgcaatccagcctgggcaacagagagagactccgtctcaaaaaaaaaaaaaaaaattaagcatacacttttgaatgtaggagtcatatttcaaacacaaaatggttgtattttcaagggaaagtaaactttataatttaaaacatggaaaaagtgacataaaatacatttataatcacagagtaagaataaaaaggtgaaatccacagattattgacaatgttctgcaaagtcatctctgtgttctttcatctagtccagtttttaatggcttcaaaggagcatctaaagatatttctggataattttactctcataaataggtagatagtaatgctggcattcacttataagtctcaaacagcaaagtaaataaagcttttaaagcatcttccttcacttttcaatcgttctcttccttagttctgttcccttctcatagttttcctctccactcatgtccagtttcaaaatattaaatataaaaccttttcaactcttgttcttagaagagaattcctgatgttacaaggaagaaagtaagtctacaactattaagatttctgagttttaattccgtagccactttgtaatggcaaactaaaattttagggactgggatgatcatgttgtaaacttaagtggtcataaaaacaactttactaatattattattccagtgattcccgttgatgcctccgatggctcgggaaagttcttacaccgcccctgtagtatatggaaaaggaaaacaaaacaaaacacaaaacaaaaacaacaaaaccctcaaagcctgtttaaaatggctcgaagtacccttttaaagacagaaccccagagaaaaacgctgccaattcgttgctttattgttccctgcctggggacctcaatagccttttccattaaccttcccttcttacgcaacggttaatgactttgggggttgttttgctttctgtttctgctgagtcactaaattttgcctctttgtccccaggtgctgctcagcataaaagttaaaagtgcaattcaggaagtactgggattctgtgtagagccgaggaaaccatttccctaagagaagctctgttccttggcttgtccttccttcccgggaaggaagcttccgaggaacgaagggagaagctttgttttgcctgcagaagcagccctgtgctcggctgagggttctcagctggctgtgaactgcggagcattgtaggcgcctggctggctcaggccaatgcagaagtctctcccttctccaaagacccaaatccccacagaaccagcttcgagttactttcccttcaaggggattaaaataattgtgatttgtggcgctctccgttcgcggtggtattttcctgttgtgttaaatgcctcttattaagtaatagatgtgatttatgtgaacgacgaaggggtgtgtggtggattcggtgattaatcagtgaattcccatccgctggcatctctcactgcccctcttgcgtgatgtaagatcagacgtaccctgcattgaaaagtcaagacacacgggcgtctcgctcgcgctcacacacgctctgcctcctctctcccgcacgcgcgcatccctccaccttccacatcctgctccaggcaggagaaggctgactggctggactcattgagctgaagaatttccagtgacatttgtaaatgacgccgctcgattccaggctccaagcggcccc

SEQ ID NO: 24618 - DNA, 2300 bp, Homo sapien
tcgtgatcctcccacctcatcttcccaaagtgctaggattacaggtgtgagccactgtgtccagcctaaagctgcaaattttattttatagataatacttcattaagattaattcacagtggaaattaggcttatcatgttaccttttattggtgctccagcctatactttagtaactaatcttccatatttactatcactattttatagtaactgttttgagtcctatgtcattcatgattactgacttaattggtgattacttaagaattctattttgctttattattctggtcacaatgtgcagacaatgcatttttgatttttttccactcaatgaaataaaaaagtcaaccagatgatctaaaaagatcatatggtttttactctggctaattcatttaacaggctattaggaggctctacgtatttggaatgttgtatatttagaatacaaaatctcctgagtatttgctactcttatgatctttcctagcttttcccttttccaagctgaccatggaatctagggctgctgcacgtactacagaagtgaatgagttagtgatttttaatcatagcattggggcactttagtatgtggtaaaagtctttggtgggtcatactgttcctggctgctttcctttactttgcagtgaagtggagggcgattggtggtaatctttcagaagaggaagaatctggatgtccttagtatggtttgtaagcactcctcattttcttgccaagagttaagtggatacagatctcctaatagctgaccttctagttgactgaatgggatcatgtaagaaagacacctgctacgttgtcccagtgaataagtttgtcatacaatacagaggtctgtggaccctcgagaaagaaacatttattacttggcacatcattcaaatctctctctgtctctctctctctctctctcacacacacacacacacgcgcgcacacacacatattctttaaactctgccactcatttcaaagtttgtgaattttcagtatgaagtaaaatatgtaaaaaaatctttttattctatattgtacactatattatgaaataataaaaacatctaggaaaaattagacatgtaacaactttagaagaaaagaagcatacacttctctactaaaagtacaaaaaaattagccgggcatggtcgtgggcgcctgtagtcctagctactccggaggctgaggcaggagaatggcgtgaacccgggaggtggagcttgcagtgggccgagatcgcgccactgcaatccagcctgggcaacagagagagactccgtctcaaaaaaaaaaaaaaaaattaagcatacacttttgaatgtaggagtcatatttcaaacacaaaatggttgtattttcaagggaaagtaaactttataatttaaaacatggaaaaagtgacataaaatacatttataatcacagagtaagaataaaaaggtgaaatccacagattattgacaatgttctgcaaagtcatctctgtgttctttcatctagtccagtttttaatggcttcaaaggagcatctaaagatatttctggataattttactctcataaataggtagatagtaatgctggcattcacttataagtctcaaacagcaaagtaaataaagcttttaaagcatcttccttcacttttcaatcgttctcttccttagttctgttcccttctcatagttttcctctccactcatgtccagtttcaaaatattaaatataaaaccttttcaactcttgttcttagaagagaattcctgatgttacaaggaagaaagtaagtctacaactattaagatttctgagttttaattccgtagccactttgtaatggcaaactaaaattttagggactgggatgatcatgttgtaaacttaagtggtcataaaaacaactttactaatattattattccagtgattcccgttgatgcctccgatggctcgggaaagttcttacaccgcccctgtagtatatggaaaaggaaaacaaaacaaaacacaaaacaaaaacaacaaaaccctcaaagcctgtttaaaatggctcgaagtacccttttaaagacagaaccccagagaaaaacgctgccaattcgttgctttattgttccctgcctggggacctcaatagccttttccattaaccttcccttcttacgcaacggttaatgactttgggggttgttttgctttctgtttctgctgagtcactaaattttgcctctttgtccccaggtgctgctcagcataaaagttaaaa

SEQ ID NO: 24619 - DNA, 2300 bp, Homo sapien
tttcttgaatgaatgaaagtgtcaactgaagaatgacaggttcatacatttggaaaggagagcttcatttcacataaaggattgcagcctgcagggtgatcattctgacctctgaaaagtatagcctctaatcagaagctggaaacagacattttgagggaggagcaaaggaaacagaaatttatgttgagcagggtagctgaatatatatattcaataagctataggggaagccatgaatatttgtgaaaggagaaatgtgcacatgcacaatggagtttcatgcttctccatgggatccgtgttcaaaaaatgacagcattaatacaatctgagggggcagttttcagcccaatgtgaagcagaggacatgaaaacctttactgcacattctccatagactagccagaaacattccatgatcagtattttctttttgttccaaaccacaaaagagagggataacaccaggtgatggttgatgtcattggtgtaatcttttgaaatgactggtttctttttagccatagggcagaaagcctaatcatagttagtgatggagcgggtatgtgttccacttcctatcctgtcatggccaaaaacttagttttcaagtttactctgggatccccttggccaagagcgtgtccgttcagttaatctaggggcttgggattttatttttattcctcaaatgtaacaaatttaaagaaagaaagaaatttataaaacataagaaatagaagtatagcttagacctccaagcaagttctttaaaggtgacaagttaaacagtagtttttaagataatattttgatgaaatttttaatcatattattacaagattttagaagaagcaagatcttgtgaaaacaaaaccttaatgtccatatctagctctctaaatctatagtcagtctttaaaagagtgacacaaaaatgacacagatccgccctctggttcgctccccatatattagagcctggtaatcttccaaagtttttacagcatgaggcatacacagaatagatgcaaaaaaagtacaccttctgaaatttcctgaatggattcaaacttttactattctaagttaatcaattggtagtctacttactttataggattattgtaaggataggatcaatgaagtgaaatatattttattttcactggtcaattactcgtattaaagcaatttcatgcactttatctccctctcttggaaactggagagtagtactttttgtctggttacttaagattaaaaaaaagacaatatgtcacttttgacttgagtgtcatggtatctatggccttcaacctgcatggttttatcgtttcagtaatcttgggaggaaggtattattaagttcatttgataaataggagactgagcctccacaagggttaagtgaattgctcagggttatacaatgaacacttgatagaaatgattaaatgacactttacttgatttgttgtgggttactaaataaagcataggtgtgcataagtcattcaattattcaagcacattcttcatccctagtcctaatatcgaaagtctttgctcttagtttttataactacaaggatattcatcaaaagacccaagctcaggaataagcctaaagaggtagtcagactagaacaaaagacaattcacagacttaaatgaataatttgcattaatgaagtttgccaggctagtttccacttgaatcttcagatctttcttccttcattgtcttgttaactgtccagatttattacctaggagtttttgaaaactcacatattaggcaatagagtgtattctggaattgagagcctattttaaacttttgactaaaaagtttacccattaaatgtcatagattcaaccatcagactgaaaatcctcagtgtatttgaaggagggtattgtctcaaaaatccagagctcaaagtgaagaagaaaggcaaaatttggaatttagctctaagaccaactcatcagttcaggggtcagagatttatatagttaaaggacaagtgtgtgtttacctgagtttaaagagcaaagttgcctctggaaagaagccctcactggaggctctggcatttgaaatggtgggcaggagcacatgttgcttaaatttctgacagtggctggagattaccgattggttaggggagaggaagtaaagtaaaatatttataaattctccactgggtggagtctgagcagttctttgaatttctcaccctaagatctggcctgtacattttcaaggaattcttgagaggttcttggag

SEQ ID NO: 24620 - DNA, 2300 bp, Homo sapien
gtgtggcaattcctcgaggatctagaaccagaaataccatttaacccagcaatcccattactgggtataccctaaggattataaatcattctactataaagacacatgcacacatatgttcattgcagcactattcacaatagcgaagacttggaaccaactcaaatggccatcaatgatagactggataaagaaaatgtggcacatatataccatggaatactatgcagccataaaaaagaatgagttcatgtcctttgcagggacatggatgaagctggaaaccatcattctcagcaaactaacagaggaacagaaaatcaaacactgcatgttcttacccataagtgagagttgaacaatgagaacatatgaacacagggaggggaacatcacacaccaggtccttttgggtagttggggataagaggagggtgagcattaggagaaatacctgatgtagatgacgggttgatgggtgcagcaatccaccacggcacatgtatacctatgtaacaaacctgcatgttctgcacgtgtatccaagaacttaaagtataaatatatatatatttatactttatatatattatactttatatatatttatataaatatattaaaatataaatatataaatatataaatataaatatatataaagtatatatatttatatatatttttatatatgtatatgaatccacttatgcatgagttttaaggttttgagaactcttccatctatgaggattagttacagtaggaagatttgctaaagcagtatgtagccactcaattaagggagataacatgagtaatgtagcacaatacatggtacatggtaagtacatgataaatatcagtagttactggtattggtaggtgttgatgttggagttccacatattattgtttacgtctaccatccgaagtgtttatctaagtttgtttatttcattcaaacttgtttaattggaggcaataattatgtcactctttttgttgactatgtatacaaatctacactattttgtcaacttataaataatgattgtggcatcaacaattgaaaactaggtaagtccaacagggctaagtgtaactttaggtttttcacagtgggtaagaaaggtccatagatttgagataaagatgtcaagagatggagcacatatttcttatatctctaatccccaaaaagatcttggggttatttatttactatggaaacatagtaatataatatctaagctcttatattaggggaagttctcatttaaaaagtaagagattatgataacattaaagaaagaaacattcttaaaaagtgtgaattagggcccatgagtgggtaaggaaatcaatataatgagtttccaacatttcttatgagataaaatagaatagtacctattagagcacaggcaaataattgtaaaaacttttatttttgctatttagactattttatcaaatagaagatggtaactgtttatttgagatgcatgctaatttcatagatggtaacgagaaagatggccaatggtgactgtaagaaactattgatcgaaaattgaaagatgggtcctctttcaaagatgttaaaatatgataaaatatcttagaatcaataatatttctcatatattcacataaatactggtttctgatattacagatcagcaggagcaatgtggattgtacccaaaaaaatttgaaagccactatcatatatatatgatatatatatatatatatacacacacacacacacacatatatatatatatatatatatatatatatatatatatatatatatatcagactacaatgcttcaaagaaactccttggtaaattgaagctaaagtaatatttctaaatttgacacaataattgcacatacattatgaagttgtcagttaaatcagaaattaaaccaacataaaacatttcaatgaccatgaaatgtgacagcttatagagactgtatagataatacttgaaccaacacagttttggtcccccaaacacaaagcacctaggcagccctgtggactccttagtgccacagactctgaaaaattatatcagattttctgtaaggtatattatttattgttagttacatgtggtcaatggtgacatactttcaataattaaaaatcgaataatactgaaataaccacagcagctttcagtataatttgcttaagttgttctagaaaacactgctaattttttgtttctgcagagtcaagtatagaagtgagcagattggtaaatttataaacat

SEQ ID NO: 24621 - DNA, 2300 bp, Homo sapien
cccttaagcaggtatttacatttatttattaccataagggtatattgttattttatatttttcctagtcagatgcctgatgttagtatctatttaaaaggaaaggcatggccgggagtggtggctcacgcctgtaatcccagcactttgggaggccgaggcgggcggctcatgaggtcaagagatagagaccatcctggccaacatggtgaaacctcgtctctactaaaaatacataaattagctgggcatggtggtgcatgcctgtaatctcagcaattcgggaagctgaggcaggagaatcccttgaacccgggaggcagagtttgcagtgagctgagatcgcgccactgcactccagtctggcaacagagcgagactccgtaaaaacaagcaaacaaaaacaaggaaaggcctaatttattttccttgtcctagacttctgagtctaactcagatttacaaaggcttaaatcaagcagaatgtactgaagttctctgatgcttcttaggagttatcaacatttcccagctcatgctaatttatatatctacaattccttatgatatacaaaatatatacatctatttacttatcgtgttccccaagatggatttttttatgcggatgtttcattacatggataaatgaactaaatttcagagaacttaagtaacttggccaaggttaagtgaatagcagtgtcagaattaagcccggaattctgctttcctcacttttaatattatgaactttccattttctcttcggtgttaaggagaagcattcagtacaaatcttcaggactctaaacacttaaaaaggtccttcctgaaatgagaactgacagtgaattctagggtcaatctgaaatgtgatttttagaaaaagatcccagagaaattcagttaactgatagggacatgccatccctaacttgggccatatccaccaaatctatttttaaagattgacttttagtatgccaaacattctataccactgagctctattacacagatttctagtctaattggtttgtatgacaagagattgtgatttaactctctcatatatttggaaggaaagcttttcctctcttccttttatgattaagctgcaaatctcacaaaaccagccaagcctgaaaatccaggagcttattcttgaactccatggctcaataaagatgcacatcctagagttatttctgagaccccttacaaatatgtcttgggtttgttgaagtttgacacaagagggcattcagcagcatgccaaaatgatattgtttggatcctttattataatatatattttttttctttttaagtcagaccacacaaagaatcactcagctagagcaaaagctcttcagcaggtttcagaactgcttaggaaattgccagagtggacacatccgtatgagagccacagtcacagcaaatgccacagggtgtgttcgacgagcatgatgaacacctgccttttccccagatgctcagatggcggcgtggctctgggctgtgttttctgaagttctaatgcaaccctcccaaggcctgatgaacctgttaactggatcaggttttggtgggtcctttcatgaatgaggcagaggcaccagctctgtgaattggaggtggcttccttgcttccaaagtcaatatgcagagtgtcctgatagcatgggagcatctcaagcgtagccagcagagtagacgcttcatttttcagcccttgctagaaggcagagaaagaggaagtttcttcagtgcttagcagtctgctcctcccactgatgaatttttaatcacacattttcctcccttaagttaaaattgataaaatctctatacatgtgtcttgtttgacaattgataataacattgaaaaataacaatattgttgactatacaaggcaatttcttcaaattgagtaatgatgtgatgtgtgtggttaactgtctctacccaggaagtggttttatttaaaagttttgtgctcaccccaccccccgcctttttcttcccccagtactgaaattaagcagcatccaacacaggcctactcttacgacatgtgactttactgttttccgtttttgttgaaagagtcattaacagttaggagttgatggcagtttcaataacaggtcattgccgagaaaaggtaagttttaactttatattgtacatgaaatttaaacttgaacatgttcggcagagtttcctacattttggtgtgaacatataaacatttctacaaaatatgacgcttttacctgtgattaaaacat

SEQ ID NO: 24622 - DNA, 2300 bp, Homo sapien
gcacatttatcacaaaaattaatctgagcataagcaatgggcaatgtgagtgttgaggatcgcttgaaatcaggagttcgagaccagcctgagtagcaaagcaagacccctacccccgccatctacacagaaaaaaaaattaatggtaactaaaacacaacgaaaatattgtcaatcagaaacaaataatacatgagaaagaaacgaagccataactaccaaaaccagaaatgtatgtctcagagaccagaaaacacttttgatccaaaattaaatatccaatattttcacacagttagaattcatcttatatttctagtctaatctatgcttgacgctttccattgctactgggtgacacggatcacttttctctaattttgttttcagttttgctatttcttatattgtgtatctgcctccatgagttttaaatggctaaattatttgcttagaattcaggtgtttttcttaacagattatttctagctgaagctgtttctgtcacatattgttgaattccaaatgcccccctaaaacataaccataaaagtaatttctttcctatcctcatcaacacttcagatagttaatagctgcgggcacatgttataaaagaagttgctgaagaagggaacttgaagtgaatttggcatagagtcatggatggtactaaacacatggatgaagttatttacttaaaatttttcttgtcggcctgatttggctatattttcaaaattgacacatactatgctgtagacttctattttcactagctgagaaacagaatgattacagacttttgcatgttatgcatttttaaatatcaccaagttaaacttagattttgattccgtgcccaggaccaagtggaaaaaaatctccatcttcaatagttcctattatcttttagtcacagggccacatactgtatttcttccatgagtaaaactcccacttggaattccaagcattgcataactagtggagtattcatatcatatataactcagtaggccttcatatcctaatcagctatttcatctgcacaatattcttcttagcagttaaaaatcttaaaatcatagttcagaatggagccaacatttaattcagccaacaaatatttattaaacacctacttctactactggtgttacaaccatgactactactttacatagttttgtattgctttaaattgtttttacaaacctcatctcatttactacagtgaaattacctactgctttgaaggagcttagagactcataaagtagattaaatcaattgtcagaaaaactgggctttaaagaacttgtctacgatggtaccggctactgtagtattttagatgattttggtgaactctcagttgattttaggtaaaagattcatctgcacaaatgtatatttatctttcattgtattttttattacaatctaatattttttaaaagctaagaaaatgcaatgaaaataacattttaaaaagtgtcagctatatgaatgatattctttaatgcatgtcacatttaaaatatgacctatttttaaagtacattgtatatgtcacaagccagatttggtcacaggccatggtttgctaatctctgtcctaaagcaatatggtagttctgaacgtttggctgaagaacatggatggcggtagaagtccctaaactggtcttcatagcttagaataacagaactgctgagtttgaaggaaaccgaacaacttatctcacttactctccaaacactgttcaatttctcttcatacttttttttacaatgtggtagtctctatatttatatttgattcaaaatataatgttttaaaacggcctgtactgatgtctcttcaaaatctttatcttgcttaatcttagaaactttcttgccaaggagtgtaggagtagacatgatagcaagggaaaggtaatagaataaattttgaaagctaaatgctttattttgatatagctaatattcatagaccttaacatttacattagtcagcaatcaaccaaaagtcatagtttcaaatacacgagggcagaatctgcctagctacacaggatttgaccacttaaaagttgagctctatgattattctgatgaagtggattggagaccatcacctttctcttagtaaatatttgtccttcacataccaatcgtaagtataattaagcattttttacttcatctggtgcttcaaattttgtatgatgcaggatttagttttctattctaattcctaaaagccatatttcaggctgcattctattagg

SEQ ID NO: 24623 - DNA, 2300 bp, Homo sapien
aaaagtaatcctgtaaattacattttaaatctccaacatattccgagcagataaaatagtggcatgattgaccaaactccttttaaaagtacacatattacgatgcatcatagttataaacagatggtatttggcctccttcctattctcaacatttggaatttctaaactatgtgaattaaacaataatattttataaacatacaagggattttgctcactgctttgttaacatagaaattatacaatgctgacatttatttaaattttaaaaagtaaacaacagtgtgcatcgaaataaagcaaactaaaatcaacatagagaagtatgttctgtgtgcgtactacctacaatggcactggccttttaaagggaagacataatgggttgaagaacaaattgtagcatagatcggcctaatcccttgtactccaaggctcatttaacacctctctgtaaacaacggatatttataccataattggctatttgaccatcagtgttcatttactatgtaacctgctattatggagttaaaagaagctccccttcattggctcgtcagctttcagagtagcgaaagtgtcctcgcagttttaaaaacacttacacaaacgggaatcagtctgacacttgtactcagaatgagaaacattatcatgatatcaataagtatatatttattctttgggggatattattgccagaaagaaaaggaaatatattagatctgagtgtcatttcctaagattcttttctaaaattatagctttaaccctttagccgcagtttggaagggagacccatctgctgatttgatgtactaaatagaaggcacttggtttccaaacactattctcagattcgcaaagttgcgctgtgatgaataaataatgaatcagatatttcaatccgttttatgatttttgaaagccctgattatcattgtttacagtctcttcttaatgcacttcccatgcgttcttgttcagccttccaagagttggtttatgtaggccaccctctcccaacctcgctttacttttggactgctctcacgtgttaacccacccgctcacacctttaaaccagtttggggaatatttcaaatctgaggggggaaatcttgagcgacagatgacaaggagtattcgcaaacactccaggctaatgttgcttgtatttggtcacaggtgtgccctgcttttgcgtactataatatctctattggtgagaaagagggagaaaattatgctaaaaccacatggatagaaaggaaaacggcactgctgaaatcaggaaggatcagcattccttttctcctatacatacgtgtgtatactcagataaataatgataaatcacggcagtgtgagggaggcttttaacaaaatacaagcttcaaaataggaatatcttcacaagttttcaaaaagctaatcagagcaaatgagtgacaaatcaatgtaatgcttctaaatattctcctgccccaatattgcttaactcctcttctccactcctcctaaataaccagttggtggtgaggaggagaaatgaggtttgtatttcaatatacaggtgtgaagtgaaaaagaaagcgtccggggggtgagatttaaatcacatatccgaacataccagagacaggagttattctaaactgtgtagataaaatccctttcggagagtccccgtgcccatccccactccccttcgcgggattgctgagggcaagttatgttttttgaaaaggtagtaggcatcggtgtttctggttttgcttagtgcgtcttcatcgtattccctcgctgaggactgagcctggccgactcagggaaccgagttcaatgaaatcctcagacgcataaagcacagggtgccggcccaccgagctgcgctcccttcccgggggtgcccgagagagagcacgcgagcccggcgcagccaaacccgggcaggggtgggtccccaccgcgtgtgcgtgtgccagcctgggagtgtcggcgcgagcgtggcgggtgcgtgccggtgtgtgtgcgtgacagcgcgcgcgtggcagggagttcgcgcgccagggtgcgcgtgccagcgcgggtgtgcgagggagtgcgcgcgggtgggagcgccaggggctggcggggcccgcgccctgggacgagcccctcgtgctccggctctgcgctcccgcagcgcccacgcagccgagaggagtgggtgatgacttcgtgacctcaacgtcctcccccgtccctcgacatgttcccgcgcctgaaaggtgcagaaaactccccccacc

SEQ ID NO: 24624 - DNA, 2300 bp, Homo sapien
tcatctctttattacttggggagttcttatgtatttgtttgagtttcctcaaggcatttgaaattagaatagaaatttaaagatctttatgaaacaaacatagaagcccccaaaacaagctttctggttctggaatgtacatagggtcctacagccaaagaccttgtttctagctcctgtgactcctccattgtttcttagtgttgcctatcagcccttgctttcagccctatttaacgccctctccctgtctccacagtgactgtcctgaggcctcagtgagtttctgaaagcctatctccacctctgttcacctcactgaaatagatgaactgacctagtgctttaatgaggcaactccttagattctacacctgccacctaaagctgttttgttttttcagcttcatttctctctttttccctcagctttgcaagaaagcgaggttcactatctttacaagaccctgcttgcttttcccctacactatgatcaccatgttataatgtttttctccttccatcttataagatttttctgtttcttcaggatcccgcttccttccctagcaagtattcccaagtgaataacactgtgcccatgtgcctcatttttaaaagtccaaccttgccttcccctcccttctctctacctccttttctctgcctctctctttcatacacaaaccctagcctcctgcagtctgatttctgcccacaccactctttcagcaggagcagagagtggcctgtcgaagtagccagtgacctatgatgtgacaaggccaaaagcttcttgtttctgctttgtagcacctctgcagtgttttatgccccattttacacgttctttgagggttcttgattcatttcaataatgtgatattactctcttggattctcttcctactcttccagatgttcccttctgctctccttccatggtttttctttttcacctacctctgaaacccatttcttcccctacacaacaattcagggaggccaagtttctggatggggctcaggaactctgagaaaggacttggtagtctggcccagtctacccctctagaccttacatccagacctgcatcccagtctctttgggttgcatgttatttcctgaggagttgtatttcttcacccctttttcctttgatctcatattctctgactccagagcttccctgactctgtcttgcaaaatgctttacctaaagccttctttaagcctttattgagccccaagtcagcattaatctcttcccctccattaaaaaaaaactggaatggccattgtatgtatagtatgttccagcgtaggttagttggctgttcttgtgtctgtctcctactcttctctaagcactaatggtttgctttccaatagacggtgagctccttgaggatagcccctctatttgtattatgtggcttacaggttttaagctataattttttaaggtttcattttattttgattctctatcgataagtaacagacattgaactctttgtgataaagtgtcctggaaagataggagagaaatgataataaaaaagatattaaaatatacttcaggaaacattagccaagtcaatttaatacaaagtatattcagatgcccaggaatacagaacagtcatgagcagaaatgaccagtgttaatcaaggaagtttcaaacatttttgtaggttaatgaacaagtatggcctgaaaataagcactgggccatgtggtgattggaaaacacaaaatggaaatccagaaggatgagtgagggaagagtgataaaccatctctgtaatcttatgttttatggtatgtgcagtgcaagttttatagccatagaaactctttggaaactattcaaagacagcccagtccaatttcaaacttttgaacttctcttagtggctactactttttacactttttctggaatttttgtataacatctttattttttctcagttttatatataatcattatgtacttacaggaaggtaaaggacaaattttacatatttttttccactaaaagtatattgcattctttttttgtaacagattcatgcccaagcacaaaacaacccatttaaagaagatgctcggccttaaaggaaatggcggtgcggttctgtccatggcccttccttttcagccagagcagagagattcagaggatttattgaagaattttaattcagagtgtgatacacactgtggccttgatactgcacgacaagaatatttgggtaactcattaagacaggaatcagacttgaaaaaat

SEQ ID NO: 24625 - DNA, 2300 bp, Homo sapien
catatgtggattagcctgtggaatcaatttctcatgtgtgtgggatcaaaaccgttaaaaccatcatcactgaaactataccttcctacaactaactaataacagaaaggtgtctatggaatatattaatacaacaattcctctgatttaaaattattactgggtgtttggttggaaaatgatttgaatattataggtaactaaattgacgtcatatatgaaagctaattataggtttcagtgtgactaaaatttatttttttaattgacatgatatacttaatatttagcatatacttttcagtaaatcactggcatattgcagatttttaatatctatactgttaaaaacatttcaactaccacagcagttctaaatgctaaaggaggtagacaaaaatgtagttcaccttgaaaatgatcatggcttagggaataaagaaattgggtcaagtctaaaataattgcaggtacagtgacaaaaagttttaataaaaatttaaaaatattcatagcgttggtttcaggctacttttgttctctgtgatcttatcaatgcattattagtttttaattgggatgatgctaatggtgatttttcattttggtcaaaatgtttgtatgaaatactattgatattttcacattgtatcccctttcgattatgaatatgcatttttgaaaaggtagacaatttttaaatagatcattttgacttctggtgatcttaaatagaatttgaagtggtatgaaatttctatgtcacagctatcactttgacttattttatattgccaaatttgatgtttagcatttaaccatgtatcattaaatcatagtattgataatgaattaaactttcaaaaagctttaatagtatagtaggttttcattcatctggtgtcattggggaataaattgtgctgaagaagtgagtttttctttaactgaagcttgtttaagcagaaaaacttaaaaattgattaaaatttatctgaaatattttatatgctctttcagggagcaagcatggagtggccatttactcttttcttaatgtcatataatactattctgagcgccatgcagaaaggacatgggttttctgtttggtatttgttttccaaactaagttttttgttgtttcttccttttaaagtgccacatccctaattcgggtattctttcgttgttgtttttgttgttcttgttgttgttttgagatggagttttgctcttgttgctcaggctggagtgcaatggtgtcatctcggctcactgcaacctctgcctcccaggttcaagcaattctcctgcttcagcctcccaagtagctgggattacgggcatgcctcaccatgcctggctaattttgtatttttcatagagacaggctttcaccgtgttggccaatctggtttcgaactcctgacctcaggtgatccacctacctcaacctcccagcgtgctgggattacaggcgtgagccaccgtacccagcctaattctggtattcgtgatcagtttaaatgtttcataatttaaggtttctggtagtacttgtgataatgctttaagaggttcataaactcaggcaccaataggagacatttggctctctgccatcttctagcaaacacttgaccacagcctccttctacaaaggaaaccctgtccttggtttggagttagcactttcaacagtgaggccctattactgctgcttccaagtactcactccttattagcctttgctagtggtgcaaaaatgtctgtattcaccctacatgcttcttctgaacatctgtagtatcaaggtgaccacttgtagctttctttgactattgctgaaatgggcaactagtatattccctttatattttagcaaattccaccatagcagtgaagtggttttttttttctttttcttttttcaacctcatgcttatttgtttcaagcagttttctaaaacaaaactcaagctcagccaaagtatttgaactgttctttaatgtgctatatgccatttggtttgaatcatatatttaaataccagcttctccccatttacttgtatctaataggaatcatctttcttccagattgtgcttcaagaagaccatagggaagaacgcattttcatcttgctgcaaaagttgcaatagaagtaagtgggggaactgccaggatatgtctgtctccacaaaacaagcagaacaaatttccgtgaatcaaagccactaagtatagttttcagagatggtaggacatagttattttccctagaaaaacaccccaa

SEQ ID NO: 24626 - DNA, 2300 bp, Homo sapien
atttatttctttggaatttgaaatactttgtgtattagctgtaagtgattgtttttgtgtggatagaatattttttgtactttaatatttttttcagtcataattttatagccaaaggtagaatcttgtaactttgtcctaaatgaacacttttgatggaagtcaataaaatactacactaaatgtccctgtatacattatatacattagtgatttctgagtgttaaaatttttgcctttcttttggtttagtttatcttataaaggttttctaaagtgaataattattaatcacattgcactgataaatgacatgattttagttggtttttgtaagagagacagtttactcatcaaccttagtgtttcttagcaacacaaattattcctatcttgggcattttcgtatcttccttcagacatacatgtggaaatagtttatatgacctgatgcttgtccatctgtcctgagtctctcattacttcttcgttacctaaacatcctcattaaacttcatgtccatacaatatattctttcagcttaataaaccacagtttgacctcagcatcatttggcttgtcacaatcttaaaagtgttctgaaaaataaatttattttgtgtattgtgtagctaaaagttaccgaaaatgttatattttcatgttaaaaaaagtataaaaataatgccttggggccaggctcagtggttcatgcccgtcatcctagcactttgggaggctgaggtgggaggattgtttgagaccagcctgggcaacatagtgagatcccgtctctacaaaaaaatttaaaaattagtcaggaatggtgccacatacctgtagtctcagctactcgagaggctgaggtgggaggattagttgagccatggagattgaggctgcagtgagccacagtcttgccactgcactccagcctgggtgatggagcgagaccctgtctcaaaatacaaaaacaaaaacaaaaaagctgccttgggagctggctaactgttttcttattgttctcatcctctaggatgagagctgaatcacttctggtagagaaataggttgactatcttttggcaagttgacatgttcagtttagattataatttatgaaaatgctggattcatagggagtgttggcgttcatacatccattcaacaaatatttatttagcccttacaacatgccaggctttgtgacaggcactggggatacagtggttagtgaaaatatggcatctgtgctctctatctctagcagagggatatggttgtctgagagcatcagaaaagaacctgctctggtcaggtaggaaaggcttcccttaggaagtgagccttagctgctatctgaagagcataccagtgggagcagcatgtgcaaaggccacgtggcaggatgcaacagggcgcattgagagaagctggagtgcagagtgaacacctgcaagataaagctttcagggagattggttttaagtaaaaacttcattctttatagatgctttatatgaaatatgaaatcaatatttttatattgacttctgtgtgtcatattgacttctatatatctattttaagacaataaactttgttttcagatactcaaaagatttgaagatttcttcaagttcatttttcccatttggtcctttaatcccctaactaggaatccactgattatccaactgcttgagtataactacccaagtggcagggtcctccctttcttctttggaaccagctttatttccagacacttttaagcaatggagagttctttcttatgtgaagccaaaattctggattttactcattgatactagttctcagtggcaaaactgaacaagtccaatttgtttatagactcttttacttattgaagattacttatatatagctataagtctcttccacaaagagtttttcacccaatgttaaacaaatttcaagtatacacacacacatacacacacacaaaatgaaacatcctccctcccctactctgcgtgtaccagttgcctggcttcaataattatcaacctatggttttgattgatggatacttaatgaataccatttttgccctaggacttgctggagatatagaaagggacctgacacagtttctggccttaaggagctctcattccagtggggaagaaaaaaactaaaataatgatgtccgagagcatcagaaaagaacctgctctggtcaggtaggaaaggcttcccttaggaagtgagccttagctgctgtctgaagggcacaccagtgggagcagcatgt

SEQ ID NO: 24627 - DNA, 2300 bp, Homo sapien
agcctgttcacacttgataccactctattggttgtgaggtatacctgtggttttggagctgttcaccatggcagattacttcagggttgtagtgactctcactttacagaagaggcaggaggattgcttaagcccaggaattcgagtccagcctggtcaacatagccagaccccatctctacaaaaaatttaaaaaaaaaattagcccggtgtggtagtgtacacctgtagtcccagctacttgggaggttgaagtgggaggatttcttgagcccaggaatttgaggctgcagtgagctatgattgtgctgctgtattcagcctgggtgacagagtgagactctgtctcttaatcaaataaacaaataataaaccaattttctttgaagtccatacgctaatccgtcctgacatttttaaagctattttctagtaccgtcaatctacaatttatgactgcgtttgtgaattaactatctgcaacaatgtaatatgaattacagatgggttctgtagtgccattaatagtatgagtgtttcagcctcattatggactaattaacatctttttgtgtggaattatacttttgacttctagaaatctagccaaacacattcctccattgcagtccagcagtggcaggaaactcttctttttccctcacaacagaaacagggttgttaaagctttagtgacagcaagagaggcgttttgaagcaatgctcaagagacacagatatcttgggcatcccacgtgggtggtgggtgataggtaacgctttcagatgaagcaagtatagaaactttgggccaactagcagtgttggagggaaaaaacggatattctggatactacttggttgtggggggtgatatattctcttttggagcagatgctaaaacataagagatgttttaagttgggtgtttctaagttgggaaatccatctatatagataaaattttcttggtctcttgttatatgaactgaactcaaataacaaaaagacaggccagttgggaatgttgaacaagtctttggccagaagtttcaatgtaaaatgaaagtgatgaacttcaggggcaatcataaccaggaggaacagtggaagccaagaggagtgttggaatatgcagactgttcacaaggtgcccaaaacaaatccaccatgcaggatggctgttagagcaggcatagaactgatgatcagctggcatagttcaaagaatgccgtgactcagccccttgcccacatgtctttggcaggaaatactgccagactagactgatgtctagtacaggaagtccattacagagaatggttgatataaagcagaaattcagaaccaggagagtttggggacatggagcaggccaaagttggagaactggaatttgacctgaaggtgagctccttgtcctcttcctgcccaaagtcaatattaaccccttggattgaggcaaaactgagccaaaagggagaccaaagtgactagagctgtctgcattgtagtaacaggtctggccaaacaaatacttgttagttgaatggatagaagtaagacagggaaacattatagtctttccacttaggttcttcatgtgacatacactaggtatcatgttacctactcaccaaaaaaataatttaggccaggggtttgcaaacttctccttggaaggaccaggcagtaactattttagtctttatggaccctatggactctgttgcacctactcaagttggccactatagcctgaaagtagctgtagaagcatacctaaatgaaagaatatagccatgttccaataaagccttatttatggaagtggaaatttagcttcatataatcttcacatgtcacaaaatattagtcttcttaaaaaatctggtttttcaaccatttacaaatataaacccattcttagatcatagatatacaagaacaggttgcatgccggattttagtgcccaggcaatagtttgttgacccttttcaggcaaataaattactatcagtcatgatgctgaaagcttagcagtgctgaaatagatgttttataggacgatgctgttggtgacactgtcttattttataggtgacactgatgataaaaatccatccaagaatttatatgtgacatctgcagcaggttcaaatctctcagctatgagacaaactggatacttcctaaggattgccatctattatgcacagagagccaaaatccgttactgaaattgtctgggtgagccgcctgctgggtccagtgatgcactggtagacaaaggagttg

SEQ ID NO: 24628 - DNA, 2300 bp, Homo sapien
aagtgttaaatattaacatgagccagatgctggcaggtatgtgagacagaaagtctgagtttgaaccctggctttgtttccaattaagctgggtaatattgggtaaacaacttaccctctctgggcttcagttcttaatcagattaaaaaagatttaaaaatttttttcattttaaaatgaaaggattagactcccaattattttaagaaccagtttaattataaaattatgtaattctatttttaaaacaatgaaatggcagccataaactttaggatttttcagatattgtggttcgatttagaatttttccattttacaatgggtttatctggatgtaaccccatggtaagttgagcagcttcttatgacttatgatggggttatggtttctactgaatgcacatacatttcataccatcctaaagttgaaaatattggaagtcgaggaccatctgctgtgttgctagcattaaatgcaattttggcttacaatatttttaacctacattgtgtttattgggaagtaaccccatcgtaagtggagaagcattttgtattttattctgtgtaataggatttactagtttcatgtgtagtcagaacactcactttcaggttttggcatttactcttttctgtttctcaatttgtgtgaaagtggatggacagatggtttattaggctttcaaatgcttacaatgctgttgttcaattcaacaatggttttaaactttgaatgtccacacagagctggattttgtttggaacggaagatagtttcgacgcttcaatttaaggataagaatgtttactcacataacttaaagcaacttgtggatataagtacaaagacctaatcgatttcctttattttggtatgtttcctaattcatttccacatcacagcctaactcttccgagttgcagttttaaaaatgaagttacttaataaaccagacatccagttatatttgcatgttttgccttcaccagagtcatttaacctacaacctccttccagatacaaaaacctttactttagaaaggatcctttacttcataaaggaatttaacgaagggacacattcctcactttacagtcaagaacacctgggacttcctggtactctttctactatgtattctataaataaaagagctaaagtgaaattaggtcgcagcgaaaaaacatccaacatttgtgaattttaagccccaacagaaaatcccattccttgaaattcaagtggcaatgagaatattattgcataaggaaaatatagatggaactatgcaagtcaaatgatggtctccactgctgtcgctttgctttgtgatttttaattactcaatgtgactctcctcgtgtaaatgggaccgcgaatatgcaattattgaatactcaaactgcatcagaagtgtgtggagtagtcagaaccgaaaggacgggaaaaatggagataaaggaaagcatgagccttgccaggagggaatcgaggaggtccagaaggagggatattaagaggcattggcaaagcagctgtggaggagctccgggctgcagagcaggtagaggtgtcggcaagggagccaggaacccgcacaggggccctgaggctctagtaggccggggagtggaccaggaaaggagatgcaacgggccggctggaaaactgcacggggaatccgaggtcgacctaatgaacagcacagaccttccagaaggaaagagaaggtgactatgcgagcttagaacaggactaggaggttggggaaagagtacgaaaaagctgaaagggcggacagggtgctgacgagatgggaaagggcgcacagggaggtggggagcagtgcgaggccgggggacagtgggcaggtgcgaggagccgagcccgcgggctggggcggagcgattcgcgcgggcgggagcgccgctgactcagggacctcgcgccagcggagtccgggcggcgcagagaggcggagcctcgattgcgcgggcgggccgaggggcgggaccagcgcctgacgcgcccggaggccgaggcggccgcgggccgggaggggcggcggcatccgcggcggccgcgggggaggggcacggcgtcagcgcgtcgccggctgggccgcgccggtggccaggagggagagacaaggaggaggaggaggaggaggtgagtaggctccgggctggggagccgcgcgggccagcggggaggcggggagcgcggcccctcccctcccctccccggcgcccgcctcgcggggccgcgctgcgcggagatcccagaggggc

SEQ ID NO: 24629 - DNA, 2300 bp, Homo sapien
tctctctccttgcttttctctcctttttccctcccccaaataatttcccctgtacctgttcattcaggtaaccaaaggtgtcctttgctatccagcccaggaaaagttttattgagaattatatggctggaataaaaactcatcaaggggagaggtcctgctctattttcgcatctagttccaattcattatattcagcaattaggacttggcaaatacctgttaataattacaaaacttggtcagttacagacctacaaattcgggggcaagtctttctcttagacatggcagttcatcctctcccaccgagaaggctgttttctaagcagaaagttgtctgtttttgtctgcttagcgagtttcatttctttatttcattctttgtgtgtgtatgtgtgtgaagtaacacctcacttctgtgattataaataaagaagtgaaagtcctcatggaacttgagtcgtttaccaaagtggaggggggggcactacagctgggaagaaaactgctgtcaggatatcagggttttaaattaggataacttttaaaattgtatttttagtggcaaagtaatatagacatggatttaatagaagacacatacacacatatatcccattccatactttggcactgaaaagtcgagagagagatagcaggagttcccaggaacagtgatgagcccggctaacatgaatgtgtttatctcccacctactgatatattttacatgctccccctgtaatgatgaaggcaagattactaactccagacttaggagtaacaggcaaagataaagtttacagcacaaatgccctgtctctctctctcacacacacacatgcccataaaactagcaacttactttattaaacatgtatttatatgcagtcgtgtgtctcaggatgaatatagacaggccagctgtttcatcccagacacttgtgtgaccatttctttatttcaggatttcccctaacaatttcaaatcaataggacaaggaaagaaatgataaaatatgtcaaacttaaaagtctcctactatgtatgcctaggtaaatttaaggtgctttctaaaatatccacttccccttctctctgcccccctcccttcacccctctcagcaaatgtgtggaaactgatactcactttccaggttttctgcaaagcttctagcacaggagacaataggtgtggggcgtggggactgagtgtgcccggcagagaaagggttaatggcccttgtgttacagtttgcatctgttacatcttttatagccccctgtttaaactaatcctcgaggcacagcatcttcccaacctccaccgagttttcaggattctcctcctctcctgcctgcctccgaggtcccccttctccaagttttgacagtttcaactgaaaaaatgcagcgcctctctcgatttttaggtacaaaagtttcgaagccagaaaggatacgatcatttagtagagcttaaaagtattgccgtagtggttggactttctctttcctttcttaagggaaaaaaaaaattctactggaactatttaagggaaccagtgtgggggagcatgtgtgtgagtgaggtggggggaaatacttaagtaaatattgtcaaagtggcgagggggggtggggtaaaggacagtgtccaaagaggcttataattatatttatcattgcggcgtaaaacgggaaatcttaatttgggggcgagggtggggggaggaagagacagtgcctcgataaactccaaaaggggaggggagggggcgctgggcgagtgggcttcctataattactattatcaatttgcccgagtgtgcttcatccaggggctgtttcgcgttgtttgtttgtttgtttcctctgggaattggggggtggggggatgagaaaagatgagaacgaaaagaaaacctcgcctcaccccaagttcccgagccgggggctgaggacttttcgaaggaaagggtccgcctagccctgagtcaagcggtcttactgtaccgccgtgtgcattccctcatacggtcaggagttatgactcattttgaagatgtaattcttgtctctctgatcccctcgcgggtgcaacacaccaaacagtaacaaacacaaagcgcctcggggccaaggctgggggtggggggcggggagggggccgccgaagtttcgctttggcgttggggggcgcggatgggtgctcgccggggccctggcccggctcccctgggcggcccgcgcgcgtttcaatgggcgcgggcgatgcccacattgtcgctgtgtt

SEQ ID NO: 24630 - DNA, 2300 bp, Homo sapien
ttttgagtggggatgtgagtctgaagtgagaaggggtgtccgtgggtaggaatttcaggtgggtttagctcctttatggcaagcttttctcaagagtggcttcttcgctttctcttacactcacactctctctccttgcttttctctcctttttccctcccccaaataatttcccctgtacctgttcattcaggtaaccaaaggtgtcctttgctatccagcccaggaaaagttttattgagaattatatggctggaataaaaactcatcaaggggagaggtcctgctctattttcgcatctagttccaattcattatattcagcaattaggacttggcaaatacctgttaataattacaaaacttggtcagttacagacctacaaattcgggggcaagtctttctcttagacatggcagttcatcctctcccaccgagaaggctgttttctaagcagaaagttgtctgtttttgtctgcttagcgagtttcatttctttatttcattctttgtgtgtgtatgtgtgtgaagtaacacctcacttctgtgattataaataaagaagtgaaagtcctcatggaacttgagtcgtttaccaaagtggaggggggggcactacagctgggaagaaaactgctgtcaggatatcagggttttaaattaggataacttttaaaattgtatttttagtggcaaagtaatatagacatggatttaatagaagacacatacacacatatatcccattccatactttggcactgaaaagtcgagagagagatagcaggagttcccaggaacagtgatgagcccggctaacatgaatgtgtttatctcccacctactgatatattttacatgctccccctgtaatgatgaaggcaagattactaactccagacttaggagtaacaggcaaagataaagtttacagcacaaatgccctgtctctctctctcacacacacacatgcccataaaactagcaacttactttattaaacatgtatttatatgcagtcgtgtgtctcaggatgaatatagacaggccagctgtttcatcccagacacttgtgtgaccatttctttatttcaggatttcccctaacaatttcaaatcaataggacaaggaaagaaatgataaaatatgtcaaacttaaaagtctcctactatgtatgcctaggtaaatttaaggtgctttctaaaatatccacttccccttctctctgcccccctcccttcacccctctcagcaaatgtgtggaaactgatactcactttccaggttttctgcaaagcttctagcacaggagacaataggtgtggggcgtggggactgagtgtgcccggcagagaaagggttaatggcccttgtgttacagtttgcatctgttacatcttttatagccccctgtttaaactaatcctcgaggcacagcatcttcccaacctccaccgagttttcaggattctcctcctctcctgcctgcctccgaggtcccccttctccaagttttgacagtttcaactgaaaaaatgcagcgcctctctcgatttttaggtacaaaagtttcgaagccagaaaggatacgatcatttagtagagcttaaaagtattgccgtagtggttggactttctctttcctttcttaagggaaaaaaaaaattctactggaactatttaagggaaccagtgtgggggagcatgtgtgtgagtgaggtggggggaaatacttaagtaaatattgtcaaagtggcgagggggggtggggtaaaggacagtgtccaaagaggcttataattatatttatcattgcggcgtaaaacgggaaatcttaatttgggggcgagggtggggggaggaagagacagtgcctcgataaactccaaaaggggaggggagggggcgctgggcgagtgggcttcctataattactattatcaatttgcccgagtgtgcttcatccaggggctgtttcgcgttgtttgtttgtttgtttcctctgggaattggggggtggggggatgagaaaagatgagaacgaaaagaaaacctcgcctcaccccaagttcccgagccgggggctgaggacttttcgaaggaaagggtccgcctagccctgagtcaagcggtcttactgtaccgccgtgtgcattccctcatacggtcaggagttatgactcattttgaagatgtaattcttgtctctctgatcccctcgcgggtgcaacacaccaaacagtaacaaacacaaagcgcctcggggccaaggctgggggtggggggcggggaggggg

SEQ ID NO: 24631 - DNA, 2300 bp, Homo sapien
atgcaaagggctccttcttccttaggagtggtggaagggtggctgtaaagcaaacgtctagagaaagctggattccaatcttttaaattaaaaaagaggaaaaaaaggaagaggaagaaaaatggacatgaacagtggtgctaaatctcagaagaggaacttgataagtcacacatatatttagtatagatatataataatgaaagaaatgtaaaatataaaattaagaatgtgcctgacccatgttgaaaatctttgattttatttattaataatttttaagctgaagatcctgaatgcctttcttctatagacactttatctgtgatggggtggggggagagagttaatttatccagcagctattttcattataataaatacttaaattaggaaagaggtgagtaaccaactgtgaaaatctactttcttgcatcctagaacaagatctagctgtggtcgtgctaggtagctattaaccacccccaccccactcccccgccccgcaaaaaaaaatacaaaatacaaagacgtatacctctgggagtgtggatgtggcaacccatgtggtggcttgtccctcctttgagtgcaattgccagtgactcttgcattcaaagtcttgctttaggcacacattcaaagcacagttcaaagcagtttatcttaatatagtgttggatcagggtattatttgtttcagatttcatcagactggaaacaggagggtgtaacatatttaacaatattaaagcttaaaaattggtgtgaggcagctctctggtcctcttaacacctccacctttacctttccgaagaatcctaaatgctgtgaggctagaagtttatttgtgctctgaggttctcaagcactttcactctttaggaaaaaaaaaaaagtctcacagttatttaagaaattgagcctgaaccatccgaggataggagatttcttccttttccgataaatgcctgtgctcagcatcctcaaatttggctgtctttatttacttctatattagttccaattatgtgcagtgtaaaccagctttttgattaacaaaacagcagagcattggttaagaacacttaaacttcaaaaaaattcccctgggaagtgggctctgaattggttaataatgtgcagtacttgctaaattgctgacttccagatgtggaaaatatctttcttgtttaggacctatgtaacctgattggattacgacagaagcgtcacgttggaagcttttgagtgattatttaattaaccatacagtagaaagctgtattctccaggaaatcccttccatatttgcataaccaatcccttcagagcaaaggtggagtcttttctttttaatcttactttaattgtaatatcaaaaaatatatactccaaaacttagaccccatgccgtttaatatcatgctctcccttccctgctaagtttctctatggcctttctcgtttctcctcctgcctccctacacactctcccttactttgtagtgaggtctccccgaggtgtagagagattcagagatcggccaaccgagtgttctattttaatttacttagagaccctttattaaaatgccaaactactttttaatattgggatccagtccagaaattcatcatgcacacaccctaatacacatgccctaagatgcagctcccatgcagcatttttttttctggctctggtacctaaaaagaaaaaaataacaataagagaaagggcagagaactttgttccagaagctgtactgagatacctacacaatttgatgtgcatctcaaatctggtcattagagatatctgtataagaagagactatctggattgaggacccgggatctttccctttaactttcgccccttggagttctccagttctgtgaatggtgtgcaccgttttccgccctgtactctgtaggatttagtgatgaggataatgatgccaaaggcttgacgggcggggaggggggggtggagggggggagaagggagggaggggggagggaggcgaaggcgaaagggagggagaggaggaagggagggaggtggaatttcatttcttccactaaagcgtttgcggagacttcaaggtataatctatcccagatcctttcccagagagaaacttggcgatcacgttttcacatgatgctcacgctcagggcgcttcaattatccctccccacaaagataggtggcgcgtgtttcagggtctctcgtctctctcctacagaaaagaaaaagaaaaaaatgtcattagaagaggcgtaacacgtc

SEQ ID NO: 24632 - DNA, 2300 bp, Homo sapien
caacatcatttacgacctcagtgaatggtcatgtaaatggacaatttgcagaaattccagctggggttaaccttagaacagggttgttccaatataaagctgctggcttcctttacattattatggatttctgtttgttttctttttatttttgggcaggcttcccctgagaagtttagatggacgatttaagggaggtgtgtttttaggaggacttagtggtgatattggaaaaatcttagtgaaatgacagccgaggtcattataacatggccttgagtctcataactcgggaggaagtaggtaggaggtggtggcagaaaggcaaagatactgaggtgtttctaacacgggcacaggaatatgaggcaataatagaacattactaaagttctcctctagaatgagtcattgacaaatataatttgaggctttaggcagccccaagaaaatatcaatttctatgatttttataaacttacactttggaaaggttggcaaattgatagacaatgaataaacgcatttagaattcaaagttgacattcatattatggcctcaatttagctaggtgagatatttagtgacacttggatgtctttccaagggtcagatttgttaaaacattatgctaaaacaatttgagagataactttaagtattctaggcttaactagaaagcaaattttgcattacagttcaggagtagatagtaactttgcaaacccaaatcaagaaatctaaccacattaaagaaatggattttgttgtaaaactaaaatgattacatactatatttcttaacttaatgagggagaaatgtacctctggtctaataagctccatattgttaaatgtcagtgttagcatctctcttcatcagtgttatccaaaatttaatgctaatattattttactgaatctgtgaagagattgtactatttttcttttctttctttctatttttggaggttggggtgtgtggagggatggtgtttcaaagtttggtgttgagattgtatgtatttccaaagagtaatactgaaataggttgtgaaattataaccagagttctacatcctcaactctttatattcaagaagttttgccatttcaaagaaagatgagaagttttaaaaaaaaaaattatgacaggactgtagtaagagtctatcaacactattaatatctatttgggtaaacagagaggcagataccttttcccacatgaactattttttgatcagtataaagtatgataaaatatgaaaaaaagcaaaattcaggatacttttgtaggtagacacgtcagatattatataaaattagcttaaatattcaaacactgtaaaatgagaggcagataggatatcgtctccaaagaggacatggtgaaaacgatactttgaaatgataaatagtcaaatatgggcataactttttcatattagagaaaacttattgcctagacaaatgtagtagtagtgtgtattttacttctaagaatttagtgactaaagtacaatgccctccccatcatgttctcataataaaagctcatattctgtgaacattttacactttttttgagatggagtctccctctggcacccagactggagtgcagttgtgccatctcggctcgctgtaacctctgcctgctgagttcaagcaattctcctgcctcagcctcctgagcagctggcattacaggcacctgccgccacgcccagctaatttttgtatttttagtagagacaggctttcaccatgttggccaggctggtctcaaactcttgacctcaagtaatctgctggcctcggcctctcaaagtgttgagattacaggcgtgagccactgcgtctggcctacactttttaattctctgatttcatgaagagttcttaactccccccagctaatgctaaaaatgtgtcctggttcttacacggcactgctagtaacgtggcaacctgagactgttcccaggctcaattcacaggagcccatgttcagcggttatttaatagctttgaaatgccattcacctgtggcccatttcaagtttcccatgattcttaggaagaccctggcctccatcttgaaaacggaaaataaaaacagcagacctatgaaggtcgaaggggaagaaaagctgtatcgattgttgagatctggcgacttgtttaaatttcatcagcctcacttctatgaactctcaggtaagcactctattgatttgtaattttcctgcaaactttataaagcagaggaaaatggccgacatggcgaagtgct

SEQ ID NO: 24633 - DNA, 2300 bp, Homo sapien
cagaatgatattgtgttaaagaaagcgaagtgataagcaagcatcatgttattatttaattagcattgcttttacttccttacaagtacatcaaataagcctcaatgttaggatcgatgacatcttaaatctgacgaaatatgatgaacaacttgaccaaataaacatagaagataactggtaatgcctacaatcacaagacttgtgaagggtacactaagagtttaaaccttggtgattcatgtctcaggctcttgattactgaactatcctgacttttagtagagcagtgagaattttttttctgtcacacatatcacagatggaccaacttattaaaattatcaaaaataaaaatatttatcatgcattacacctagacaaatactatataacttagaatatggcataataaaaatacaaattttatcacagttgattatggtctcagaataagataatatgctttcaaatagtaatattgatttgacctattgttagtcttcaaggacagtgattaaagatggttgccatttaaaaacaaaacaatgtgtccattctacatgctaggttcccctaacattgtatttcttttcctaagggatgaaactggtggtccatcaggtagacatacctaggtttggcacataaaaagtaagccaaaatactccattatcttataacaagaacaaaaaatagcaaacaaaactacttaaggaagagataaagagttttctgatggaggactagccttgaaattaaatatttccctatgcaagttgacatttaagttgtatgacttaagagagataagaagaaattgtgtgaaacataaccttaaatattttggatcacatttttgtgaattatgcagcatttggcacaagttttaggaaacagaaacactctggggtaatgatgagtatttgcacacactttatgtgaacatgtatgcacactaacacggttatatttatggcataatgcaccagatatacagaatatgtctatgtaaaattgttttatttgtaacatttccatcctgggactaaatgttggctctttaaaatttgtttttatgtatgcttccatgccgaacttacagaatatagttgttgtatagcacaaatgttctaacttttcatgggcactcaaaaatgtcctttgagaagtcaccctagagcatccttagaaatggcatgttgtagtctggacagaacaaagcagcaaaaagaaataagatgaaactatgttatcattggctctcctttaaacatacgaaaaactctcagaagagataatgtgctgtagggaaaagctctgtgtgggcacagggtgtgcacagtgacctaatgggccttttccatctctaattcctgtgatactgcagatctaagagatggagctggtaattgcttacaacataacagatatgtagagatatgtacatatattttttcctcttcctctccttccccccaccttccctggagttcagctgagagtctctttaaacaaacaaaaactgtgagaaactaagagaagtcagagactggcctgctttttagaggcagaatgtggaaagtatgaagatgctaatttgactgcaaaggctggaaagcaaagggacctgagccatttatactacaggcagtagttaaaaagagggaaaaaaaaaaaccttgaaaaaaatgggtgtaaccctgggctttgatacaactggcctttcggcccccacttgagatttgcacatccccaagggaagctgtggtttggaataagatggtgcatttaatttcactcagagaacttattggacttggcaccaaaagaaagaatttgaagtatattttttgtcatgattagtggccccctcaccacaacatttgattattttggaaagggaaaagttaaatccttgtaaagttgtgatttacaatttgcaagcatccaggtagggagtttgacttctgccagcttgatcatgggatccacatttgattctagctcattgatgtttacaaaacagttctgtggggggaaatagagttggaattatatcccttgattatcctgggtgattttctctccacactacatcttttctcattcacgatgattttggtctcttctggaactcattgcaagaaactggcatgtggctggtttgctttttgtttctaatctgcagtatctggtatttttatcatgtgattcctttgccctcacagttatgtaaatcttgaggcaaaggagttaaaaggagtttctaattttatacctgaaaatagctttcactg

SEQ ID NO: 24634 - DNA, 2300 bp, Homo sapien
tatttatcatgcattacacctagacaaatactatataacttagaatatggcataataaaaatacaaattttatcacagttgattatggtctcagaataagataatatgctttcaaatagtaatattgatttgacctattgttagtcttcaaggacagtgattaaagatggttgccatttaaaaacaaaacaatgtgtccattctacatgctaggttcccctaacattgtatttcttttcctaagggatgaaactggtggtccatcaggtagacatacctaggtttggcacataaaaagtaagccaaaatactccattatcttataacaagaacaaaaaatagcaaacaaaactacttaaggaagagataaagagttttctgatggaggactagccttgaaattaaatatttccctatgcaagttgacatttaagttgtatgacttaagagagataagaagaaattgtgtgaaacataaccttaaatattttggatcacatttttgtgaattatgcagcatttggcacaagttttaggaaacagaaacactctggggtaatgatgagtatttgcacacactttatgtgaacatgtatgcacactaacacggttatatttatggcataatgcaccagatatacagaatatgtctatgtaaaattgttttatttgtaacatttccatcctgggactaaatgttggctctttaaaatttgtttttatgtatgcttccatgccgaacttacagaatatagttgttgtatagcacaaatgttctaacttttcatgggcactcaaaaatgtcctttgagaagtcaccctagagcatccttagaaatggcatgttgtagtctggacagaacaaagcagcaaaaagaaataagatgaaactatgttatcattggctctcctttaaacatacgaaaaactctcagaagagataatgtgctgtagggaaaagctctgtgtgggcacagggtgtgcacagtgacctaatgggccttttccatctctaattcctgtgatactgcagatctaagagatggagctggtaattgcttacaacataacagatatgtagagatatgtacatatattttttcctcttcctctccttccccccaccttccctggagttcagctgagagtctctttaaacaaacaaaaactgtgagaaactaagagaagtcagagactggcctgctttttagaggcagaatgtggaaagtatgaagatgctaatttgactgcaaaggctggaaagcaaagggacctgagccatttatactacaggcagtagttaaaaagagggaaaaaaaaaaaccttgaaaaaaatgggtgtaaccctgggctttgatacaactggcctttcggcccccacttgagatttgcacatccccaagggaagctgtggtttggaataagatggtgcatttaatttcactcagagaacttattggacttggcaccaaaagaaagaatttgaagtatattttttgtcatgattagtggccccctcaccacaacatttgattattttggaaagggaaaagttaaatccttgtaaagttgtgatttacaatttgcaagcatccaggtagggagtttgacttctgccagcttgatcatgggatccacatttgattctagctcattgatgtttacaaaacagttctgtggggggaaatagagttggaattatatcccttgattatcctgggtgattttctctccacactacatcttttctcattcacgatgattttggtctcttctggaactcattgcaagaaactggcatgtggctggtttgctttttgtttctaatctgcagtatctggtatttttatcatgtgattcctttgccctcacagttatgtaaatcttgaggcaaaggagttaaaaggagtttctaattttatacctgaaaatagctttcactggatgttttttctcaagctttataattaagattggagatctcgtgggtattttaatacgtactcaaatatgtccaaacagccagaggggaagtgaatgaccaactgggtaggctgatgaatattttcctggtaaatgcataactttccccacaactgtgatgctttatcctttgacattaagaatgctgtttgcagaagtaacattcctttgaacactcagctttctgaaatggtgtcccaccgcaaggactggagaagggtgagtttgagctcaacgctggagtaacagccaggcaaattaggttctgtcctaatgtctaacatggaagtatggtcagtcaggtcttgaaataaatc

SEQ ID NO: 24635 - DNA, 2300 bp, Homo sapien
aacacatgaattttaggaggacacaattcagtttatatccagcatgcgataactataaaatttttaaatgcatttccttattataaagagactccttccttattcatccatctctttaaaatagttattactatgacttaagttttagcttctcttttaatgagaataatacacctagatctatcagaccatttttaggaagcgtattttaaaaaatttcatatcaaataagatcttgaccaaaccaaaaattgtaagcagccaatttagcataaaaaccaagaacactgtctactttggtatagtattgaagcgactcaccaatttaatcaaaccacacttaggtgctagtgtagtgacagaattttagaataatgtctttaaagaagtgcctacatataactattagaaaaatcacctgaagtttggaaacaagcaatagattactaggtgctcttttattacttttctatttgctgttcaaaatttacaactctttaggaacacaacctaatgtacagatttttctcaggtaaatatgcaaatcatttctctccaatgaagagataactgtgaaagttacaatttattgcccagaaagacattaactagttttatatctaacccaagaatctcaccctaatatgttttcttaaaattacctctatacctacctcatcaaatgttatttgaactgattttaactttcctggtccattcattaattaacaggttaaataaaatatttgacacgtctatttaatatttgcctcagaggcacagatttaccctcctgaaaataattcttaagcataaccaataaacaaatattcattgattaataccttaggttggcatattataataaacaatctaatctggaaattgaatcattaatagagactataataccaaatgatttatagtttaattttaaaattacttgtcatgcttttagggaaaaatggaaaattaaaactttaagaaaagcacctggaacattaaaaaaaaatttctgttatttttatgtttatgtaaacatatagtaaaagaataggtaaatttctaaatttcttgtttcccattgtcatttaataaccacatgttaattctgtatgtaggcattgtgaatacatatttataaagagaaagaagggaaattagtatgattttaatctatggctatttataataaagcaaatcatctctaacctcatgggctttgaactccctattactaatatagctagagtcccacattgactctaagtgttttgtgggggaagaagaagctcaatgatttttctcccaaagaaatctggcctagtgtcctgaacggaaaggaactagctaggtggattgttggtttatggaaacctaaatgcaggtaggatccttttgatatagtcttactgggtcaattcttctgtttcttcaatattcaaggtcaggaatctttttccattgggaagtcttccttgcctacaaacattagctaaattagacgcctctgaactcctatgccgccctttaattgcacttaacatgtatttcgtatgttttatgatactgcctccttctttattccataagctcaataaaaagaaaaactgcaatgtttgtcatccaactaatttagtgtttgacatctacatactaagtaaataaaccgggataaaatatatttgatcagaggaactaattagcttgacataaaaacttgaatatagcctttctccctggcggttagtgctgaggctgaggacaacatgcatttactaaaaattcaagaaaagtctaaaaaaatcttttaaaaatatcccctcaaatcggcatctactcctccagagagttactataatattttttcttccccttttattaaataaccctgtcagcagccaaaaccgaccccacccgcggccctgcagcagccgtaaggaggaaccacgagacccaggccttcccgccgcccgaaccggacaccggcagccagcagacagcggcggacaagcgacctcgctctgtggccagtgagttgtttctgattcggatgatttttgtccctcggcgcgtgcccttgctccccgcccccggctgcgagacccccggcccggcactcgctctcctcctgtcacgaaagggtcgcggcctgtagccctgtgggcagccgtgccgcgatgaaccccagcgcccccagctaccacatggcctcgctgtatgtgggggacctgcaccccgacgtgactgaattgatgttccaagagaagtttagctcgacaggtccaccctcaccatcc

SEQ ID NO: 24636 - DNA, 2300 bp, Homo sapien
gactggctgcttctctttagtactacagaaaaataattttcatgctctcgttcttataatggcaaatttagttggtaagataaggaatatatttacaagtttcagttgtattactcgctattccagttattccacttgctcaggcttcacaattaaagaaatactgaagtgatgcacagataagacaagagtggggcctgaccctaactgacatcaaattctctaatgaacttcaagtgtttctagagtaaaatatactcttccattccagaaccgttagtacaactcttaattcaaccagaaaatggaaggcttacacatattcctttgaccaactcataaagataggagaactacatgagatcattcagacacctttaataccgacttgggactttgtaactgttccaacatcagtcaaattctgagcatcacgatttgagaactggcaatcttggagagatttaaagagccacgttgattattaataaccctgataagttgtagaaatgggcagataattacaggatgaacttaatagacagaaatacagagtaatttagaggaagtaaactgctgtaaatataagtgagaagacttggctttgtgggaaaaggtgggaatcagtaaaccacaaatgaaacatgaattagccatattatacagttgttttattaaaaaccaaaactttgtagagtacattaacagagactgtatttaagagaaaggcagtcatcccttagtcatttatacaattatttattaagcacttatgtgctagttgatacttctgggtgctggaataaaataaggaaaaaatcaagatctctaccttcacgaagctcactaaagtgtggtaaatgacagagcaactaccttcaatagtctctagtttgtattctgcaaccaactgaatacagcaaatactaaaagctacttgaggtagggatccatcctatttttacctgttggatcccattccgtgcctagcacaccagcttgtaagcaatcgacatggattaaggggtaaaaacaggcccttaaatagctaaaattttgacaagtaatcacttgtctgatcatcaaatatgtcgttcgaaatcctcatttttttcttcaaagcgcagtaaacaagtatttgcgcacctattacgtgcaaaacagttttcaacacaatgctttgtgtgtaaaaggaacggcgggaatggattcaagttgcgcatcgtgataaatggcgtgaatatcctgagcgggtggacagcccttcctccgtgagttttttctttttcttttctagtcaccaagacagcacgcgtgtgcagaagctgcagcggtgggacgcagtgctaagtctgggggcgcacacaccagctcgcgcgtcgcgagctcgcctgggcagctcggcgggcgcggcgaaacagctcccacgtccgccttccaccgactcctcggtatcagagcggacgaggcgtccccccagaggaaagactgggcgccgcagacgccccttggagaagtccctggccactcgccccacctcggggtcctcttcctcttgggcttctcctgaccctttgggtgggcgctccagacaggcccgtcggacgcgatttggaaacgggtcgtgcccggcctagcccgcatctactcgcccggccacagcccagccacagcttagggactttgaggcgcccgcgcccctttgtcgcggtatctctagcccaagcaggccggacgccgaggcctcgcggtatcgagcctccgtccgccccgcctcctcgccctccactccgccccgccctcgctctctcacccctcccccgctcccgcctcgcttccccgacaatctcctcgcgctcccggcccggcacgcgcgctgcgcccggccgccgctgccgccgccgccgccgccgccgctgccgccgagcgttcctccgctgcgcctggcttccagcttcgggccggaaccggaagtttggggggcggagcccggcggaggccaggagaccgaaaacgcggccgagcccggagcccggagctggagccagagcctggaccagaacttggccgccgcctgcaccgccgccgccgctgccgcccgccgccccttccccgcgccgcagccgcctcgccgccaccgccgcgagctcggccgccagtggtcctcggactttaggtgtctgggttgaaggtcggtccggacatcggacccagtcagttcccagactgtccgggcggcagcggacgccgctgccgccgccgcctcttcgtcgcctcagcctggcgttttgttccgagag

SEQ ID NO: 24637 - DNA, 2300 bp, Homo sapien
tttaaaaaaaaaattgatatggcttcaagtgacagattgacccctagaaaatacctttttttgttttaagagacaggctctctgtcacccatgctggcgcccagcggctcaatcatagctcactaaagcctcaacctcctgggctcaggcagtcctcctgcctctgcctctcaaagcactcagattacaggtgtgacccactgtaccgacccttagaaaatgctcttacacatgcaatttactgtagacaaatttgctagatggttaaataggatatttctcctagttgcatattggtgaaacctgtgtttattataatatttgggaatagtataagttggtgagcataaaaattactggatgttgggaggtctaagaaaattatcttagtatgtttgtaaaattaaattttaggcacaaagaatgtggaaaggagatgaccaaatttggttatgttggtcagtgtgatattaataaccaactaaatatttttagtgtataatgtagtttaaatatttgaaatgataacatattcaagaaaaaagctaacttaaatggttgattgcataaacaataaattttagcaatacccagattagaactaacattatttgaagactcacttgctaatatatttatcatttcagaccatacacacaacccataaaatattagtgggctgatccaagcaaagcataagttggtgtttaaagtaagttgagtggaaagaaagctataaatctgttacaactctccttatgcatatataaaatggaaggtattattaaaatccccattccttttagcaaaggatttgaaatggttttgaataattcatcaaaacataaaacattgtatgaattaaaacaaaatcataacctaggaaaaaatatattaagcaaaatatcaagagatggaagaaagaaaataccatggattgcaaaaaaaataaaaaataaaaaatttttgctgaaagcactgttttgagagaccaactctgtatcatctagggatgtactcttattatagtgtctgacctgatccagaggtgaagaagtacctctatgcagtcctttaatgttacttctcattaaatgtcacttctcattaaatgtcacttctcagttgggctattactggtagtatgacaggtgatatcttgagattgtctccttttcagaggacctggaattccctatgctttaaaaaccatgcaggtataacaggaaattttttttatttttgttgtcttgttatgaaacatatgtaatttaaaatgaggatcatatttgcttttttctttttagataaggtgttgcaatgacaaataagtagcatattgcaaatacaaacagtattttgttttggaaaatagtttaccagttgtcccagtgccttcgttgagtaatactttttgtcctaagttttgatgccatctctattaatattttgtgtatacaactgcttttcccagttcacttatttatgatagtacctatattttaatattggaaggaacagtccatctttactctttaaataggtttttggcttttcttaattacattcattttcaaattctttaaaaaaaagaatgcattggtaatatgaagagatatgtatgatatcacagtacaagagcaatacaatgttatttaaaaaagtatgcttcatagaaacctttaattcaatgggcttttaactgattacaatgatatttagtagagtaattgtcagagagatgtgtaatgtactaactgagacatgaagtttataagggccatgtcacatgtttaatgtgacatgtagagaaatatttattttaaaacttggttgtttctaaatttgtattaaaagttcgggtaggtgattgagagaatattgtatcagtcctggctcttgtttcttaaaaagagtcagatatgagatgttctagttaaaccttttatctgtaaagaatttgaaaacttacttgttaaagaggtcaatttatttatattctgttcttactgcttgtagtttaaaaacgaatatggacttatttttatcttttacctattattatttcataaacttttcatatttagttaataaatcatgctttgaaagaactcatggaaatagaagaagtgagtgaaaatgtattacaagttcacttaaatggtaagtatgccattattttgccattggagattatgtaaactttgtggggtttttatatgacttgtatatttcaaatccattttaatagttagattttgaaaactagatccatgttttacttagcacaccatatgcag

SEQ ID NO: 24638 - DNA, 2300 bp, Homo sapien
caatattgttattccataaacttaaatctggatttacctttcaatttatagctaactgaaattaatatactaactataagttcatgatttctttgactcatgaaaacatattttagaaatttgtgtacttttacatacagtgggcaatttggttcagaaccccaagagaaattgagatgaaaaactcatctcaatttacaacagtaaataaataattcagctaaaactgaaagtggtaccaatccagcaaactattgatggagaggtttggccttccatgcagccagaacaacataaagttttcaatggggattacttgttcagacaagttacaaagattacaaatatacccagattaattataaaatagctaatattctcatcatatggaaaataagtatcaggaacgtatgtgggaacagacaatagcagtggcatttaaactttaagcattttagagctttggactttatatactgatatatgaaacagacatttaaccaaaaaaaaagcaataatgcaagtcaaaacctaaccaaaggcctctaccaactaaaaatttgaaattttccatggaagtcagacaaaacgaaaaaatggaaaatgaaacccttaaagcaaaaaccaatcaagtcttccaacactgaagtcaatatccaaatctcatacaggaccaaaaaggggaaaacactcaggtctacaaatggataagcagttccaatacaatccagatcccgacattttcccactcagaaacaaatgcagtggagcttttcctggagaaaaagagctctccaatgaattttttttaagtgacatctagaaagtgtgcctctttctgtctctttccctggcgcctcattggaggaaggagggggttgtttttgtattctcccccactggagcaagacacaatcagatgttagatggaggagagaaaccacttttgacaacagcaaataaaaataaaagtgcccttcctcccctgacaggatgggcaccccacctcacacacccctccctactccaacccctccttcaccccccccagcaccaccccctcctcaccccggagctccactgcgtatgtggtttggtgctactgttgccccggagtgaaagtcagagccagaggaaggcaatgaagcccccacagacacacttacctttcctgccccccacttttgagtgccttccctggagctgtggaggatgacacaaagggtaataaagggggggagtggaggaggaggaggcgaaggaggaggaggagagctggggaagtggctgctcctgggtgtagtgagatgtctccagccagggccaagcagcagcagtagcagcagcagcagtagcagcagcagcagcaacagcagcagcagcagcaacagcagcagcaaagggtctgtgttgctaagaggcttttggtttctttctctcctcctctcacggccaaagaggaggagggtggagggagggaggcgagttggaggggtgagggggtaggagtcgtggatgggggttttcgaagaagaagaaactccttctcctctctcaggctcaatccccctctcagggctcagggctggagggtgggggaaggaactcagccgccttccccccacccccctgaattcaaggttgaagtggggtagaattagtgtcctgtccctttaaaaatagaaataaaaggtgccccccctctgccactgcctctctcttcatcatcagctgctgctgctgctggggtctctctgcttgggggggagggggggttcgggtagaagagacgggaggcactcactgcgcatgtccctctctgacgggtggctggttggttgaaggcaggaggagggggaggggaggaaatgagctattttcccagaaggcgtcgaggcgctagcgacccggaagacattgtagcgggaggtacaggagcgggggcggggaggaggaggaagtcgctacgcttttaacacccccagctccctcctccttcctaagggaaagtggaggaacggaagtgggcgtggacggagacgaaaggaggtcacgtgtttgggcgggagaggggcggggtgggagaggtagtgcgtgcgcggggcatgccgggagtggttgtgtacggtccgcagcggcaggtgaagtctagcagaggacgcggccaggcgattcggtgaagcgattcctgcaggcgttggttcccctctttgacctggtaaatgcaggcttttatgcgagaggtaatggtgggggtaaacttgctgcaaacgaaggccaggggcgtcggtggcgcaagg

SEQ ID NO: 24639 - DNA, 2300 bp, Homo sapien
aaaattaatttcttcagtaagttctactgtctctctcttacctttaaagttgctgaggttttaaggtgagaacaagaaaccttacaaggacttggaatggcagtattgatgttgggagaaaaacttgaacttggcacagatttctgcttaagtgcactaattacatctcagagaaaggtaaaaaattgttcaaatttataacagaagggaaataagatcatattgtttactgctataaagcttttttatttcggtatgtaaatgtctacttttgcacacagttgataattaaaattttacagaacaagtttctacatatgcaatgcttcactgtcactaaaatatatgttttagctttaaccatcaagaaaataaaaaattagaagtattatcatgtctttataatatttttgccaaatatccttctagatttatatttcttcaatcctttctagttgatcaaattgctgttttcatattgccagtctgatcacaaaattgctgctttacagaagaatattttttgctgacataaattatgggatcagagataccaatgcagttacaaaaaaaaaaaaaagggtgtgagggagagagagcgagcgaaagagagtgtgtgtatatgcatgtgtgcatccatcttcaaggaaagaataaagaaatgtatatatgaaacaaaataacactttccaatataagccctagtaaaaggcctacatcagaaacatactttctaacatttgtgaaataaaatacagcactgaattttaaagctatgcactaagaacacattatacaaaaatgaagtgatttttatcaatattgttattccataaacttaaatctggatttacctttcaatttatagctaactgaaattaatatactaactataagttcatgatttctttgactcatgaaaacatattttagaaatttgtgtacttttacatacagtgggcaatttggttcagaaccccaagagaaattgagatgaaaaactcatctcaatttacaacagtaaataaataattcagctaaaactgaaagtggtaccaatccagcaaactattgatggagaggtttggccttccatgcagccagaacaacataaagttttcaatggggattacttgttcagacaagttacaaagattacaaatatacccagattaattataaaatagctaatattctcatcatatggaaaataagtatcaggaacgtatgtgggaacagacaatagcagtggcatttaaactttaagcattttagagctttggactttatatactgatatatgaaacagacatttaaccaaaaaaaaagcaataatgcaagtcaaaacctaaccaaaggcctctaccaactaaaaatttgaaattttccatggaagtcagacaaaacgaaaaaatggaaaatgaaacccttaaagcaaaaaccaatcaagtcttccaacactgaagtcaatatccaaatctcatacaggaccaaaaaggggaaaacactcaggtctacaaatggataagcagttccaatacaatccagatcccgacattttcccactcagaaacaaatgcagtggagcttttcctggagaaaaagagctctccaatgaattttttttaagtgacatctagaaagtgtgcctctttctgtctctttccctggcgcctcattggaggaaggagggggttgtttttgtattctcccccactggagcaagacacaatcagatgttagatggaggagagaaaccacttttgacaacagcaaataaaaataaaagtgcccttcctcccctgacaggatgggcaccccacctcacacacccctccctactccaacccctccttcaccccccccagcaccaccccctcctcaccccggagctccactgcgtatgtggtttggtgctactgttgccccggagtgaaagtcagagccagaggaaggcaatgaagcccccacagacacacttacctttcctgccccccacttttgagtgccttccctggagctgtggaggatgacacaaagggtaataaagggggggagtggaggaggaggaggcgaaggaggaggaggagagctggggaagtggctgctcctgggtgtagtgagatgtctccagccagggccaagcagcagcagtagcagcagcagcagtagcagcagcagcagcaacagcagcagcagcagcaacagcagcagcaaagggtctgtgttgctaagaggcttttggtttctttctctcctcctctcacggccaaagaggaggagggtggagggagggaggc

SEQ ID NO: 24640 - DNA, 2300 bp, Homo sapien
acaggcatgagccactacacccatgaaaagtggtgctctgctagattaagtcacactttgaattctgtcacaaatttgtgatcactatcctcaaattgccgtttaatactgcctgtgagaggtctaatctcaagatggctgaacaggaacagctccggtctgcagctcccagcaagattgacgcataaggcacgtgatttctgcatttccaactgagctacctggttcatctcactgggactagttggacagtgggtgcagcccatggagggaaagccaaagcagggtggggcatcgcctcacctgggaagcacaagcggtcagggtatttccctcccctagccaagggaagccatgaggggctgtgccatgaggaacagtgacttctggcccagatattgcgcttttcccatggtctttgcaacccgcagaccaggagattctctcagtgcctacgccaacagggttctgggtttcaagcacaaaattgggtggctgtttgggcagacacgaagctagctgcagaagtttttttttttttcatacccagtggcacctggaaatgccagtgagacagaacacattcactcccttggaaagggggttgaagccagggagccaagtggtctggctcggcggatcccacccccagggagcccagcaagctaagatccactggcttgaaattcttgctaccagcacagcagtctgaggtccacctgggacactcgagcttggtggagagaggggcatccaccattgctgaggcttgagtaggcagttttaccctcacagtgtaaacaaagctgccaggaagttcgaactgggcagagcccaccacagctcagcaaggctgctgcggccagactgcctctctagattcctcctctctgggcagggcatctctgaaagaaaggcagtagccccagtcaggagcttacagataaaaatcccatcaccctgggacacagcacctgggggaaggggcagttgtgggtgcagcttcagcagacttaaatgtccctgcctgacagctctgaagacagcagtgtatctcccagcacagcattcgagctctgataagggtcagactgcctcctcaagtgggtccctgacccccatgtatcctgactgggagacacctttcagtaggggctgacagacacctcatacagaagagctctggcaggcatctgacaggtgcccctctgggaagaagcttccagaggaaggaacaggcagcaatctttgctgttctgaagcctctgctggtgatacccaggcaaacagtgtctggagtggacctccagcaaactctagcagacctgcagcaaaagggcctgactgttacaaggaaaactaacaaacagaaaggaatagcatcaacatcaacaaaaaggaaatccattcagagaccccatctgaaggtcaccaacacaaagaccaaaggtagataaatccacgaagatagggagaaaccagcgcaaaaaggctgaaaattccaaaaaccagaatgcctcttctcctccaaaggatcacaactcctcaccagcaagggaacagaactggacagagaatgagtttgacgaattgacagagttggcttcagaaggtgtgtaataacaaacccctctgagctaaaggagtgtgttctaacccaattcaaggaagctaagaacattgaaaaaaggttagacaaatggctaactagaataaccactttagagaagaacataaatgacctcatggagctgaaaaacacagcacgagaacttcgtgaagcatacacaagtatcaatagccaaaatgatcaagtggaagaaaggatatcagagaatgaagatcaatttaatgaaataaagtgagaggacaagattagataaaaaagaatgaaaagaaacaaagcctccaagaaacatgggactatgtgcaaagaccaaatctctgcttgattagcatacctgaaagtgacggggagaatggaaccaagttggaaaacactctttaggatattatccaggagaacttccccaacctagcaagacaggccaacattcaaattcaggaaatacagagaacaccacaaagatactcctcgagaagagcaaccccaagacacataattgtcagattcaccaaggttgaaatgatggaaaaaatattaagggcagcgagagagaagggtcgggttacccaccaaagggaagcccatcagactaacagcagatctctcagcagaaaccctacaatccagaagagagtggaggccaatataaagcattcttaaagaaaagaatttt

SEQ ID NO: 24641 - DNA, 2300 bp, Homo sapien
acctaatcatctcccaaaggctctatctcctaataccatcaccttgggggttaggatttcaacctacggatttgggggggacacagacattcagaccacagtacttaccatctttgtactcccagcacctagcatagtacctagcacatatagtagctgctcactaactgttgaatgaaatatgaataaacacagacatgaacagcaggagtcatggtcaaaggtatagtgagtggaagatgttatgcctgtagatgggccatttctgtgagaagtataacacagtggactggggccagtggtgcaaatttccagcttgagaccccattggaattgctactacttggtactttttatagtctgaaatttttcccagtaaatttttgatattttccccattgcctgccagtgtttgccacgtccatacccacagttccctgttttcagttgtgagtaaatgcttcattacaacacccttaacctgtctcagagccaaggctgcaaataaggcatatacctgaatatacgatggcctttactgcaaggtggtctcctgctttcctaatgagagatccaaaaaaaggtttcgggccaacttaactacacagacttttaggaatgtagttaagtagttatgtgtctatttacactgtttaatttgttacttgattaagttatgcatgcatctttgaaatacgtgttgtctaaaataatacattagcttcttcacttatgtgttttaaaatgatttcaatttaatactttcataagaatcttaagtcatttaacacagtttttcagagtatatcatcttcacttccatttaaattgtttgaaatatagtattttttgaatctgtggacaatgctgccactgaaatatttatcacaaaccacaagtcccattcattcaacactaggataattgttttttacgcattctttagtgtagtttcatgaatcccacaatgtaactatatacagtatattaaattggtcataaaaaggcttctttacaaaaacaaataatactaacaaatgtgaagttgcattccccacaagattggatactaaatcttctaaaaatttacttgccatgattttttatttaatagctcaatcaagataacttttataagcattccacactatcattgattatggctgtttcaagctagtatgtcctcctcaaatagcacctcataactgaataagggaattaaaagagcaccccataatataaggaattttgtaaattcttgactataaagcaacttccactcatattcagtaatatgggagggaaaccacctcttatatttggaaaagtactataaatttatttccttctaactttttattttaaaaaaataaacattttcttctctagaccaaaactgtataatgattagaaaagaaaactgaatcaaagggttatataatattaaggacttattaaaatatggttggattaacacacaactgtgtagtttacggtcattaagaagtgatggatatatttttatgtcaagttagaaggaggccttatgtgtacgtttgtatgtttgagtgtatgtgtatatgtaatgccataattacgggtctgtctctagtaattagaaagttggatatgccgaagagcaagtagattagtttaattggagtaagtggactaagttggaagaaggaaacaacttgaatttgacgtatgattttgatagcaaaggacatcaatgtgattgggtacacttcgtagtttattctattttaaaactgtaaagcttctcagttttcaacattaaatatacaagttcacatatttacatatgtttcaggctacattattggaattttgaagtcatgaaaacatcagatgaaccaacctgcaacaccttggattcagattggaagataaagagaaagtttaaagaatgtggcctataaaggcgggtacctggaaatattaaccgactcacactgtaaaaatgagaccagtttctaaacaatagagattgtcttagtacaacatcaaggttcaagacaaatgttgaactaaaaactttacactccccacccccacttcagacaggtaccagcattggtgaattatgattttccttagtcagaagcactcatttttacccatgtagaccatccttaggaattaaatattggttatttaatgtagattataatgggaagctgatttttttcacaatggcatatttcaaggacttggttccaaactgagctgaagcttcccaatgcgttttgtacagtctgggaaaaactgtgctgcac

SEQ ID NO: 24642 - DNA, 2300 bp, Homo sapien
cttgtgttattctattaggtgaaaacaagaagaatataaaattatattcatattactgttacaactatggaaacatttctgtgtatttggatgaagcctcaatggtgacatgataaaatgtaaagttttttaggatagcatggcatagcatagcccaaaatgtttgagttattttagattttcagtgacactggtgttgttcattatgccatatatgtgtttagtatttttaaataaaactaaaaatgtgtattcttaaaataataaaatatttgtcaaatgcatgtattacataaaacaatggatttacaacagggaaagactatttacaaaaaagtgattataggttccttttcaatagatgtggttttcaccctatctacctcaccccttgtgcatctggatcaccaggggtgatttcaaagaatactactgcgcaggctgtaccccgagagatgagttttcagcgggtctgggttagggcccaggtattggtttgtttttgtttttttaatttctccagataattctgttgtgcagcttgggttgaacatcacaaaaacagttataaataagtgaaattttatcttttcagatattaaattcccagaattttcatccctagtgtaaggcttttaagaataagaatgctatgtaagactggtctaatttaaaaaatcataagtacaaagtatctttacgcaatcagaatggtaaagattcttaactattgtttttattcattgtcaaaaataatgataaatagagtattggtgagagaaatgagcactgtcttccactgcttataggaatgtaaaaacttcacaggagggtagtttgacaatatgtattcaaagcttctaaaatatgtaaacccttttgtccctggaatttcacttttaagaatttatccttagaaaataattaggtgaactggcaaagaagtgttaataagaataattgtcatagcgttgcttacaatagtaaaagattggaaataataaaaaaactcatgactgtggattgattaaagtacagtatatcatacatgatactaataaaatggttctgtagctatatataagctaacatggaatgataatcacaatatattgataaataaaaaagctacaaaataacattatagcatgattctatttttaaaaaatatatgtaacatatatatgcatatgtgtatatatatatgcatgcctgcatatgtatagacatgcaggtagaaaaagcccagaaagctataaactaaaatgttaatagttaatcttcacaggtactttttattttctgccttatatttttatgtgcattctacttttgtgggtttcttttcactaaaaggaagtagtagttttataaataaagacaaataacttttttaatgaaaaaaatttttaaaataaaactactgcttttatctacccaattgaatgaagaacgtggattctcccatcttcccctttcacttgtctgcctgtgaaaaacaagctatttgatagtcagcaacagctatttctttttttaaaacccccacctctcctgccaccacaactcaccagctatttctcaataaaacgtcttcaatatatttattttcaaaagcatacattctaaacttaagtcccattaacagatgtcaagtgatctgattacaattaatctagttacaatcaatgaaggtgccatggaacaaataaatttaaatttatgttaatgcatttttatgcctagtctcacataacattcatgattaataactgggttttgtgtttttttttttttcattttaggcggttcaggaccatcatcctccatagccatagcgggcaccaaccaccctgccatcacaaagacaacatctgttcttcaagatggcgtcatagtcaccactgcagctggaaacccactgcagagtcagctacccattgggagtgattttccttttgttggccaggagcacgcacttcattttccatccaacagcacttcaaacaaccatcttccacaccccttgaaccccagcctcctcagttctctacctatctctttgccagtgaatcaacagcatctcctaaaccagaatctattaaatatcctccagccttcagcaggagaaggcaagtctgagatcaacctccaccctttaggttttctcaacccgaatgtaaacgctgctttagcttttctctccagtgacatggatgggcaggtattgcagcctgttcactttcagctcttagcagccttgcttcagaaccaagcccaagcagctgccatgcttcccc

SEQ ID NO: 24643 - DNA, 2300 bp, Homo sapien
aatttaaatttatgttaatgcatttttatgcctagtctcacataacattcatgattaataactgggttttgtgtttttttttttttcattttaggcggttcaggaccatcatcctccatagccatagcgggcaccaaccaccctgccatcacaaagacaacatctgttcttcaagatggcgtcatagtcaccactgcagctggaaacccactgcagagtcagctacccattgggagtgattttccttttgttggccaggagcacgcacttcattttccatccaacagcacttcaaacaaccatcttccacaccccttgaaccccagcctcctcagttctctacctatctctttgccagtgaatcaacagcatctcctaaaccagaatctattaaatatcctccagccttcagcaggagaaggcaagtctgagatcaacctccaccctttaggttttctcaacccgaatgtaaacgctgctttagcttttctctccagtgacatggatgggcaggtattgcagcctgttcactttcagctcttagcagccttgcttcagaaccaagcccaagcagctgccatgcttcccctgccatctttcaatctgaccatctcagatcttttgcaacagcaaaatacccctttaccctcattaacacagatgacagccccaccagaccatttgccaagcaatcagtcagacaacagccgagctgagacccttttaaccagccccctggggaaccctttaccaagctttgcaggcagtgacactacttttaaccccctgttcctcccagctgtcaatggggcctcaggattaatgaccttgaatccccagctgttgggaggtgtcctgaactcggcatcggccaacaccgctaatcatccagaggtttccatagcaacctcctcccaggcaaccactaccacaaccactacatcatcagcagtggcagcactgactgtctcaacacttggtgggacagcagtggtgtcaatggcagaaacattgctgaatatatctaataatgctgggaatacacctggtccagctaaactcaacagtaactctgtggtgccacagctacttaaccctctactggggacaggtctacttggtaagttaaattttttcacaaattttttacaaaagaaacgtttttctaattctattttctcctttttaaaaactccattttgtcacactatttttaaaaatgtttttgttatgtcacagcttgcttaaggaactaaatataacaacacccacacacaaccatagttatacaaacatgagtgactttttcctctttcccctattctagcaatactaaatatcattttaatctgctttctcttctaattctgatgccacctaaacctaacctacccatcacctcttaaaccaagtagagtctcatttttcaaataataaagcacaggtacatcttaaaaatcacttttatttgaattttagttggtgtggcatcacagggttagtatgagcagctgcactgtggatggaaacagattgagaaagtgttttccaggtgaaccctaaataaacaaaactaaatgcttgtctagcaaaacaagaaacaagatgtaaaaacacgcaaagctaaagttttcccaagttcaagggaacagacagcccctctagctgctactagatttcctcagtcagtattaattttttgacttttgtggcttaaaaatacagtttttcatctgtattatcctatcacaaaatagttcgaaaataatgccaggtatatttaactgatggatataggtaactataatataaagtgtggggatggtgtccataaagtctagaaacagggaaatgtacatcatgatgtcaatggcatcttcaaggtgtaaaaaatttgtttattatttatgtgtttttgattttatgaatgcctttataatatagtataattagttctatttggcattgaaatctttgtagttaaataaactacgaagcattacagatttacatgtttcaagttacaagacaatttctatgacattctcctcaagaaaatgtcagagtaatttcaaaataattttgaattttgaatataaatttaattattaatcctactgattatataatatttattttgaatgattatgacaatgaattcttttgtgttgttagctttcttttccatgttaattttaggtgaccaaccttctactgcaaaacaaaatgcacgtttctaaaccaaatcgatgatttgatttggtatctattgatgattatggcttgagaactaaattttg

SEQ ID NO: 24644 - DNA, 2300 bp, Homo sapien
agtaggctaaggattgaacatgcaatagaatgaagaagatgggaagaatggtcagtgaggaggaggagaatcagggaaagtagacagagtctcagaagtcaaagactgataaaatgatcaacagaggtgcagtaagacaagaactgaaaaatccccatcagattgggcaatttgaaggtcactggtaaacttcagtgagaacagtttccagtagagtgatgggtatacacacaaaatggctattaaataagaataaggaaatagggagaggagatgtagattatttactcttctttctacccataatgtgaaaaattcctgaaaaataacgaagaaagaatttttaaaatgacaaagatttgactacttttgtagactgaggggaagaagaaaagaggaaaaggctgaaaaaggaaggtgtcatttggagcaagataattaagaggttggtttttcacctggactcaagtcctgtttctaccacttcatagctgtgtgttcgtaatctccctgggcctaaattcttcatttctaaaatgggcataatcctattttaggattgttataacatagataatatagagagagcctcagcacagtacttggcacatggcatttagtaaatagctatttttcttataaagatacaggtgaaagaaagaaaattatctgttatttttgccagttgaaacattctaccaccatattagatgtttggtattttatatagtcattttaatcctcagtatcctcaatcaaactgtacaacaaataaatatctttaaacatatgttctaattatatcctagtagtaacatatttatttaatacattacttagggcaattttgtacttaaaagcagaaatagctttattaaagaaaaattccacagcttttacatatgttatagttttcatttaagcgaggagcaaatcttctgtctatatgtacgtatacatttcttgggaaacctgattttttgtgaagctggaaaacaataaagtgattaagtaaatcacattttcactttaaaaccaaggaatgatacttaccatgttaaatttcctgagatctgcatacattccccatggattcagtttcagagctcagggtttttgacttttaggtctcacccaaatttgttacatactgtatgaagtgagtcacttaaactctgaactgacagtgtagaacaacttgcaatttctcatttcccttctatttcttgtactactcatagaggtgtacctggctttttaaaaaattagtgaagataaagataatgtgtgacagtgtaggcaatgaagttgagaagtggcaattatctccattaataattagaaatgtgattatatgaacatctattacttaatcaagtaggttttagagtgtccattagtaaaaatgtttattattaaatgtcagcagggaatagaaaatagtagaagaaactccacagggaggccctctggactgaaagactgaattttgactaattgttcatttcttgaattcatagagctttttcttcctcttttaagttcattcttccctgacctgaccagtagctggtctgcagatatgacatctgggagagtctctctttacctctcaaatctcatgatatatacaaataatttcatgccccacatctatgtatttattttctcttccaaaagtagtcatttctccctctattaactactaagttgtgttaaaggtgaaacattatactaatttagcttgaattaatgcaaggtgtttacaaatattttaaatatcttgaagaatgagatgacaaaactcatgaaattgttttttccaacaagtaatgctgaatcgtttttgtgcttgaatggtaattgttattgcaatttttcatggttaggtaaaaatcttttacccatgactatcacttttgaaaactatagtcaaatatccattttcttcattacaaaattagaattaatttcaccaattcttaaaaagtcatgaagtatcacatacaaacagttgtcataatacctattccatcaaattattgtaaggattaaatgagataatgtatatagagttttaatacaatacttgggccgggcgcggtggctcacgcctgtaatcccagcactttgggaggccgaggcgggcagatcacgaggtcaggagatcgagaccatcctggctaacacggtgaaaccccgtctctactaaaaatacaaaaaattagccgggcgcggtggcgggtgcctgtagtcccagctactcgagggggctgagacaggagaatggcgtgaacccg

SEQ ID NO: 24645 - DNA, 2300 bp, Homo sapien
tctgatgctcagttttcttattggtaaaattatattttttcataaaattataataagaattaagtggaattcaactagttgagataatatatataacatgttactacaatggatggtatattacacatacttgatatttccttttctgagagaaacagtaaaactaaacatagggactagaagaaagctatcctttctgaacctgaggagggctgggcatccagatgaaagctctggatgactcatttcttcaactattgcttttttcttccctttcaggcttgaacccagtgctgaccccctcccaagaacttcttgttcttgcttccagaggattggaactgttccaggggtagcacttagagagcaggacatgcccataagcttgaggaaggtactgcttacaagaaatgagtcacagcaactccattgcttccaacaacaaagtggatgaaaaacactcaagccccactaaacaatactcggagttttgctgcgacagactggttagactatttggacactaccatgaagactatatccaccattctgccttcaaaggaggagactgcagagagaaaaggggaagaggaacaggaggaaaaagggggaggggaggaagtggaggaggggaagaaggacgtaatagaggaagagatatagttttattgtcacatagaaatgacagtaggaatcaattttttcactgttggtctttaggaaatcatctgactttctctgagttagagtatgatcgattattagaaaatggtaaaatgtgttaaaaactctctttgtacggttttgtgagaaatgtgtaatgcttaaagactaaccaagagcctcttggctaaaccaggttgatgtcaacaatagctagtacttatttgagtcaccttgattttccctcctcttgagaactttctctaaccagtttaggctgcagtcatgcctcctttcctttctctgaactctcacaattattgcctagatctcgtttggtaattaatcatgtgctacttactgcctgtgtcatctcttgtattgttttcttaaaatatttacacttttttttcggttgtcacttatctttccagctgtcattttcttcaactatttacgtctctgttactcatctttccagccatcctggcatcccattaaggtgaaagctctctgaggcaggaaccttttctcagatttcttcgagtcttccacagcaccccacatttgacacacatctgctacttcgcaaatgtgtgctgccttggctaaatttttagaagctgaacttttaggaaagctactatttttgaactcagaaaaatacctaccatccactaaacagctgtaccgaagtttgggtgacagggaacctaagttcacttgttgcatctggcagcctcaaaccatgaaccctcactgcaaagcgaggatgaacgcgctgctgcaccttggagagctctttcggacaggtacggaggggagggcgtagaagagggctggcaccagcagcgcggtccagtcctccgaacggactgatgggactgatgggagagacctcttgcacctctcggggatgtgcgcctcggaggatgcgaattagcttgcgcacagggcgccttggggatagcgctgtccaagtacaggcttgggtgatggctggtggggtccgggtcgacattttcccttcccgctcccggacttctgcacacacgcgctgctcggcgcagccgtctttgcccggcgccttcctccgggacacccagcgagaggggtgaccgggcggcggcgggagaggcgcacgctcccgggcgcgggcgaacttgcgcacctggcacctgccacacagcgaaagcaccggccagcgagcggaggggcgccgcccccgccccctctccccggagcggaccgagaccgagcacgctcccgcgggccggcagcgccgcggagagagtgggtgggcaggcgagggaggggaagggagaggaaggagggagggagggagagggcgaggcgcgttcccgcgacgggggcgcgctctcgcgcgggctgccgggatcgctcgccgccgctgtggtaatgtccgccatgttggccatggcgcagggagcggatcgggcgggcgagcggcggatctagtgtgtggaggcggccgcgggcgcggggggctgttttcgggcggggtgggcgcccatgctgtggccgggggcagtgaggaggaggaggagcgggccggccgcgctgcactgaggaaggaggtggaggaggcggcgggagtcctccccccctccccgccc

SEQ ID NO: 24646 - DNA, 2300 bp, Homo sapien
ggacatttcacgtggtatgaatgtaggatattcatttacacatcgctgcacagacagcctctatataaccaacctgttggttattgatatctcttttactgccttactctaaatcttgtcatgtaatttcaacacataatttgtggcactttagtttttttaccctttatagtttaataacttatacatgtacatgcttaaaatgtcaaacaatacaaatgggaacaaagaaaattgcttcaccatctgtgaacccctccttttgtagtccccttaaccagaaatagagattactagttttaagtattctttcaaaaatatcctgtgcatttacaaacacatgcatatatatccaaccttgtcctttttaaaacacatatattagtgcgctatatatactattcctccccttagcttttttcatttaatatttatgaagatcagtttcattctatgtcagtatacatgggtcaatgtctttttcagaccttcagtctatatattccatgtatgtgtaaactatcatttatctaatcctacacacattgtttgttttgtattttttacttcttgcagtgtcataactaataccctgtgtacatatctttgtttctgtgtatgtttatatgtaagatgaatcctagaaatagagttgccaagttcaagaggatacatttttaatgaaactaaataccagtttataattgcctacacacatggtttgaaagggctttcttctgctgctctttctagagtagcatattatcaagttttagatctttgctgagtgaaacctattgtcttattattgtatatttatcaatctatcactgaagttacactttttttatgtttaaaagtcattgacatttattcttggctgggtgtgtggtggctcatgcctgtaatcccagcagtttggaaggccgaggcagacagatcgcttgagcccaggagttgcagacagatcgcttgagcccaggagttccagacaagcctgggcaacatggggaaaccccatccctacaaaaaatgcaatattagctgggtgtggttgtgcacacctgtagtcccaactttacttgggagactgaggtgggagaattgcttgagcccaggagacagagattgcagtgagcaagatcgtgccattgcactatagcctgggcaacagacaaaatgagaccttgcctcaaaaaaaaaaaaaaaagaaaaatcattgatatttattctctactaaaataccaattcacatcatttgccaatatttgttgagttactagtttttttctaatttgcaagaaatctttaagaaaatcagccttttatttatatagtacatctttttctttttgttctttgtcttgacttaaagttttctaagtagaaatttaaaaagtttatatagtcaaatcaatctatttttaatcagtgttatggcttctgagttgctgcccgtgcaacattcccaccctgtatgttcctctagtatttttatgtgttttactttttaccattaaattttgttgaatatgtcacttactggtgttagaagtagggtaggaattcagcttaatttttttaagataactagtctgttatgccaacactctttttttttcattagatacctgttttatcctcagtaatttgaaacatcatttccattatactctgttcttgagcttgtttctcaattcttaattttggcaaagtttctcattatgccaccaaactaccatgtcaacatgtatatgtcatcttttttatagctgctattttatattctgttatacattttcaaaataagatatttcttaacgtttttactgtttaaatcatatataaagcaaaattttattttttcttccactgtgcagtaagtctctgaaattaattgtggataccttctcctgagctcccctttagtcagtgcactgtaatttagaggtagtctgcagtcaaatatgatgaacaatgtataatttcataatttctcctgagtttgaagaatttttctttcttttctagcttttaatctagacaacgagcaaccagattatgatatggattcagaagatgagactttattaaatagacttaacagaaagatggaaattaagcctttgcaatttgaaattatgattgacagacttgaaaaagccagttctaatcaggtactgtaccatgtaaagatgtctcttatcttctagttaacccaatttgcacctttataagacctgagtgtgttgcattttactgtttcttggatttcttttcctgacatcctggaatttctg

SEQ ID NO: 24647 - DNA, 2300 bp, Homo sapien
caaacattgatctattgacttttgataacttctaaatggaatgcctcttttgtctaggtattgtccccagtatcagaaccggaagaagaaaatgatcctgatggtccctgtgctttcagaaggcgggcaggatgccagtattatgctgtaagaacttttgtgtgtgtgtggtgtttttgtgaactggaattaacaggtaacccatgtcaagatgacttagtcttgatctaaaaatgggaaatgcatcagtactttttatttaacatcctttatgtggatactggtaaaagatgctaaaaggtactgagtcctttcaaagggcgtcggaatcctcttcttggaaattgataattcctcacattttagaaatttaggttcattttgggctctaattatagcttcagcagctgtgaaaattactcagtgtgtcattactagaattaggtaaacccagaatttgtaagttggttctagaacctttgatggctgctaggtgtttattgaaatttattgttatgcaagcccatcttgtgcatacataccagtaagtatcaaacaaaataataattttgtttgatacttccataatggcaatgttttgtctaataattgtattcataactttttgacacacctagaagttgctttatgctatgaagtcgcattatatcactctccaaggttctcaatgagatataatgtagcattgtgaggatggctttgactttcttatatggcttgtagagatcatttatcttgctatataatggtaagcatacactgacagcttttttagagtgtgtaaatttaggagaggtggagatttgtttactagttatgttgatgagagaagggaaaattcttaacgaaaggggacagacagcatgataaaatgatgaagggaatgggaaggcagggaacagcttgtttgtttctttatatttatttatttacttatttatttcttttagagacagggtcttgctctgtcaccaaggctggagtgcaatggtgcaatcatacagttcaccgtaacttcaaactcctgggctccagtagtccgcccacctcagcctcctgggattacaggcgcataccactacatgctgctaatttttgtaatttttgtagagatagggtcttgctacgttgcccaggctggtcttgaactcctggtctctagtgatcctcctgtcttggcctcctaaagtgctaggattacaggcatgaaccactgcatcctgcttggatgtgtgtttcttaaaagtaaagaggaagcttcagtttgaccccatagtgtttgaagtgcaatttttagtccaaaaaatattctttctggtttctcagtaggaagcctacaaattactatgtaatttcaccatctctactttgtacacaaatgttaaaagctgcattatttttaactatatattcctttttaagtataatagaccctaaatgaatttatatttacaaactaaattcagttttggtaatcttggtgagtgaacttttgattcaattttgtaaaatttaacctgattaatagtcaatgaagccccacttttacagttttatatctagattttaattgttctgctaatgttgcagttacttcatgtttatcatgatctaacctgtcttcatttcagatttactccatgagttttttgttttttgttttttctttctttgcagcctcgtttggaccaagctaaccattcatgtgaaaattcagaattggcagatttggataagttgaggtataggcattgccttacaacacttacagtcccaagaagatgtataggatttgcaaggaggcgaattggcagaggtggaaggtgaagtatttgttttcacctggtttttgtttgctatctggaacagaagacaaagagaacatgttcagctctctcagttaatatttggttttattttgcttttcagggtcataatggaccgaatatccacagaacatgacccagtcctgaaacagatagaccctgaaatgctgaatagtttttcaagctcttcccaaactatagacttttcttctaatttctctcggaccaatgcttccagtaaacattgtgaaaatagactgtctctttctgaaatattaagcaatatcagatcatgtcgactacagtgtttccagccaaggctactaaatttacaggacagtgatagtgaagaatgtacctcaagaaaaccagggcagactgtgaacaataaaagagtttctgcagcatctgtagctttattgaacaccagcaagaatggcatatcaggtaagc

SEQ ID NO: 24648 - DNA, 2300 bp, Homo sapien
aggccagaacatccaagatcaaggcaccagcagatttggtgtctggtgagggcttgcttcctcaaacacagcgccttctgtctgtgttctcatatgatacaaggggcaaacaaactctcttatgcttattttataagcacactaatcccattcataagtactccacttccatgacctaatcacctcctaaaggccccagccctaacagtatcacctggggattaggtttcaaatatgaattttagggggatgcagacattcgcattatagcaccgaggactgacagctcttgtcaatggcattccaactcccttatgaatattcctgatgaacagaacggcagatggttttcatctatttatttttcacctggtcaccttattgaactctcatattaattctatttgtctttcagctaactctctgtgatttgcagtggtgatggaggtaatcatctttcccgcaattatgcataatctggcttccattttttccatagctgtgcctcccatttctgtttgctaccttagcacaccagctataatttatggaataataaaaatggaattgggttttccaatggttctcaacaggataaatatgacatcagagaatataggggcagagtaagtggtggagaagaaattacagtcatttaggtgtgatgtcatgatggcttagtctggtatgattgctcaggacataaaaaggggggatatacgggaaagatgctttagataaagaaattactagacttgtgatgtgggtgagcaataaaataaatacatcttccccaaaacccactgctatactgatggtaacaatttgtaacagatgttagtatccgttgaaaacatatggctggtcatcaacaggaggtaagaggaagtaaatgaatcacaagtctcagtttttgagagtattagtatatatatataaaatcaaatctccatggtgtgtgtgtgtgtgtgtgtgtgtgtgtatatacatatacatatatatatttatttatttataatctccatggttcattcttcacttcctgagctattcagtcccattcctctctgcctgctccagactcaaatcttctgtttttttccacaaaacccactcagggcctttgtgcattctgttacctgttcttctaccaatcttggtttaatggccctagttcagggagtcctagatttcttcagctcttggaccagtaccagtggtgtcttttagcattctgcacccttctttccaaagtactcaccacagttgcgatatctgccacaggtccactcctccggatatttgtgtcattgtgtaatgtctgtttccctcactggaccatcagctccagaagggcatggagcaaggctgtattagtttctgccatatcccttgtgcctagtacagagcctggcatacagtacataatccataaatgcttgttgaatgtactcattcaaaaacctatcttaaataattagcacttacacagtgattttctagcttatatacagtaacatttcatgtctgctgtgcctcacctggtcctgtgcatcaactctgtgaaaaatacagatatgggacatttagctgatgtcttatggatgtatggtattttcacctgtgtcatctcacttagtgctcactgagacccttgcagtttatagcccagcagccctaagctctgaatatgacatgctccttacacatgtgggtccttgtctctgccgagcatgtcccaccattgcagatgtcattgtgccccacccagacagcctttcccagcctgtgcacctctcccctagctgctgggagcattgactgttaacagctcctagccgctcccttctctagagaattgtcctccaccaaagagcatagaatgaagtatcccacctgggagggggcagcacatagtccatgactgactgacacaggggtacagaaagccatcacttggcctcgaggagattgctatggtttgaatgtgtcccctccaaaattcatgtgtcgaaacttaatccccattgtagtggtattaagaggtggggcctttgggatgtgatgaagtcataagggttgtgccttcataaatggattagtgcctgtgaaagagctcaaggttgaagggatcaccctctcgcacttttgccatatgaggacacagcattcacccccctttctttgcctttccatcccttctgccatgtggggacacagcaagaaggcccttaccagacacaaaacctgccagtgccttgatcttggacttcctagcctccacaactataagaaatgaa

SEQ ID NO: 24649 - DNA, 2300 bp, Homo sapien
aattttgatgtagttaaatttatctgttttttcttctgttacctatcttttttttttttttccctgagatggagactcactctgtcgcccaggttggagtgcagaggcacaatcctggctcactgcaatctctgcctcctgggttcaagcgattcttctgcctcagtcgccagattagctggaattacaggcacgtgccaccatgcctggctaatttttgtattcttagtagagaccaggtttcaccaggttggtcaggctggtctcaaactcctgacctcaagtgatccacccatctcagcctcccaaagtgctgggattaacatgcgtgagccacggcgcccggcctgttacctatcttttggtgtcccttttcaattgttttgaatcctacttagcccatttcctatattaagccttctcagacaacactgagaacttcatcctctgtactcccactagtttctaagctgcctgagggcgatgacttattttgcaacctcccttcaaatgagaggccctacgttatctcccttgaaaagggttcacttaataaatctaagtttacagagtgacagcaaatgccatttgctcagttaatagctgatgaatgaacagatgaacgaatgaatgatgactgaacacagtgacacacagatacgtctctgtccacttgagataatcctgacctcctcagataaaccagtgtatgcaaggttctgggcatcttctggtgggctcagggaaactgagaattggattgtcctctctagtatattatgaagttgatcatttaagatgatgggtctctgagccagagcctgagaattacttaatttaaaaacagatgagaaggtggcacctgggtctttttaatctacttccactgcacatgaggagatgaaatagaactggtactacttacaagggtttataaaagttgattttagtaggtctgtcctctcagctaggcagagaacacttgtattttcaggtattacccgaatttaagcaacagatgtgttcctaaaattaactaacttatttgttttatgatcatttgttcagcacccaataacatctaactttcaagagcttatcctatatacatgtcaggcaccgtgctaggtgctttaaaagcatctgtcttttaattcccccagaaatcacaagatgatattattccaatgacagagatgaggaaactgagtcttaaggaaattaagacttcttaatttcctccgctcttaatttcctccgcctgttggtcatacatctaataagtggctgaggtgggattcacactcatgcattgcttcttcctagggtagaatccttattcagtatgctgcccactatgtgctagatgctacagacacaaagatatcaagcagatatcaccacccaagtgcagtgctagagacaggcacagcagattaggggaacatcaaggagggccaccaactctttataggtgtttagtgagctgggaaagtctgaggaaggagggttgagctaggtcttagaggaaaaggaagttctggaaaaatagagtggacactcagttgttctgccagcccggcaccatgtctgggaataccatccctcttcttttgggaaccttcccaccaagggattcctccataatcttacaaaatccctgattctggttgattggtttagcactagatgccaacctaaaccaaggccaatcaaacccaaactctgaacagacatccatccttatctagtggtagaagttgaaggatgaaacccaggggctattgggagctgtttcccaagtgattttcttttgggatcaggatgatccagacccagttatctagagattttaaccggaaatattggatatgacctccatccggttccggcttgggcagccagaccggacttgcaggctcttggaggtcgcatcctgtccttcccccggcaggtagagtgactacaagtcccgggatgcgcagcgctcggagtcgggcgggggccgggcggacctctacggtgacgtcaccgtcccggggcgggccaggggagggcggggcggaggggcgggtctcaaggcggcagagcgcgctggtgctgatgcaggatggctgagcgcgcaggagcccgggaggtctgagccgggcgaggctcgctccctgcgcatcgcctcctccgcccgccgcgtggtcgcgggcaggtgggccggggggcgctgggcaggggcggggcagggccagggcaggccggtctgcagccggaggggccggagcggagaagctgcccaccttcccggg

SEQ ID NO: 24650 - DNA, 2300 bp, Homo sapien
aaaaaagcaaattttacattttctaagcagattcctaccccagcttcaaagtaagaatcaaattgtccctctgcctgaggtttccctgaatagaatcgaatgtgctttctctgtttggctccacccatgttttctttccacttgtctttgggcactgatacgaagcgatttttttaaatttgctttcccccaattggacttaggttattgatagcggggatcttgtcttatcatagtaaatccatgatgcttaggactgagcttagcacacaatagactctccatatatcaaagtgaaactgaaataaaggcaaaaaaaaaaatcagaatatcacatctaaatgttagagccgtgctgtccaagaaaaatacaatgccaaccacaaatgtgagccacacatgtaattttaaattttctagcagcctcattaaaagaagtacaaagaaagaggtgaaattcattttattaataacttacttaacctaacatatccaaaatactatcatttcaacatgtaatgaatatttttaaatattagtaaaatattttactttttgtgtactaagtctttgaaatttgatggctattttatacctactgcttatcccaatttgactacctacattacaggtgcccagtagtcacgtgcagctaccatttggacagcgcaatgttactaaggaagtagctatcaaagaggtgtatattttccccctttcaaactcttttggataaatgtctagaccagaaaacattgtttcaaacagatcctcaagccagtctttaccaagagccatatttattaagaaaattttaaaaaacacatgagcaagcaagtgctgttactctaggatatatcctaggggagtctgggtgttttttctcccgcttgtttgaacagataattagcaggttgtgttttttagtgaagtaattaattattctggaacagctaactacttccttcccttctaaagtctactttacaacaaatatcatataaacaaacaattagtagttagagggatttgatgctatcatgatgacattagtaccagggacccagtgccagaagcctcccctaacagcctcttccatgctgggtgggcaagtctgatctacacaagaatagtgatactccaggtatccaagcaccacctaggtaggtcacccaaacctgtcatcccaatacggaacctggccaaagacccaggtgaggaggcttatgtggagtcttcccatttccttaccttcccacccaacatcctgcagcctaacctattctaaatcttaagaccagcccagttgggcctgaatctgtggagccagctgaacttatcccctcagcagcattcagagaggagagaaaaaagtcggccctggaagccatcccaggaaaccagaccctacagaggtcagcctgtcacagagggcagatgcaggaaggaactgacagcctcactcgggatcctgcccaccaggaaccaggactggaagaggtttggatactgaccagattggcatttgtccctgactatgggacaagaggtggctgtaaaaggggaacaaaagtcccttcccccatgactatccaaagtttctaatatcgatggagttgttatgtgcccagattcccaggtgaaaatcaataatctcttaggagtgaggtgccagacaggttgttcagagaaaaactatgatataatctcctcagagaattgaagccgactgcttggcaaaataagacctggaaatgggagagaccagtaaaagactaagcctgacaaaggaagagtcccaccatgtgtcaatacagaattgtgtaacgaacatcttcaaataaaatgcttctaaaatactattagtgatctgcagctcttaagaacataccctgcagccaaagatgctaaaggcataaatcaccggggtttgttttttatttgcacttttcctccaactccatctcccttcaaaagtttttctttaatgagaagaggaatatgaaacataaaaagagaactacaaacctttttcgttaaaatactgtgttgtgctgaattctgctctcacatatatgctttcttttcagctctgtggacgtattttccagcgttcagttcacatcaaggatgggtatgcactggcggaaaaggtaatatgcaatacacctagacacacttaagaggattgctccaaatgtagttgatggcgatctaataagacagggttctgaagacaaatgagacgcatttgcctgtttccctgacgcttacacaagctaaggcaaggtgaagcagca

SEQ ID NO: 24651 - DNA, 2300 bp, Homo sapien
tcgttctgccttggttcttgccctgacaaaggcaaacaaagagatgtcagcacttgtataagccaggaatcaatggggagataaatccattgaaagggaaagcatctaggaaaatagatttgagtcaattataaatgatttttggattatcaatcgttcttctctggctgtgggctactgaggagaagctaaaggattatcatgaattattaaaaagctctggagggctttggtaggggaggtcttttgattggctgagtggagtcatgacatttggccagatggaaatgatgttctcaccataggtattgtttctgccaatgatctccatggttcagagcatgtggaggtccattgtctaatttgttacacatttatgatggaatgtacagtttaaaagttatcaagatttgagattgtcagtcatttggcactgttttctttcctaagatatatattaattgtcagggatagaaatgtgtttcagtctcttcaggtgaaataaactgcaataatttcttcgtgaaaacctgctgtgagctgagtgatataatactaacatttattttagcccttctcatgtcactaagcactttatatatcctatttaacttgaattctacaataattctatgtaataaatactaaatcttgtaagcaatggagagaaatatacatgcactggccatccctatctttaggaagtatgcagtcaaactaaaaaacaagagcaatacatcaaactatttagattcttaatagataagggcattccagaggagtatccatttttccggatgagagagctttgctggaggccagactgccggacgtggtggctcatgcctgtaatcccagcactctgggaagccaaggtgggtggatcactttgagctcaggagttggagaccagccttggcaacactgcgaaacctcatctctacaaaaaatacaaaaaattagccagctgcggtggtgcacacctgtagttccagctactagggaagctgaggatcacttgagcctgggaagtggaggttgcagtcagctaagactgcaccactgcactgcagcctgggcaacagagtgagaccttgtctcaaaaaacaaaaacaaacaaacaaaaaatctggaaaatctctggatgtgttgttggcactgatcactttaaacctgcagactgtgtgtttgttcactgatggattgttgaacacatatgagaacttaagtgcttatttgacggtgggcttaggcaaaggctctctggagcttgtgtgttgctttcaatacttctggaagtcttcattaggagttgctgtcagatcctaaggcatcttttctaaaatcttcaggggtggcaaattctggaccttaaaaatggatttggtaatatccaaatagcagaagaatttacctatccctatccccacccacttaggtgaaatgagtaaagtagaaaagcggggaaagaagaatataagacgatcttaaacatggatttaggtattagaaacagctaaaaattatttggaacaatttggcctgggaaccacagatttttaaaagaagttgatgaaatgtattttcttgattgatctgttaaatgatactgaaagtgttgccagaataaggttcttagaaattttggaaaattttggaaatcagttctagaggtgatttcattaaacaagattgccttacttggaactccaggctcaggtcagtttgtaaatactcaaaacccaaacccatatattctcgttccttctcctgctcccttttcctcctcctcctcaccccacactagccacatagactctgattttgtttccttgagtggcagctggaggcaataatgtggggcctcagaacttggcagaacaagtgctcccctgctggataaacaggccaacacaatgagtttttccaccaacttctggtctgttggcaagtcaggtagatgcccaagggagctggcaggcacacgtgggtgcttcctgctccaccgggttctgtctgaggaacccagagatggttctccctctctctcatgtgtctcccagcatgctttaactgcccgtgtttgtattttcgcccactaggggaagctgcatgacccccagctcatggggatcatcccacgaattgcccatgatatctttgaccatatctactccatggatgagaacctggagtttcacataaaggtacgtattactgattggtccccagagaagacactgggccccagataacgtttcttatacctcctcctttcaagaagatataaaagatgatcc

SEQ ID NO: 24652 - DNA, 2300 bp, Homo sapien
ttccagcattttaatgttgatcagaagtgggctggctctctttgcactgctaggcagagctactgttcactgagcaggtgctttgtgctggcgctgtgctcaagcactttacgtggattatttaacttagccacacaacagtatcagaacttcttatttcagataccccttttaagcaaaaaacttcaaacagagatcttgtctgatttcatggctgcacattttccaagtaggaaaaacacacaattgaggaacatgcccaaggctgctcagcaagcacaggagagagagtggggtggggagggagagatcacgtgcaagcaagcaagcactggggcagaacctgtaccctcctgatgattctcaggcctgtctgggtggcatcacttagcaggctggcccagccaagatcacacgcacagcagcaggattttaaatcacaggggatcacatgctctactgactgaaaccaacacaaaaaaaggtctaggtccatttcatgtgagtgagacccagaggtgctcctttgctcagccctacctgctggtgcaagtggctgtcccaaagtgcaggccccaccacagctccaccctgggacaccagattccctgccaccatagagggagtagcaactgaggtagggcacacctaggtggggcatcccatataaccttttctaggttggccttgcccagtgtgacgtagccagccaggtaacaccagatctgaaatacccatatgtgcagaacccactgaaggggtggggtgtctagaccttaagagtgttgggcttgttgtcagtggaggggtggagcagtcttcttggccctgacctcaccttaatagagatcctcccattttggccttggaggtttaatatatagtcacggaagtgtactgaaatagtcataagaaggaatgttctccatacaactttaaagttgtacagtgctttctgcagtgaaatgaattttttcacggaatggatttttttaacgagtcttgaaattaacatgtgaggagcagcatgacacattacctcgtgtgtgtgtgtgtgtgtgtgtgtgtgtgtgtgtgtgtgtgtgagtgaaggccatttgttaaatggaacacctaaaaataccattgtttttgtttttgcggttgtcaggggcctcaataaatgcaagctggctcaggagatgcttgacctcagaggtctggaaagacagattagaagtctcagcagaggaccaaacccagaccccacttctgcagaagttctgtacccaggtttccccactgcaggcataaccagcagcccctcaaaggccccagaccagccaactgtctttagaaatgcagacccaggatcagctttgctaccagccatggaatcttgggtcagtggcccatactctgagctgtgtttccacagtgcaaggctggccggacagtgttttatttcagagttctcctgtctgtggcatcttcagaagttaaagatttgcttgaccactataaggtgccctgggagtgtagacctcccacatcccagctgcctggctggcagtgggtggggagtaagcagtagagagaggacaggtggcccggaatctaacagcttgcctctggattctccctagtaagcttggaatgatgctggagcagctctgggccgaggggaccagtctaacgctggacgcaaaagactgggcgccacctagtctgttcatcaggtattaaatgccctgagttttcaaagctctggtgattcagtagtggacgggtaaggttcctgcctctcctggggcttaccgtccaggggtggggaggacgtcactatatgaaattatcttatttatagcttaatgtcattatttaaaaagggggagggaatcacttgacgggtgggcaaggtggggacggggttggatggaatggtcaaaaaaggtctttcagagttcttccaatcctgaactaactcacctgcacccttggcccaatcattttcactcccgagggtctgcactcctcgtttctacattggttttctaggaagaaaggggttggaccctcccctctttaagctgggtggggtccgaatcccgtgcttctttcacttcctgagccgggctggctgggtgggaacaggctccttgccgcctccccagcgctggccactaccacactgccgcccgcctgggcctcctttcaacctcgtggtggagccctgcggtttcccagcggagccgggcccggggctgctccctcgcgggcgaggctcacctgtcccggcccggccccctcccgcgccccag

SEQ ID NO: 24653 - DNA, 2300 bp, Homo sapien
acacatttctggccaatttagacttaatgtgtatgtttgcattaaatctgttcatgtgatgaagttaaatagttcataagatactgagacaaacagcaaccaacaaatcatgcttttaaactctttaaaagttgtcaaacttctcttggagaaaagaaaaaagaaaactcatttattttttgtaagtgaaggaatagagggcagaagttagaagaacctataactaatgtgcatagtttgactatgacctgggtttgactccaggtttgtggaaaatcttaacaaaaagaaaagtataaagttggtcatatgacaatcctagttttgtttttctgtggtagatgcctaataaatgcttctgatcactaaatgtcatatattctgaaaagtaggtaagataaacagatatgtaatccatataattttaaaaacaatgttagcagaatacttttctgcttgtgttcggcagtgttggtggatgagtaaaaacatgccgagacaaaagcaaagacaaaaagcctcagaaactatggccagtgctacggctgatgaggcaggaggctgacggagtttgaggccaatctaggagagagggaggatccagaggagcgggagaatgggttttgagtttaggaacgtgaactgtcaggatttaacactggagtaatccagaggcgcgggagaatgggttttgaatatcggaaagtgaaacgtcaggatttaacactggagtaacttaatagctaccagagtagcactagagtaacttactagctttcctgcagcctggggaggtgagggctttctctcctggcatgccttatatagcagcctggacagactagattaactttgcaaatatgatccctttgtatttggaaaccttatttttatacattttgattttcttcttaaagagaatgcagcatataataagaagtgataactatagtttaaaataatttacccaggactctgagagaacagctcttggaagtgttagttttcagcctaactctagaaatctatttccaagggaatggttgacacacagaaaaagatttgtcataagatgttctgtaattcataataaagaaaaactgaaagtgagttatttgtctaacaagaagggaatggataaggaaatggtagtactatgtccattttatcagtaaaataatatttagggtatgttttcagttaggtatgaggcacagtaaaattctgtgaaaaaaagacaagaagagaatgttaatgctggttgtgtatatgtgatgaaattttaaaaaaactgttctggatctaatatatgggctataatgtggatatattaccttaaaaggtagagggaaaaaatcatcactaaaaaagaccaagagttgaaagtggatggaaaacttggttgccttcattcagtggaggttgttatgaatgttttaaacctcagctgttcaggcatttttgtaaattccttggctgtgtagtgccaaggttaagatgtgctggggttagagttggttctgtggggaggaggaggaaactcttagtagggagaagtgaaaacattcctaacccagtaggtgcagggtttgtagccccgcagccccacatgcactcctggtatttgtaatttgcagtgatgacaaactgtgcctctggccatagccgaactgctgtctgttagaatgcatggccatggacgacttggtgaccagtggcctgtaaaatgccacagaacgccctggcagctaatttttaattcccaggaagttgcttgcaactttgcaaagataaggcaaaagatcagactggggacatgcccagagcacaggcagcccccagtcaggtctttgtagaaagctctggagagcagtgaaacttactcgctttcctgcagcctggggaagtgagtgctttgttttctggcataccttaaataactgcctggacatgattgattaactctgcaaatatgatccctttgcatttgaaaaccttatttttatacattttgatttttgtttttcttaaagacaatgtggcatgtaataagtgataactataactatggtttaatttctttttgtaatttccacaggactctgctggagcaggacttcagagtgtttgttttcagcctgcttttaaagtgatttgaagagagtggctttgaaggtttccatccttactttttcatgtatagtatcttgttctttaaaattagtgagctgggcacatccacataaacacatacagttataattgccccaattttaagctcacttttgccacagtgaaaa

SEQ ID NO: 24654 - DNA, 2300 bp, Homo sapien
gcaggggtgaaacagaggatggcactcagccatgttgggcaggggtgagaaggagagggcttaaaataaataaataaataaagtgcgtctctctcttcgtgcactccaggagtgtaaatacaatgtatgttttcttcatcgcgtcactttgctccagcctgggcagcagagtgagactccgtcaaaaaaaaaaaaaaaaaaaaaaaaaaaagcttgcttctgatgtacagaaagaaggcgttgcttaattctgccccgggcagtttcgaagacttgatttttaaaaaggtggtattcgaagtgaatcttgaagcaaagataggaacttgctgttggggcaggagagagttgagaaggaagagaagcacagcattctagcactatgaaatcttagacatgggtgtgtgaaggtccacggacaggcagttgtaggtggagcagaaccatcctgcctgcggaactgtgaggacagaagatgagaccaacgtggaaagctgggaacggactgggaaggaaacgccttgccaaccaggctccatttgaacttcctcacagtggggttggaactgaagaattttaagcttgaaagtgacatgattacattagtgattctgaaatagagagggcagcgtgtggtcgactggagagcagagcagtgaaagcctgttgctgaagcgctggtaaggcatgatgaggtctggcagtgaaatagagatgctgggagggatggatctagaagtcatcctaggagacagaaacacaggactgggcgattgacaagatgtgaagggaaaagcagaaggaagatttaacattttcgctcttctgatgcctgaggagtgttgtatgttggtagtcaacattttaaaaaaatttttaaattaatattaatgttctttagaaaataccgtaaagtataaagaacaagaaaaccatccattatcccaacacgcagagataaccactgcagacatttcatatgcatatctttccagccttctttgaaaatatatttctgaaaagagatcctaagggttccatctctaccaggaactcggctctcataaactgcattaatacgttgaacttcactttgaacccaaatatgaatattttcactaaactatgcaccgattttttttaaataaagtgaataagtacatggaccggaactgccaactggaaactaaatgagtgtcagcagtgacacccgggacatgccctcattagtagatgctaacccgcagaggtaacctgcctagacacggagagacatttccaagttcaggttgattaattcatattcaattcattcaccctgctgagccctgcaggaagacagcgcggcagcgatctccaccttgagggggcgctaattattttttgcctacttgaaccctgagcttgggcaagcctgtgcacatacactaagagaaaaactttctgaggtctagcagctgtcgatcaaaaataggttatcctaggcccttccaaatagagggactggggaaggaagtttaatttaaaaaagagtaagaatgtttttatgttgggatggatagattattgggaaggcagggtgattcaggagaggcctgaaaaaatgctccaggggtagaaaatccaaggagaaggtggaggggtctcaaagatcgacaaatagccacatggcgggccgcccttacgaaggtagccttgcaggccaagttcggggggaggtggggaggctggttccgagtttccgggcatatccgtggagtccttccagaccttcctggggaccttccccggtcaccccggctccccgccggccccccgcgctgctcaggggagagtaggactatgacccacttccactctaaggctctagatcgaaccgtccaggggggtcaaacacgatttacaacaaggaagagaaaaaccaatacgtcccaagagggctgcaggggctttaactggaggaagggttgggcagagggtggcagtattatgccctggacttttttgcaccaaacccataaccggattcccacttcctaagacctgccttcctggctcttcccaccgcctccatgctccgccccgcagcttaggtcttttactgcaaacgtcaagtggtctccgccttccctgggttcggagcttcacttgctcttgagctctgcggtccggcggatttcgcggggcccaggggatggcggggagtgagatttggccagggtcatttcacactgccgggcctgcagccacgcacgcagctgctggcccggctgaggctggcggctagggagaggcgccag

SEQ ID NO: 24655 - DNA, 2300 bp, Homo sapien
aaatagagagggcagcgtgtggtcgactggagagcagagcagtgaaagcctgttgctgaagcgctggtaaggcatgatgaggtctggcagtgaaatagagatgctgggagggatggatctagaagtcatcctaggagacagaaacacaggactgggcgattgacaagatgtgaagggaaaagcagaaggaagatttaacattttcgctcttctgatgcctgaggagtgttgtatgttggtagtcaacattttaaaaaaatttttaaattaatattaatgttctttagaaaataccgtaaagtataaagaacaagaaaaccatccattatcccaacacgcagagataaccactgcagacatttcatatgcatatctttccagccttctttgaaaatatatttctgaaaagagatcctaagggttccatctctaccaggaactcggctctcataaactgcattaatacgttgaacttcactttgaacccaaatatgaatattttcactaaactatgcaccgattttttttaaataaagtgaataagtacatggaccggaactgccaactggaaactaaatgagtgtcagcagtgacacccgggacatgccctcattagtagatgctaacccgcagaggtaacctgcctagacacggagagacatttccaagttcaggttgattaattcatattcaattcattcaccctgctgagccctgcaggaagacagcgcggcagcgatctccaccttgagggggcgctaattattttttgcctacttgaaccctgagcttgggcaagcctgtgcacatacactaagagaaaaactttctgaggtctagcagctgtcgatcaaaaataggttatcctaggcccttccaaatagagggactggggaaggaagtttaatttaaaaaagagtaagaatgtttttatgttgggatggatagattattgggaaggcagggtgattcaggagaggcctgaaaaaatgctccaggggtagaaaatccaaggagaaggtggaggggtctcaaagatcgacaaatagccacatggcgggccgcccttacgaaggtagccttgcaggccaagttcggggggaggtggggaggctggttccgagtttccgggcatatccgtggagtccttccagaccttcctggggaccttccccggtcaccccggctccccgccggccccccgcgctgctcaggggagagtaggactatgacccacttccactctaaggctctagatcgaaccgtccaggggggtcaaacacgatttacaacaaggaagagaaaaaccaatacgtcccaagagggctgcaggggctttaactggaggaagggttgggcagagggtggcagtattatgccctggacttttttgcaccaaacccataaccggattcccacttcctaagacctgccttcctggctcttcccaccgcctccatgctccgccccgcagcttaggtcttttactgcaaacgtcaagtggtctccgccttccctgggttcggagcttcacttgctcttgagctctgcggtccggcggatttcgcggggcccaggggatggcggggagtgagatttggccagggtcatttcacactgccgggcctgcagccacgcacgcagctgctggcccggctgaggctggcggctagggagaggcgccagggggtcgcgcacaggaaggtatcggtgcaccctgagcaaacactgctcgcttccaacgctcactgggaacaggcttcccgggaaggtcccaaatctctccagttccgctcaccctgcgggcgggagcgcggcgcccgggtgccccacctgcgccgggcggtcggctcccgctggccggagtttgcagacttggcgctcaggccgattctcccggagttgggccgcgcgcgccgggccaatgagcgcgccccgcggagggctccgctccccccgcgcgcgctgattggtcccgcggccctcgaggccgggccggccgcggctgcgggcggcggccagtgcccggcgcgagtgggagtggcgcgcgcgcccctagccgccccccgcctctccccgctgcgctccctcgctccttccctgagctcccgggctccggcagcgggctggcggggcgccgcattgcacactctgggggcgccgcagtgttcgtgggatggggcagcgggctgcagctggcggccggaatccgcgcgcagcccgggtgagtagaggcgggcttcccgggagagcacaaaagaacaggggattggtgccagcggccccggcttaggcggggc

SEQ ID NO: 24656 - DNA, 2300 bp, Homo sapien
caacgtttatttttattattgctcctccttccctaggaaaaaaatttaatttaatttacattcttcctaatgagaaaaattaaatattaaactgataagaacagctactacacttgatcttagccaaaaggctgagaagtgaagagaaattaaatattaaggaataaaattttgacaggtagggttgagccttggaggaccacaaactatgatatctgatgtttttgttcctcaacaaccaattttaatcttgggagttcaaaaatgctgttaatggacacaccaatttagatgactaaccctggctatcagggcagagaggagagctgttgaacattctgatagatcttataaccgtatgtgtgcaactagtggaacacatgacaccgacattactctcagctcacatcaactaatgacttacaaggaagctgtgcttcagtgtgggtggctaattattcaaacttgcattctgtatgattaaaccacatggaatttcacatttgcttttgttttccatatattttatgggtcatatagattatatctccacctttcacccactgcctgccttttttattaaatgtgagctttgtataaggcttttgtctactttttgtcatagctctgggctgaacttttagattcattagtctctgatttgtggcagttacctacatttttacttacaattttagataaataaatgccggcgtgttcacaggcaggaaaacactgcattggtagataagggccattccatgctgggcttgactggttgccaccaactctgacatccctgaccccttggcagagaaagaatgtaaatgagcgagaataaagagccccaggtagcttctgtttgtttttacaagagaaccagagctaggtgatttgggagaatgccagatattataaacacagagccagagaaaaagaacaaggatggcaagaagagtccagggactgggggaggtgcacttgcagggggtggaggttggcccagaggaaggttttcattcatttctgtgtgtagaatttttaagattaacttgctaatttttttattgaagtcaagcaagattttaaatcatttatcagggctcatagagtacctatttatagaagtcagaataaaagtaaatgaaccatgaatgctaacacacatctagcaaatttagtaagatttaaaagttaaataaaccaatggagcctgcagattttctccagggcccctttacaagttttaactttgtttccattcccccccacttcattttacacactgtcatgtgtgattcttttagccttagcttttagaatacgaaaatgatttacaagcctgtttttagaggctatttcatttttagttaaacgtttacatgatgctggcttcctatgtaactgctgaaaaacaaaagttttttttttcttttttacaggtgctagactgtcaatcaggataaaggagattgtatgaattatttgttgttgcataacaaattgccacaagtaaaacaacaaacatttattatctcaaattttgtatggcttaggtgggtcctgtgcttcagggtctattacaaggctgcaatcggttgttagccaggacagggatctcatctgaaagctcaaccgggaaagatccacttccatgctcccatggttgccgcataatccagtttgttgagggcttttggactgagggcctcagttcctaactgctttggaggccaccttcagttcctggttatgtgggccttctcaacattggaacttgcctcctcaaagccagcaagagatagtctgctggaaagacatccaccatctttgctatattctgttggttagagagtcactagaacagccgacactaaagggcaggagattacacaagcgcattaacaccagatcgaggggcaccttaggatcctaggccaaggagatatgtgactccatcccaacaagccttcaggatcttagattctttgagggaagagacctttttttcgtagttaaaatatttacaaaacctttgtgaggtcatagctagcgctttgtgctgaactggattgtggagccctgggctagcactgtgcagggcatgaaagaccaaccactctgtaaatgcacataaagaacaacctccttgagcaatctcaagcaagagaaagaagaggcttccgagctccagcaaaacaatgggaaaaaacatacccttatcttttccttctcattttcaaaggtgtgttagagggaaaggaatatattctggttctggagattttcagttttctttt

SEQ ID NO: 24657 - DNA, 2300 bp, Homo sapien
ctatcccactactgaccagctgtctgctattatgtacaggaaaagaaaaaaataaatgtgcattatgaggattgcacaaacagaacctaaacggaggaagattttttaaaaaatcttaggaactcaaagaatcccaggagtaatgcagattgtggcaaaagattacaactgtattacgagcatataaaataacttcactgaggccgggtagaggtaggagggagggctgctgacttcagtaactttgaaaataagtggaatctataagattaaaagcaaaagaactatacataagcattgtactctaattggtaaatctgtttctcacaggtatacctgataacagttcagaaacaactatacatgtactctgaatacgggttgacggttctgaatccattatacacgtaacctggaattgaacaattaggtaaatggatggcagatgatgagagccaggtgtctcacactggagtggaaggctacagacaagcaaggggagaaggctgcaatgatccatatggtgctggaattgaactgaagataacagctctagtatttgaacctagaacgcctgtgtagctgtcaaagatacagatggatacatatataaatacttacagatatgcgtatttagtcaggttagcatatccacaaatatttccttgctctgtcagctgagagtgtctagaagcaacaacatcccaaatgtccaaatcttgatttctaatatcattttccattaaaagtacccttggctttttggggaagcagctgattctaggattggggcagggaatatacaagatgagcctggagcaacttatagaaattaagaaaatgctcaagaaaaaaaatcaataaacataaaacgaggagggtttgtcaaaaagacacaaatgccaactaaaggaaatctcaatagccaaagctggaaccaatatgaacaacaaaataaagtagtattggattataacccaaaatgtaaaataaatatccatgagtccatactgacataaatgattgaatacataaataaatgcagtacagacaaatctcccatgcagaagaattccaaataattcatgaagatattctgtcctcataaaggtggagtataacaatttcccattcctatagtttgggctgcacagagagatgtccttccaaatagtatagtatggagaggaaaagaaaaacagtaacttcacagtggagaaacctgacaaaccctacatagggaggtggaagggcttactagatgaaacaaaggggatctttgtagaactataaaacttttctgtatgacactgtaataatggtgataaaggttagcatcaacagtaataagtcatgttgatagtatatacccttgatgtgatgtgatgagaagatcactttaccttacctcttaactcaagaaaaacccataacctcagttaatgcatgagaaaaatacaggcaaaacccaattgaaggacatttgaccaaatgaccaataagtcgcttcaaaactattaaggttatcaaaaacaaggaaagtttgagaaacggtcacggtccagaggagcctggaagacatggtgatgtactccggacaggatcctggaatggaaaagaataccaggtcgaaaactaaggacatctggaataaaatatgggcttatgggctttaatcaatttttaaaaaagtattagatacatgaaaatgatacacgatttacaaatcaatcgcctaatatttatcgagcatattgagagcctggcactgtggtagggctggggacacagaaagaggtaagtgccctatgctcaaaaacagcgattcatgaaaaataaacaactatgacaaaaagaacagaagactgtatctcctggaggcagtaaggaaggcttaagttgggaggactatcaaacgcatcaaggagttactgaagattaactgacccgcctaacgcaggtcggaagccctcctatccatccacccaaatcacccctgccccaccttttctcctcccttgcgtttacccaatggcaggtcggctccacgtaggcctactttgcgcgtgcgcatcatcgtttcgacgcgctcggaagcaacttcctttgcctgctcaccgccagcgtaggtgctaccaccgctgccgtcgccgccgccattttgatggcaggaagagtccggttctgggacagctggagacagtggtggtgactggtacggatggtttccgcccatgttagcccctccaaatttgcccgtgttagggttacagccctcggtattgcccgtattttcactg

SEQ ID NO: 24658 - DNA, 2300 bp, Homo sapien
ttccccttgttgttcccctgatagtgagtgagttctcctgagatctggttgttgcaaaatgtgtagcacttcccttttctctctattcctcctgctccagccatgtaggacatgctggcttccactttgccttctgccatgattgttagtttcctgaggcctccccagccacgcttcctgtacagcctgtggaactgttcaccaattaaacctcttttctttgtaaattacctaatatcaggtagttctttatagcaatgtgagaatggactaatacggtaaccaaattattaagtgcagcttacctttttatagttcgtacattttaaaaataaaatactacagagccaccaattaagacctgatgtcatctaagccaagagaaaaagttttcctaatccagctagaacaaaggagcctgaacagtatgaaccaaagtatggccttggtctccaaacccacaaactgtgtttgtatatacataaccacagataagactccttttatcttaaaatctttccatgagcttttgtttttcttttttctttttttttctgagaacttctcattatttgcagctatttctaggccacagcagcactccagtagagtgttttggcaacagcccctgttgtggtcagcaactcctctgcagctgggatttcttgaaagaagtgagtagcatttgccttgtagtgctccagcaacaaaacaaggaaaacttccatgggaatcagataatcacagagccttccctctctctccccttccctttcgtcatgtgatcaaagaggtcagagccactggtgcacattttagtaagcatgccacgcagagaggctaatataggaacatagtcctaaccaccaggccctgcaacacattgtggagaactccatcaactaaagtgattgtaggactcataaccttgatgtcacgagtggaaagaaagacttgttacaggtcaagattgtatcaccctaaagtagagacatgcttcagggtggatatatacaggtttgtgcatttggtgtggagtgattcagccaaagaatttaccccaaaacaaggttatacattgaataaatatgaacatctaggtttgccttaactatagccaataacacaaagtaaaaccaaacaacaacaaaataccaaacacacaatgttttctggctaagcagaaattcatgggcagaagccaaagacaaagagacttacaaggtaaaaatcaaaaccgacaccttaaaatgtgcaagtcctgtttggctcatccaacttgaacaaagccactgtctgatatcaatctaaatatctacaacatgttttgatacttataaaaatgggattatgaaaatataccactgactaaaattgaacctaatacgctaagatgttgccattttctaataatcttcaaacaacaaaacaaccaaagaaatgtcgttgagtcaccataactttaaataagtatcattttagaatcactgggatggaaacaactgtgaaaaataccctttgaaataaacagccctcactgaagcctgaaagatccgctgtgggctttttatttcttaagaaaggttatattttattaataatatttttatgtgattctaaaaaactttctcaatgttgactcctctctgcaaacatctgccttcactttgcagaactagtcacattcccattactagtgctcacccatgaggggcaaacactttacttttgatgagcgacagtttcaacacccatattaggcaaaagggcatttctcacgagaaaaacaggctgcttgtttgacaaacggctatttgtgaggtcgccttctgtttaatgatcccatagcaaggcagatgttggagagggaagttcgagaatccttctaaaccagatgcactttgggttacttcctctgcttgattccaaaacagctgaacagaataaaacaaaagaggaaatggggacacccaaactgaacattatgactctttcagcaatagcctttagaaaccctctcaggatactgtgacatcacagagatgtgtcatcttcttatagaattttgctccaaaagcaggatttataccatttctaaatgcaattaatgctgaaacacagctagcatacatagcaataacttaggcaaaaaggcaacactcaagcaaaatccttcctggaattaaaatcctgttattaggtcaaccaacttttcttttaactaactaaataaacaacagcaagacatggtaagctttgactcagagaaaaagattctggattgactctcggaagcttcc

SEQ ID NO: 24659 - DNA, 2300 bp, Homo sapien
attcataaacattcttaattatttctgttaaagtgatttaaccatataaactacatcaattctgaaatatgggaggtcaaatcatatctctggaaaggggtaatttcattaagttaaaaataagacaaaagataggatggacacagctccaattagtgagtccaccaatgaagccagaatttctcaagacacattcaacagttctgaaaagtgcaaataagattttacatgcaaactataacacaggtcaaggactctttattgtgccagaaaccattctgcaaacgtcacttgcatttcctcataattaccattatgactcctattttacagatgatgaaattgaggctcagagaggctaaataatccatccaaagtcatacagaaaatgtgaagttggggacccaaatacacctctttgtgatctcctgccccaactactatgcccattgctctttaaacaagtaaacaaacgtgaataatttgattaatgtttcctgtgttaagtagttttgggaaatgctaggttaaactatgttaaatagtctgcttttctctgggatttttaaatgtttgtaacattagtgtgcttggcgaatcttcagtgagtgatgtgggtacagtgtcgccctcactaattgggccatggcaccctttgtgtcaggagggaactaaagctcagaagaacaaacattggcaaaggctgctctaggaaccctagcagggccagcaacccgcttctctgtgggtcaaccctccccttgtgtaaacacagacccaccgatggagtctgagtcaatgatctttgagggggctccaattttctcagccccaaataggacatcattcctggatcccctaggcttcaggggccctaccagtccactacttacatcagtgcttttgacaactcttcattgtgccttttcacttcccatgttaaactttctgatttgtttgttttcaccttatcttctcatttacaagcctaggagtctccacaggggaccatataagctggttttggccagtgtgctactacattgtaacaattgaaacctcctgagcatttagggtgcaggagctgaagatgagaaaaagaaagacttctcatagaaaaagaacaaatgtgcgggctattctggtcctttctaagatttttgcttgcggggaagagttggagggctagggagatggatgtggaggaggacagaagagagggtggagggttgtatctgcatttttcagctaaagatgtttgtgccttctgagtccagtctagggtgctttgattccgggaagatggaggctatagataaagaattaatagtatcaaaatctgcccccccaccagtcccctcactgcaaatgtggggaggtgcaactaagctgacaagtgtttgggtccctagcgcagtagggttgagtttccaatggcctttgtcactcagtcatgggcatcttccacttctctttcttctcccctcccacctcctgtacccacccctcgaaacctttctgcctccacttgtacgactgaaactgacaggtttcagaagccagtctactaccgtgacccaggcaagcctgttcttgcatctggaataaagaggctgatctattggtccatggcctatgtacctgatacaaaccattaaaaaaaaaaatagaaccactcaactattctccacccaagatttgcttcctatgttttatcactgtcctttaacttgggtgggaaatgtttttgttttcataaatgctcatgaggcttctacagataagcccctattaaactatatttaaagggattgtagttcaaatcagtatgcacagataccagtttcccaccttgccctgtggacttgtcagcaaagcatctttgggatcttcatgttgtctaagagccttggtctaaaatagatcccgaatgggcaccctagagggcgcactgcttacattttcggcatgcaacgccaacagcgctcgctcccaggctccataaaaggggaggaggcagatcagtttcctcctctcattgagaaagaagaggattggaaggccgggcgtataaagccgcgcagagagcgtgaaacaaagcagtcggctcggaattggacttgggaggcgcggtgaggagtcaggcttaaaacttgttggaggggagtaaccagcctgctcctctcgctctcctcctcgtctgcgccgcgtttcagaggttgcccatcagccttgtgatttatttttatatctgctttttataaagagagaaatatatatatatatatatattttttttt

SEQ ID NO: 24660 - DNA, 2300 bp, Homo sapien
ctttcactctttttaaattgtatacccccaaagctagaattagcttcaaagtgaatggagagaaactgaccccaaaatttctgatttccaagcagtccgaggtggttcaagagtgtaggtcctggatgggggagctaaatgaacaggattgattgactgattcagtgattattcattcgtttatgcaacaaagtatttatggaaccagcttcgggtgagataaaattgtcctttgtcaggggcctgagatttcttctaacatggaaacactgcattccactgacacattaggaatactcattggttggacgtgcctggtacaaaaccatgaagaggagcaaaagcggaagggaactaacattaattaacccccagttgtgtcagatgcatcatcttatttaatcctcaccgctatgaatcctgtaattaaacctctttttgatgggaggaaaccgagattcagagagttgatgcaacttgctcagggtccagacagaaagaaacagcggatcattgattattttgattatttgtcattgctgataactaacattggctcactcagagtctcaactgcctaattaagtgggtccagggatgtgatgtgagcaccaaaagcatctccccactcccatcttcccctcaattgtatgagatctcacattgcagggaacacctcttttgctgcgtctattgcttcttaaaccctacccacccccagacattggtctttctgtcaaacaaccactgtttacatgaagtttccctatctttgtcccactctggggcctgctcaggtagaaagtgatttacagaaagtaattaacagcatgttttgtgtttgcattttaattggtgcttagattccagtatatacaatctattattttcttgacttgattactttcttcctgagttcttcgaattctatttttacttctccatctcccttgctgactcctgcccccaaggacctgcccttattcttttttgtgagctacacaatgttctcttcttaactaaagtcacacctttacaactttcagtatcatttctactcacatgaatcagatagctatttctgacctctctgttgagaccaagatttgcatttccaacacccagttggacatccaatagatgtttgctcaggtttggacatgttgattctgatgcaggcctaatgtctattagaagactcccattcatgtctgtatttatttgttaatctctaaaaggatgccaagctaatgcttcaaaatcaacaagcccagacttctccttgctccctggtttgatgaatgttatcacttagccacctaaacttaaaacctagttacctttgtcttgctgtcttccctgaacacccacgtgagttgggtcaccagattttgtggactttactcaatccttataaggtcgctttttattgatgcttcattaggatcctagttaatcttaccaccttttgcttgaccgctttctatattctcccaattaatcttcatccttgcacatctttctctgcaagttcattgacactgacactagagttattcttcaaaatcacagatcttatcttgtttctcatttatccaaaaccttctagtttcacttcattgcctccagaatatcaatacaaatccatagtgagcattttaggccccctagaaaatcagttcaacctacgtttcccaccagtcctaactagcaatgtgctgccctagagccagaccagactaattcatcacgtactgaaggctctgactttccctctatgcctgtgctcatgccacactattttgcttagaaaggcttttcttcctgctgtgtcacactcagcccaaattcaactttgtctttcaatatcccagttctctctgatacggtttggctctgtgtcctcatacaaatctcatcatgaattgtagctcccataattcccacgtgttgtgggagggacccagtggaatataagtgaatcatggggtggttttcctcatactgttctcatggcagtgaaaaagtctcacaagatctgatggtttaataaggggtttcctttttcacttggctttcattctccttatctaccaccatgtaagacatgcctttcgccttccaccgtgattatgaggcctccccagccacgtggaactgtgagtccattacacctctttttctctataaattacccagtcttgggtatgtctttatcagcagtgtgaagatagactaatacattctccaagtcagagtttattgccccctcatctattttcccattacttaattgaaat

SEQ ID NO: 24661 - DNA, 2300 bp, Homo sapien
cttagatatataaaatctggagataaaatataaattggggaattacatacagatgtacctcattctgtttttttttttttttcttgagacagagtcttgctctggagttctacttgttaaatttcagatgcttgtttgacattcaagtgggcacttagatatataaatctggagataaaatataaattggggaattacatacagatctacctcatgctgttttttttttttttccttcttgagatagagtcttgttctctcgcccaggctggagtgcagtggtgtgatcttggctcactctgcctcccgggttcaagcgattctctagcctcagcctcccgagtagctgagattacaggtgtgtgccaccacgcccggctaatttttgtatttttagtacagacgggtttcaccatgttgctcaagctggtcttgaattcctgagctcaaaatgatccgcccaccttggcctcccaaagttctgggaatacaggcgggagccacttccccctacctcattctgttttaaaatcttcatagccttgtgccttactgatatatcatcagccgtataacaaatagctccatccaatgataaactaggtggatcccagtttataaaaaaattattactacctgtatttcaagcaatgtacaactaaaatttctatacaatatcttagtgccatttgcgcactataacttcaagttcagttctaaaagtagaattgctgagactaagaatatgtgcattttacatttttttgcactttacattttgataaaaatctttagaagtatttgcatccatctatgcttgcagcaactctgatgcttacattcaggctaacactttctggttttgcagatctagttgtgaaaaatggtatcttattatttcaatttacatttcttaggagtgggattgggtttcttcatatctgctagccatctacctttgttcttcatgcattcattgatttgattttgaagtttgtccagagattccctgtgtccccacaggcgccattcggggttcctgtgctaaggcatggacaaggtggtgagctctctgctggcagggacctggcgctctcatcctgtgtccttagcacccggcagaggtccaagagggctcctggtctgggctgggaaggtgaccaacacggcgttgggggttgaggtgggggttggggaactggggtaggttgtgcagaggaaaaggcccaggtgagcggtgggggaaggggaagaagtctggacagataataagggcgtaggaaagacatccagatttcactgagtgcagggctttttaaaactgatgttagaaaaacttgatttgctgttgtaaaaaaccatctgtgtgaagtagaaattgatatcaataacatgatagagaatacgttctaaaaagtaaaggtagctggatgtaaaattctggcagaagtttaatatcctagatggttagtttgaggccagcaactaatgaggataaaagccttctccatggaaaattttggacagttatctggagaaatattacagtgcgcatcaaccaaattgaaatgttttcaaaagtgttgtaaagtttcatgtagtaaaaaggttttagccacatgcccttcaatttcatggcatcgaatatataaacacagaagagagcatgcatgcaagatatttaactcccttacatgataatgcatgcgattcaaaactatcatgacatctagggctctctgcaactacgagatgattgatgttaggaaaagcgtagccccccagtatcaacacaggaagcggccaccacctactatgtgttttccctttttgcgttttttctttttttaaatcaactctgccgttgttgctgctgcttagcaaaacgggtaaaaacaaaattgcaatcactgatgcatcacccagagaattcccaaatttcctgtcgaggaatcctctcggcctctctccagagtgcttccacaagttgcaaaactacggagggcgtctgggcaggcgctggcaacagcactcctgagtccgagctcccactcagaggccacgaggtcgcagaacagccggatcgggtggaaggaccgcccttttcttcgtagcctccaagggagctggaacaaaaaacgaaaccaaaacctgcctgctcgctcctctccccatcgcctgcgttccgctggttgtgggctttctgcggccgctgagggcgcgtctcccctccgccatggcaagttgcttttgctttgggttttgcggtgcaggtccgtgcctgtaccgtcgccatggtc

SEQ ID NO: 24662 - DNA, 2300 bp, Homo sapien
tattttgtatattttataccccagacctagaatcagccattgctccaatgagccctggtttcttttattgaagaatattattagaaaccaagatctgggtgttatgcgactctcctctttttttgacactcctgtgttcattaaactaagacatagctaagtttttgctagtcttctattttatttttaaggaggaatagatgtcttttatttctttttcaagaatattgagaatttagccacttgaaatcttggaaaattatatggcagactgtttattaatgtgtatctaaaaacatagaatcatgatatcctttgtcccatttttgatctgagagtttttcatctcagtaaattcatatgtaggcaagagttcttaaattttgtgtaccatggattcctttgccagcttggcaaatcctatgggcctttctccaaaaaaaaaacatttagtcaatgcctgtggggacaggcatggtggcttatcccagcactttgggagtccaaggggggcggattgtttgagcccaggagttcgagacagtctaggcaacttggcgaaaacacatctctacaaaaaatacaaaaattagctgggcatggtggcacatacctgtagtcccaactacttggggggctgaggtgggaggatcacttgagtcagggatgttgaggctgcagtgagccgtgttcatgccccactgcactccagcctgggcaacaaagtgagaccctatctaaaaaaaaaattaaatgcataaaataaaatacatagaattacaaagtaaatcaattgtattgaaatatgactgggattataggcacctggcaccacgcccagctaattttttttgtatttttagtagagacggggtttcaccatgttggccaggctggtctcaaactcttaaccttgtgatccacccgccttggcctcccaaagtgctgggattacagacatgagccaccgcgcccggccagaaatcaattgtattgaaatatggttatcagaatatttaaaaagcaaatgtttgatatagtgatatatatcaatgtattacaatatattacaagacctagtggtgaggttagtaactaatgtagaagcaatgttaaacacaaactattttagcatatctgcaacaatattctatgaaactatctgtgctttctattggtgactatcacaggtgctgtgaatactactgtagtttgttaccatattcataattgaagagaatgctaagcttcaattagaggttattagaaataaacatataatttcttcccaatccatgtttatggacccagcaggagagttagtgaaagcttcaggtaagaacacctgcgtagagaaagcatatgttggaggcctcttgactttgtttacatttggggagaacaatagggagaattaaatattttaatcaaaaactttgaaaaacgttggaaaaccaaaatagtattcatttaaaatggagcatgatattatggttggaatgtgaactacaaaggaacattaatgttcattactttctatatattattttgttgaaaagcaaaggatttttagaatctttttatatattataggtgtgaaagttatttgaaatattggccaggtgctgtggctcacgcctgtaatcccagcactttgggaggccgaggggggtgcatcacttgacaagagttcaagaccagcctgaccgacatggtgaaaccccatctctactaaaaatacaaaaattagccgggcatggtggcaggtacctgtaatcccaactacttgggaggcttgagacaggggaatcacttgaacctgggaggcagaggttgcagtgagccaagatcgcaccattgccctccagcctgggcgacagagagagactctgtctcaaaaaaagaaaaaaaaaaggagttattaaaatacagactttgtttggatataagccatatgataataaagcctttgatgatgggaaaaaaagatatagcaaagaagagatgtttcttccataaaagggtaaaagttcttatttctttgttcttaaatttgtgtatatatgctatgcttataatatttattttttataatattaggggatcatggaagctgataaagatgacacacaacaaattcttaaggagcattcgccagatgaatttataaaagatgaacaaaataaggtaaaaaggaaattactgggtattattaaaaattattttatatctattagttttgcagtaaggcatgttttgtatgtctttgtccaacattaccttgaatttgggaggccgtt

SEQ ID NO: 24663 - DNA, 2300 bp, Homo sapien
gaggagttcattgccatgtagtcagggagacaaatgtgtaacataatattcacctcacatctgtgtagatttacatgagatatccaaggcacagagtgctgcagctcatgtgcaacatatttattgagtgcatgataacatcaataaataacttttatattaggagagggcgtaatttactagagcattcctcgaaaggtcccatcagaaactccccaagattttaataactgttccttgaaaaaaagaatatatcgctcaaattgatttgataagttcaaggttgaataaagttaaaatttttaatatgcacaaatttttaatttttccctgcaatacttcttggaactcttaatgtgccaatgtgcattgtgaatttccaaaagtggattcagaatgcagcatttcctaattgtattgggccataaaattccatgttctccatgtaccctaggacacagtttggagatattgttgagagtagagtatgatatcattgtcaccatatattaactgcttgattttgggtcacctctttatgccttagtttcctcaactgcaaaatggggataataccttcctgcctgcttcagacaggtgaaaagaaatgggaataatacctatatctaatattgttgttggcaaaacaaaaaggtttataaaatgtccaggagttcttagtagatgttagcaattacaattattaatagtatgtccaggagccaactcttcatcttcagatctctaacactttgcagaataccagatttgaagctgagttaaattcagactgttagtacatgtctcagctttagaatgtaggtgtccaaaaagacttcccctccacctgtatcatttgccttttaaacagaatctgagtcaatatattaagttagtcctgttctggccatggtcctgtcctttagtatcttcttgtaaaaaataaaaataagaagaaatgaggttcaactaaataacctcgagagttcatattccctctaaaatttcaaggtaaaactaaagtaattctttctcaagttgcagcagaaggagtttttgtattttctaactggtctgataagcacaaagaagtcgttttttttacttagaaatgccattttacaggaggctgaggtggtgggatcacttgggccagagctcaagatcagcctgggaaacagttagatacctgcccccagcacccaaattaaaagtacaaaaaatctgggtgcggtcgtgaattcctgtaatcccagctacttgggagtggaggtggaaggactgcttgagctcaggagttggagactgggcaacagagcaagactcatctcaaaaaaaaaaaaaaaaaagagaaatgtcaccactttaaactggttcccatcaacctttttgatacaaagaaattttacttttgttaaactattttagaccactgtatcagttattatatgtgactaggtagcatgataacctataatttatgccttgaaataattttgactcattttcttcccacatctgtatttatgagccggggcagctgtggggtggttctttgtgtgggattaagagacactgcagttcttgaaataaaccagatgtttgaattttcaaaggaaaagttcacacctagtgaagtatttatttacaagctccacaacaaaacaagagattataagaaaactttcaagggacatgggtcacagaaaccaacaggaacaccacagctttcccaacttcatggccccgggggatgttacaaaagacacagaaacgccgatcttgtgctgactgtaaacatttgtcaactagtgttacaatgactaagaaattacaaaagagttacaatctgatgaagagcgattcctgctttgactttatttggtttctatccacttttccaacataccttataaaatacatgcaaaaaactggttttagaaagcgttccctaaaattagtgtgtacggaaacttcaggtatacttctgctttcctccgcaaaaccacccctttttaaaaatcgaaagtgaaattagtttttttttctgttagtgactaatcattggagacaaccatgtttagtatttgagcattggttaaatgctaaagaaaaatcgccgttaaagcagttttctttttcactgtctttttcttttcgcggggaacccagctgttcctgcgagggccacctcctcaggaagaccccgcagctctcccgcggcgcttctgcaggaggcagcgacagtttcgagaacccgggccttcccctcccagtgcctcccggggttccggcgtttc

SEQ ID NO: 24664 - DNA, 2300 bp, Homo sapien
gacaacttccaaggtaagttcataggcaacatttcctttgctactctctcttttcttctctctcgtcctcaggattaccctctgcatcttttccatatgaaaaccccatttcctctttcctttattgaatgcccctcaaaatcagaacttacatcattaggcattattctctatttccttgatgatatggaggatgagattttcagacactatgcagaggtaaggggaaatatttatattctgcatgagagttgggagaggggagaaagaaatcctccaccccagatcgggttaattcatcaaagcaactcattaaattttcgtgttaaaagaagttgaacattcacacttcgctctacttggagcttcattaaaatgcaaatgaacacagaagggtatctgttcttagttatctggcctaactaaagattaattgcaaaccctttcctgagagtaatttttgataaatgagaactagggggaaattaggtgcttgagagagatgcagaaagggcacagctggaggatgtgacaagaaaagaattggaaagactatgggaaggttttgctgtagcactgcacaactaaagttatatttacttcctaaaccacaaacttaaaatacgcatataattatactttccaaagaaatatcatggtttattccttccaactacctatgaatcttgctctcagtaaccatgcctgtcttctccatagtcacacccacctggtctaaactatacctttctcttttgcaacaaacttaaattcactaaccctatctgtgaacttggatacaattccctcatctttcatgtgccaccagtccaaaataaagattttcaatgctagtaactttatgtatacctcagtgagcatccaataaattctgtactctcagcctacatccccataactgctcttttgagaagagatgagaccagaacacacctgagatgttcaaagcaaagatgtctaagggattcaaagctaacttcaaaccagagcatgtctagcaagttggctttttcaaagaactccaacatcattggagggactaagaaagcatgggagaaatgaatgctataataggagtgaatgggaagcaatttgagaccaaaagtagagaatctaagtagcaaaaaatgaccaattttgtaaaaaaatcaaaagttgccaataaatggctatcaatgaacaataggaaatgccattagcatcagcggtagtgggagtattatcagatatgttacccaaggattctacacaaaggaagaggaaagtttgggatatttgaagacatgatgactttactgtaataattattatctattaccttgatcgtcttcttcaaagttagagtggtctagggaagctagggacaagtttttattaactttgttagtctacccacctttctcccaacacttcaagaatttgtggcctgggaaaactgtgttataataggacatcccaaagctgctggaacatcctgacgctctgaaattgaaatacttttctgggagctgatacatttatttagctgctgaccataacacaccaaagactgcaacagaccccaccctggaagaaaagcaggcagagaataaggaagtcatatatcactggagaaaaattaggattctccaagctgtgcatactttttgttttaaattttttacacaggcttgacaatgtttagaaaagccagtccaacattaccaataaaagattagtgtttaaccccatatcccataattgacactgcaaataagacatttaggatttatcttgaaattcctactgaagttcgattttcttttaatcactgctaaatctgcatcaagttacacaaactttctaacagaaaagtgtttgtgactaacaataaatgaactccgttcttagtaagttaattttaaaacatagatgatcattctatctccttagttttggttgccaatgcaaatgagtcagaggatttgcttcagacactgagataattgtgtaactctacagcggaaaatgccattggagagtacttgctgacctcacagttgaaaaaaactatttaaaagatgtggaaaccagatgtttcagtcacatttcagccactgctctgagaatttgtgagcagcccctaacaggctgttacttcactacaactgacgatatgatcatcttaatttacttatttctcttgctatgggaagacactcaaggatggggattcaaggatggaatttttcataactccatatggcttggtaagaaccttcactcatgagcctcttgtt

SEQ ID NO: 24665 - DNA, 2300 bp, Homo sapien
ctgtctcccagactggaatgcagtgatgcaatcatagctccagtgcagcctcaaactcctgggctcaagtgatcctcccgcctctgccccccaagtagctgggactacagacatgtggcactatgcccagataatttttaattttttaatttaaaatttttttcatagagatgaggtcttgctatgttgcccagcctggttttgaactcctgagctcaagagatcctctgcctcggccttccaaagtgatgggattacaggagtgagccactgcgcccggtgaattctggtttttatgacttgctttggaagaggaagacttggggcaagagggaagatggaaggagaaggtcacagagatcttgcttctgaggccttccagtctcctttagctcaaagtactcagtatcccaaagtgtcatactttagggtatcgtctgagtcccaacatccctcattaccgagtaacaactgtgtttttttctccctaaaaaggtgaagtgacaaaacaaaaataaaatatagatgaatacatgtcatatcttataatgggaatttttattctcttaaataaaagttataggaggtcattggtttggacttagcttctgcaccaggccaaagagaccaaaccaaaatggagtcactcatgctaaagtttcacaccaccaacccgaaattagttgtttatctgaccttccaagaaaccaagagccacagagagataatagccaaaccctcaaacagaccagttttagctggcatgataaggaagttgcctctgctttaacctttataagaaaagtaactttgaaacaaccagtctgctttttgttttctgtttctgctctcctcagcccttttatatcaataaaaccaacgtcctctgctcagctcatcagaacactcattctattttaaaaatgaggtgcctgattctagaattgcaaataaaagccaattaagatctttaaactaaatttgttgtcattttgtcttttgacagtcctaaacataaatatgagaaaagagacctcagcaaaatcaagtataattgcaaataaattttaacatttgatatattttaaagaaccattaaagtaaaagacaaaatataaactaaaaattaaattacagcatatatgacaaacatggacatatataataatttctaacaaatcaatagagaagattatatcagtttttaaaaatagtgaaaaaaaggcatggaaaaataattcacaaaaaaaattaacaaaaaattatataaccatcaatctcatgaataaagaaatgcaaattcaaactacagtgaggcctcatttttgcctatcaaaacagaaaattttattttaattaacctttgattcagtaattctatttccaggtccttgtcttaaataattagagaggtgcacaaatatgtgtgttcaaggatatttattgcaacaatatttatgaaaatgacctgaaattccaacaatagagacaggcttaaataatgcataaaacattcatatcatagaatattttacagctgtttaaaatcatgtttttgtagaataatcaatgatttcagaaaatgtttataaagttcaagatttaaaaagtataatacaaaactgtacatagagcaggattccaaaatttcaaatgcaaatacatataggtacatatatacatataccacaaatagaaaaatgactgaaagaaaaaaatatgaaaatgttaacgcttgttatttctatgcagtgggattatgagaggtttcattttctcgtttaaagtttcctatattttccaattttccctaaattatgtattgctttcacatttagaaaaataataaataaatgttaataataacagtgagatcaaaggagttccaaaagattccaacataaacactgtgtgttttgatcatccttttttttttttttataagtggctaaatcttccagctaaaaagtttttatttccagtagaagtagtacttgtattttttccttgactggatttggatacaggatccattgcaacatatttgatttggaaacctccagctgtcactgaagcatcacttagaaacttcaaggtcatgacatttcctgttgcggggaaggaggcaaaagaacaaagatgttactctcctttgatttggctgacaattcaaagactcttcattctcataggagaatataagaattcatgaacaagattcccagaattcagaggtcgattctcaagctgaagagtctgtggtttcattgccgcatggaacagggtgagagacgtttgta

SEQ ID NO: 24666 - DNA, 2300 bp, Homo sapien
aaatgggaaattatgaaaaaaataaagcaaaatccctgttctcacagaatttatgttctaatgaatgggtagaggcaggcgtggtggctcaagtctgtaatcccagcactttgggaggccgaggcgggctgatcacgaggtcaggagatcaagaccatcttggccaacatggtgaaacctgtctatactaaaatacaaaaaattagctgggcgtggtggcgcatgcctgtaatcccagctactcgggaggctgaggcaggggaatcgcttgaacccaggaggcggaggatgcagtgagctgagatcaggtcagtgcactccagcctgggtgatagagcgagactccgtctcaaaaaaaaaaaaaaaaaaaaaaaaaaaaaaaatatatatatatatatatatatgtatatgtatatatgtatgtgtgtgtgtgtatatatataaatatatgtaaataaatataaatatatataaatacatataaataaataaatatatatataagcatactatgtatgtactgcgtcgtttggcagtcattttgctaagtgcagatgacacaaagaagagcaaaaagcaacatcccacttctagagctgagagttgcagcacatgtgagtgagggctcaaatcctgggccaggaacccatgatggagagttccattgctgctgggcttcatgtgtctgatttagagttaatgcaatcctgtctgttgtggagagtgcacgaaggcatatgaaaaggggagaagcagaccgggcgcggtggctcacgcctgtaatcccagcactttgggtgtccgaggcgggtggatcacgaggtcaggggttcgagaccagcacggccaagatggtgaaaccccgtctctactaaaagtacaaaaattagccaggtgtggtggcgggcgcctgtaatcccagctgctcgggaggctgagtcagagactcgcttgaacccgggaggcagaggttgcagtgagccgagatcgcaccactgcactccagcctgggcgaaagaacgaggctccgtcttaaaaaaaaaaaaaggcgggggaggagcagcatattcacagtaaggagaaatgactgtcattgtgtttactgacgtttctctagggaagaagccctggccaaatcccacccttcaaccccccaggggcctaacagaagaatgcacatcctcgggagctacctaaatctactgaattacaatgcatatgggcggggcccaggaatctgcagtttaataacgaatatccccaggccattgttatgtacgcttaagacctgagaaccattggcctctccaaccttttctcacttcacctattaaaagccctattttatagaggaggaaattgaggcataggttaattaacttgctaaagtcacatggaacctagaccagctggaatctagaccagcttgagatacagttcttttctttttctttctttctttttttttttttttgagagacggagtcttactcttactctgtcgctcaggctggagtgcagtggcgtgatctcggcccactgcaacctccgcttcccgggtttaagcgattctcctgcctcagcttcccaagtggctgggactacaggcgtgcgccaccacacccaactaatttttgtatttttgttttttttaagtagagacggggtttcaccatgtgttggccaggctggtctcgaactcctgacctcagactcggcctcccaaagtgcttggattacaaggtgtgagtcaccgcgcccggccagctcttagtcttaaacccaacagtacgttatctccttttgctaactgatttgttgctaaaacttcaacaagcactggacttggagtttgaacacttagtctgagggcccactatgttcagtctagtgagtctgagcaattaactcacattttgaatttcaagtctctcgccttaggcaaaacaccaccacctgatgctcaccagaggggcgtgacgcggcagctgggcagggaagggatgggaagggatgggaagggaggcgatcgataactccggtgtgccgctgactgttggattggctcgaacttctcccgccaggcctaacctactcccgcgcactcctgggcccgcccagccgccatcttggtctaggagggagcgcgccgcacgcgtgagtaaacagccggagctgggaaagtcgagctctggcagcgtctgggtgctgaggggcagaggcggagagaaccctgtcctgatcttcctaggtgggataaatatcggggtgacagtggtaggccgcggggaaccctcagt

SEQ ID NO: 24667 - DNA, 2300 bp, Homo sapien
tacagttgtgcttgtttgtaataaatgtgattttgtttttgtagactcacatttccagtcaaaactcggagctgagtagtgctgctctacaagccctggggttttgcttatataatcccaaaattacctcagaattatcaggtagataaatttcttatgacttaatatttttagagtataaagtataagttttaagtataagtagtttgatgctgttaaaagtactgttatgtctggattagtttcagaacctgtagtttaaggtttgcttttaagaaagaaagaatggctgggtgtggtggctcacgcctgtaatcctagcactttgggaggccgaggcgggtggatcatgaggtcaggagatcgagaccatcctggctaacatggtgaaaccccgtctgtactaaaaatacaaaaaattagccgggcaccgtggcgggcgcctgtagttccagctactcgggaggctgaggcaggagaatgacgtgaacccgggaggcggagtttgcagtgagtcgagatcgtgccattgtactctaacctgggtgataagtgagaccccatctcaaaaaaaaaaaagaatgtttagattatcattacctacacatagctctaacttcgatactacaaaatttgctcttaaaaataatggtatttgacaaaagattagccgggcgtggtggcaggtgcctgtagtcccatctgctggggaggctgaggcaggagaatggcgtgaacctggcaggcagagcttgccactgcactccagactgggactctgtctcaaaaaaaaaaaaaaaaaaaaaaggatattgctgggtgcagtgtctcatgcctgtaatcccagcactttgggaggccgaggcgggtggatcacctaaggtcgggagttcgagaccagcctggccaacctggagaaaccccgtctctactaaaaatacaaaaaaaattagctgggtgtggtggcgcattcctgtaatcccagctactcgggaggctgaggcaggagaatcgcttgaacctgggagatggaggttgcagtgagccaaggtgttgccattgcactccagcctgggcaagagtgaaactccgtctcaaaaaaaatcaaatgaaaagggtatttaaacatgattgctgtaaaaagggaaacttttattcaggcatatgcactaaggaatatgctgaattgaaaagttctttgacatgataaatgtgggataatttggaactaaaagtggtaatgaaagcacagaacctaatgctttccaagttttcaagtagtctgcactgttgctccatagttagatgatttccattgtaaaggaaacccttatctttagagaagggaagttaggaataaagatgtcaaagttgttaccatctgtttttgagggaaaagctgctgcctgctcttttttatacatggaagtgttagcaacctaaagcaggagttgttcattttggagcagagatgcaggattgaaaacatcttaccaaaaattgtcttgtatgttcaaacctacagtgatatctagttatttcagttgcacaagatatctgatttggtgtctgttgttttattttctctcagtatatcctcccctctaatctgaattttgtgtttttgggagaagtttggtatcagcattggttctctgatctgttctctggatatacatttaattttatgattgatgagtatattgttttctctagttttatatttgagactttaaagagtatcacctattctatacaaaattaaaactgcttgtttttcagaggcaaatgctctagaattgctttcaaaattgaatgataccattaagaattcagacaaaaatgtacgtactagagcactttgggtgatatctaagcagacatttccctctgaagtggttggcaaaatggtgagtatagtttttgggtatgccatcttaactatatgccaattaaaagaaaaaactataatgccaataaaaacagttcaggcttatttcatttgtatttatttggttcgttttttaggtatccagtataattgattcattagaaatactgtttaacaaaggagagacgcattctgctgttgttgattttgaagcattaaatgttatcgtaaggtatgcatttggatgttgtgcaaattgaagaatagttttcataaatttagctgaaggagagggtttttgggatttaaatgagagacagacattaaaaggggggaatgtcatttacaccaaacgactcaaggacaaaaagtaatagaaaaaagatggaagtagatatgtgtgggttac

SEQ ID NO: 24668 - DNA, 2300 bp, Homo sapien
tgcagtgagccaagatcgtgccactgcaatccagcctggacaacaatgagaccctgtctcaaaaaagaaaaaaaagacagtatggtagtatttttggagagcaatttggtaggctcagtcagtttgatttagcaatcttagacccaactattagcagtcctttgaatatttgctttgggtaccagtataattaattgcagaatttctattagtagtataaaaaaacatagaaatagccccaaggtctcttaatagaaaaatggttgaataaataatggacattcatatagcagtatttttatatattgatgcaaaaattccgtaacaaggtaaaatgaaggttagttgcagagtttaatatcattagtgatttacagtgtaatggctttaatggtttaaaggaatgtgtgtataactggctgcccaagaagttgtgtgtttttctgtgtacttacatatacagaaatttagaaggtctaggaaaatagactctgaactgaaaatattatcgttggagattaaagactttacctgctttttatatttctgtgtttgaacttctaaaacggatgcagatatattcatgttagtgaatgaatgtatttgatcttttttaactaatgagattatatttacgttaatgaatgaacattacttgtaattgttagagatatagttaacactcagatttttattagataatatttttacggctaatttactgtaaaaccttttatctctcataggtcctcatggaaattacaattaaaggacttcctcagaaagtattaggttcaccagcatatcaggttgctaatatggatattcttaatgcaagtatcttaaatgtaatatgatgaagattggccaaaaacatttatacttcccttttttattttattttattttattttattttattttatttatttttgagacggagttttgctcttgttgcccaggctggagagcagtggcacgatctcggctcactgcaacctccgcctcccaggttcaagctattctcctgcctcaacctcccgagtagctgggattacaggcatgtgccaccacacccggctaattttgtatttttatagagacggggtttctccatgttggtcaggctggtcttgaactcctaacctcgggtgatccctccgccttgctcttccaaatcctgggattacaggtgtgagccactgtgcccagcatatttcccttttttttaaaaaaaaaaaaaaaaagaaagatgaccttatgtaaaattctgagagtattggatttgaagtatattgaccaaattaaaggaaaaactgatagttaatataaagaattaaatatgctgctatgtgaatgaaaaaactattttcctggattaaataaatggctccaaaaggaaagtttcctagttgtttatatacgataatactgttggttactgccataaatattggaagctaatgtaaaatgcacttagtatctctaggatataggcattgggattccagtaagttttaaatctatgttctttttatatctggaatctcataattccttgattttctgtgtagaggaaacagctatgattagactataaagagcttgattttttttttttttttttttttttgagacagagtcaggctgttgcgcagtctggagtgcagtggcgtgatctcggctcactgcaacctaattctcccggtctcatgccattctcctgcctcagtctcccgagtagctgggactacaggcgcgtgccaccctgcccggctagtttttttgtatttttatttagtagagatggggtttcactgtgttagccaggatggtctcgatctcctgacctcgtgatccacccgcctcggcctcccaaagtgctggcattacaggagtgagccactgcgcccggccaagagcttgatttttgtgtgcagtatatggaaataattttactaacatggttgtcataccctaagtaatgccaaaagttaaatttgtcatgctaaaacaattttatttcttaaataaccaattataaaaaacaaatgttctattctttgtaactgagaagattgacttcattttctccttcagggaactccagctttgttcttaattcaattaattttcaacaatttcttggaatgtggtgtatcagatgaaaggtaagtttgtactttaacttgaaactttgtcttggaaaggttatgtaatgaatgagattatttatgtactatttcataagtttaagtttttttaaaaaaaattcgttaactttttgtcagttattttag

SEQ ID NO: 24669 - DNA, 2300 bp, Homo sapien
tctagtacagaaaattctttcgttgtcagcagtagttcagtttctaataccactgttgctggaactcccccataccctacaagtcggaggcaaacctttattactttggagaagtttgatggttcagaaaatagaccttttagtccatcccccttgaataatatttcatcaactgttacagtgaaaaataaccaggaaaccatgattaaaacagattttctaccaaaagcaaagcaaagagaagggactttttcaaaatctgattctgaaaaaatagtgaatggaactaagagatcaagccggagagctggtaaagctgaacaaacagggaataaaaggtctaagcccttaatgagatctgagccggagaaaaatactgaggaatctgttgaaggcattgtagtcttagaaaataacccacctggtttgcttaatcaaacagaatgtgtgtcagataatcaggttcatctttctgaatctacaatggagcatgacaatacaaagcttaaagcagcaacagtggaaaatgctgtattattggaaactaatactgtagaggagaaaaatgtagaaattaatttggaatccaaagagaatacacccccagtagtaatatcagcagatcaaatggtaaatgaggatagtcaggttcagataactccaaatcagaaaacccttagacggtcttcaaggcgacgttcagaagtagtagagtctaccactgaaagccaagataaggaaaatagtcatcaaaaaaaggaacgacgtaaggaagaagaaaaacctcttcagaagagtccattgcatataaaagatgatgtgttacctaaacaaaaactgattgctgaacaaactctacaggagaatttaattgagaaaggaagtaatttacatgagaagactcttggggaaactagtgctaatgcagaaactgaacaaaataaaaaaaaggcagaccctgagaacattaagtctgagggggatggtacccaggacattgtagataagtcctctgagaaactagtcagaggccgaacacggtatcaaactagaagagcatctcagggtttgctttccagcattgaaaactcagaatctgatagttcggaggcaaaagaagaaggttctaggaagaagagatctggaaaatggaaaaacaaaagcaatgaaagtgttgacattcaagatcaagaagagaaagtggtgaaacaggaatgtataaaagctgaaaatcagtcacatgattataaagcaacttctgaagaagatgtaagcataaaatctccgatttgcgaaaaacaagatgaaagtaatactgtaatatgtcaggattctacagtaacttcagatttgttgcaagttcctgatgatttaccaaatgtgtgtgaggaaaaaaatgaaactagcaaatatgcagaatattcctttacaagtctacctgtgccagaatcaaatctaaggactagaaatgccattaagagattacataagcgagactcttttgataattgtagtttgggagaatcctcaaaaatagggatatcagatatttcttcgctttcagaaaaaacttttcaaacacttgaatgccaacacaagagaagtaggagggtgaggagatctaaaggttgtgattgctgtggggaaaaatcacaacctcaggaaaagtcactcattgggttaaagaatacagaaaataatgacgtagagattagtgaaacaaaaaaggcagatgtgcaagcacctgtaagcccatcagaaacttctcaagctaatccatattctgaaggacaatttttagatgaacatcatagtgtgaattttcatttgggtctcaaagaggataatgatactattaatgattcattaattgtttctgaaaccaaatcaaaagaaaacactatgcaagaatctcttccttctggaatagtaaactttagagaggaaatttgtgatatggattctagtgaagcaatgtctcttgaaagccaggagtcacctaatgaaaattttaaaactgttggcccgtgtttaggagactcgaaaaatgtttcacaggaatctttggagacaaaagaagaaaaaccagaagaaaccccaaaaatggaactgagtctagagaatgttactgttgaaggaaatgcatgtaaagtaacagaatccaatctagagaaagcaaaaactatggaattgaatgtaggaaatgaagctagctttcatggacaagagagaaccaaaactggtatttctgaagaagcagcaatagaagaaaataaaagaaatgatgactctgaagcaga

SEQ ID NO: 24670 - DNA, 2300 bp, Homo sapien
tgcatctcctcaaaaactaagggaacttgatccttcacttgtgtcagcaaatgacagtcctagtggcatgcagacacgctgtgtctggtctcctttggcttctccgtctacgagcattttaaagagaggactaaaaagatcccaagaagatgaaatctcatcacctgttaataaggtaaggggaatgaggctaaatattaaggaacccagtatttggttgggatattttggccatacagtgacctctggtgaatgacaaaatattacaattatatggccactcatttgattatttaccataatggttgctagggaaaaggtaggtagaagaaaaggtttcgaaaaaaggagactgaagccttttagataagtctttcattttacaacactaaagatctttatgcagctgtgcacattgttcacctttggcaaaattgataaggctcctagcatcttttctgctccccataccataatatcatatgaggaaacagatttaggaatgcaggcaacactgccattgataaagcagatttagtagttgtgtgttggaacattatgctgttttacgttttacatacatgttccagaccatatctaattaaaaaaaaaaactcatgtgccttcatcaacttgtagatgtgatcttatttagttatttatatccccatttcctcagctaaattatagatcttttactttagaaaagatggattatctatatatctgctttagcttcaggccttgtgccttgcacatagtttgttgaatgaatgaataaaaaaataggaaaagttaaatgtatttacgtaactcaacttgtcttatacttaacaaaatagatatcctgaaaaggtatgatgttggcattccttaattttgaacttgaacctgctattcattgtagaatacattttatatatacaagcatgaatatatagacatgacaccttgttttttgccttcaacaaacaacactttgaaagtattcctttggccaggctcggtagctcacacctgtaatcccaggcatgggatttgggaggccaaggcaggtggatcacctgagggtcgggagttcaagaccagcctgaccaacatggagaaaccccatctctattaaaaatacaaaaattagctgggcctggtggcgcacacctgtagttacagctactcaggaggctgaggcaggagaattgcttgaacccaggatgcagaggtcgcagtgagctgagattgtgccactgcactccagcctggcgacagagcgagactctcaaaaaaagaaaaaaaaatgttctttcaaaatccctgttactcttattcatgtgtctgaactttgcaagatacactgaaaattcttctgctgagaatctagagattaagttgttttttgttttgtttgtttgttttttgagatggagtcttactctgtctgtaagacagagtagtgcagtggcacgatcttggctcactgcatgctctgcctcccgggttcaagcgattctcctgcctcagcctcttgagtagctggcattacaggcatgtgccactaagcccagctaatttttgtacttttagtagagataaggtttcaccatgttggtcaggctggtcttgaactcctgacctcgagatccacccgccttggcctcccaaagtgctgggattacaggtgcgagccactgcgcctggcacatttctgtttttacatcagtcttctttctagtctggtaatcccataaagttcctagaatcagatcgtacacttttaactgccacatctggcttcgttaagtttttgttactgtgcctttttcacaatctttggtattatgcagagacagtttaaaatatagaaaattagagtgaattgtggtattgagttaatgtgatctgtgaaggcagtcgctaggaactgtgcagctgacttctggtgaaataaattttctaaacccacattctatttttgggtaacctcataatgaaaatttatggtgtaattttttaaaaactttaattttgttaagtaaaatcctgacctgtgttttcaggttcgccgtgtctcctttgcagatccaatataccaagcaggattggcagatgacattgatagacggtgctctattgttaggtcccattcttccaatagttctcccataggaaaaagtgttaaaacttctcctactacacaatctaaggtaagctataggctttaaaatatacatatatgtataccgacacagaattacatgtacatgatgtgtcataaaatgaactatatatgtgaaaaacttctt

SEQ ID NO: 24671 - DNA, 2300 bp, Homo sapien
aaataatgctgttggataatacaggcaaaaacaggatttaaacccgcacattaaaagcatgactgaaggcccggcaggtggatcactttggcccaggagttcaaaactgacctgaacaatgtggcgaaatcctgtctctactaaaaatacaaaaaccagccaggcatgttggcgcatacttgtaatctcagctactcaggaggctgagacatgagaattgcttgaaccttttaggcggaggttgcagtgagccgagatcatgccattgcgcgacagagcaagtctctgtctcgcaaaaaaaaaaaaaaagtttaattctaacattgcccatggatttttttttttctgtacagcttgaagataagatagttaaagactctgttacaatttaaacatcataaaaatgtgaagagtaagtggtgaggcaagaaacaaaattgggggaaatggtggggatcgtgaatatataagtgaagttttatttttttaaggtgtaaaggagtgagaatagagtaattgctttttaaaaagaaagtataaatgggttaatttttttcttccaactttgactttaattcagtaagaaaggcctaggtttcatctcatattcttcataattgattttcaagaagttaatttgtcattcagcctaggaggctataaaacagcagttagttggcattattagactaaaacttgggtggggggaggagactgtttcctcattgctgcaacccatggtctatcctattcctaagccattagaaagaccttgtactttgtatagaaacattagagtgaggttttgatttttaacatagtactctcaaactttgatgtgcatatgaacaagtggattctgattcagtagatctgcattgggccccgtgagtctttttaaacacagtcccaggtgattcatgcagatgcctgtgaactgcgctggtagatgggcctaagaggcttcaggctgtgttttaggttttggtaagccaggcagattcaagtccttttataactgtcaattttgtgaattggggatgcagactggttttgaaggcttaaagttcaaaaattataagaaagttaagaattttgcttaagagccttttaaaaatatggacgatttattttttaagtaggcagactaagaatttcaagttataaagaatcttattgataaggcaaagtagacaaagtattttctcatgagtatttgtgggttatgtttttgttaatataaaagttgatttctaagtattagaatatatttagtctctaaataaatcttgccttctattatggatcatcgttattaataaacatggaaaatcaacactacccctaatattaatctggcagttaaatttagtagtgctataatgaataagtcagtctagcagatatgccctgtcattatactgcggacctctggtcacttaattttctgttatattatgtggttgaaaattcctgtttcatcgtaaagtgaaatttgaaagatggagttgaataatatgattctcgaaaagtgagtttttcttggaattctgttaaggtgttagattttcctcacatatttaaataatctgtaagaactaccctgaaagcactaaggaaaatgtagccgaaagttaagtaataggttttaaaaatttatcaaaatttattgatagtttgatctgtaaaacaaattgggtttcgtgctttctgatgtccagttaataagtatattatgtgccaggctttacatattgctctttgcaagtagccgttaaagtgtaagtcattgaagtttgaagatctataaatatttaatatagtagtctaaacagttgtgagaatttactcagttctgaaatagaatgttaaattttccgatgtggtcctaatcatttttttctttacatactaagccttcctttctccaaagaacagttaaaaccaaatgtgttatggtaagctgtaaataccgttggaataaaagataaccgttcatcttacctaaaaaattgaagacaatattttccattgttgatgtcacaagtaagaaaaaaactctaacttttgtactctacttgtagcagagggaatatttttggccacagtgtgccaatttataattgtagataaagctgaatttactgggcagcaagcttatatgctgatagaagttgatgcactgagaagtgatgagttgaagagaatggaaaaggcagattgagctggaattttaatgcatagtacatttagtagagagacaagctgtcctatatactcctgtatacttcagaaatagc

SEQ ID NO: 24672 - DNA, 2300 bp, Homo sapien
tgcatgttgaacattttccaggctttaaagaaaaatctgtaagagacaaaggttctgttgttctttgcaatagcacctgcaaagtgtgccttggcaaaccgataaagtaaataggaaatttaaaactaaaccagccaggccaggtccagtggctcaggcctgtaatcccagcactttgggaggctgaggtggtcggatcacctgaagtcaggagttcaagaccagtctggccaatatggcaaaaccctgtctgtactgaaaatacaaacattagcccagagtggtggcgcacgcctgtagtcccagctactcaggaggctgagacacaagaatcacttgaacccaggagggagaggttgcagtgagtagagattgggccactgcactccagcctgggcaacagagggagactctgtctccaaacaaaaaaatggctcattgtaatggagatagcatatactttagtattctaaaagtttgggagttggaaatcacaataggattgttgcctacttgcatttttatccagtttaaggcaagatggaagacttgggagcaggagagtagcaccatttggcaccatttggatggttaagcataatctgccttttcttgggtctgcaaattccctaagggcatcaactgtctcttgttcttcacttgagcttcagcctctaacccagtgcctggcatagaggtgtacgttggtcattcgcaagtgagtgcgctctcttcacaagagcattttctccctgtgagtctcagacacattaagaagcttgaggcagcattactacggctgtaaagttacagggacttacctaccttctaggaagaacagtctgtaaacttaaacattaagccattatggttgcttcttctccctttgcctttgccacatgctgccatcctactggatacagatgggaaagatgcccttgaagttaggattggagtccacagatgttcttaaaactgtaatagaagcttgctgaatgcaagtatagatagaattttgagaatgtctactcttaggcataacagtacattttttaaatttagataattttttagtaattttatgtacaatttgcttcattgaatttttataggtagatattaaaaccattaaacataaataatgctcattccatccacagagttgcagaattagaggttttattagttgctggtttgtattgattataagtttataacttcagaactgaattagaaataataagcattagcaatcagcaaggaaaaggtgaacatctctgctatttttcctttaatgtgtttggcatattcaaaatccctgttttagaaaagaaataatgttaaaacatgtttataatggagaaagactctaggcacagaaataatattgcagaagcttttaaagtgtctgttctgcaacttattttaaaacccaaaggagaaaggatggtactaccataaatcacattgacacagaaaaaccataggcagcttgagaacttaggtaacagtggagagtctaaaccgaaacattgactgcaggatctgtaagtcctgcagacaagtgtgatgctttgaaatgcctaaatagcttcaacgtagttggctgggagcattccggtcctgccagtcctctgcacagtgccatacatccagccttcatcaattgcttgaacatttatgatggcatctccatccttgaaggacacctcatctgcatcagcagccatatagtcatacatggcacggaagattttctattcgtggggatggaaaaggggaaatattatatgttggatttgcaacagttaacacacatctatttgtaagatctctcatgactgactccacaaacttaagttgaacaaaagagaatgtgcaagcatcaacaaagtaaaaggaacccacaaaataggaaatacttgcaagtcatgtatctgataggcaattaatatccagaacatatgacgaactcctacaactcaatgccttcccccaccaaaagaggcaaaggatatgaatagacatttctccaaaaaagatagacaaatagccaaaaagcacacaaaaggatgctcaaaattagtcatctggaaaatgcaaattattaaaaccacaatgagataccccttcacacatgccagaatggtgatgataaaaaagacagacaataacagacattagaaaggatgtggagaaattgggtccttcataaaccactggtggaagtggaaaagagtgcagccaccttggaaaagaatttggcagttatcacatgttaaatacagcattaccctatg

SEQ ID NO: 24673 - DNA, 2300 bp, Homo sapien
ttctcattctgtaggtctgttatagagggggccagagaatttgcatttttaacaagttctcattactgaccttgctgtccaaggaccccacgttgagaatcactatttcaacagaattcttcctcttcaatgtcatttcctaaatctcccacgtttccaagaatgacactgaggggagataccgaggttgaggatttatcatgatgtgttactatgtttctcattttccactgattcgccatgatagtgatataagagccaaaaaccttattccttaatgataagctgaatgttgtatgaaactaaagcaagaggcagagcatagaggatagcaaagaaaaagagggtaggggaaaccctttgctttgtctgagggcctacagttttactgatatgtctatgagagtttaagtgctgcaaaacagtccagtaaaaaaacagctgctgtgggccaggtgtggtggctcacgcctgtaatcccagcactttgggaggccaaggtgggcggatcacaaggtcagcagttcaagaccagcaagaccaacatagtgaaaccccgtctctactaaaaaatacaaaaattagccgggcatggtggtgcacgcctgtaatcccagctactcaggaggctgaggcagaagaatcacttgaacccgggaggcggaggttgcagtgagcagggatcgtgccattgcactccagcctgggtgacagagcaagactcctctgtctcaaaaacaaaacaaaacaaaacaaaaaaaaacaaacagctgatgtattaggaacagcctcaaccttctcagtgtgattgaagctcatgcctgtaactcctgtttggatcatctctcaggggcttgacattgagagactagcggtaaaatgatggtggtttctcatccttttgaggaacaccacaggtctctcttgcagtcctcaagggtttcagggcaggtgcctatcctggttgtgtcttgctgtaactacacttaacttccttaggaaacatactactttccatctaacctaattgcccaaatggtttggggccctaaagataatcaaaagttatctgtaccatttccttttttggtaactgttaactctttttctttttggctttttggacccattggattcccataggttttgtacaaagaaaatgtggggaaagccaccgcaacccctgtcactcctgagatgcagagagtcaaacgcaatcaagaaaacattagctcggtattgtcttgagaaacaaaagtgcttttaattttgcaaaataactcttgcagtttggcctgctcctaaccctgtcccaggttaaaaacaaacaaaatgccagttacatttgcatctgctctaaatatcacactacatttactgtagccattaactatttttaagctttcttcttgagaggtgttctcactaatagtaatagattaaacataacatttccccccaacttgcaatataattaatagtgattattacctcgtagtgactttcgggcatgactttgtatctcacaggtgttatacaaagagaacctggggaaagcaacccccacaccctttactcctgagatggaaagagtgaaacgcaatcaagaaaactttagctcggtattttagaaaggaaaaataaatccttaaaatcttaacagccctggcaaacatggttgtaccactaatttatcttacagtttttccaaaacttttgtgtatctttaaaaattcttccttgtccacttaaaaacaacaaaccaaccccacgaggtcacagtgattttacttctttcttaaacttttgcttcctaccgtaacattttaatagctttaccttcagtgtgatataactgagccataacatgagccataacaccagctaagtgatgattttcagacctggttttctgctgtctgatgcctagatgctcttttggcttccctaggtattgtacaaagagaacatgagaaaagcaactccgacacctgttactccagagatggagagagctaagcgcaaccaagaaaacattagctcggtattttctaggactaaaaagaaatagtgcaacaacttggaaaataacattttaacatcataaaaacacgcctttctcattcaactgaaaaacacactaaaattttaaaagagaaaaatgcaacatcttggaaagtaacgttttaacaccataaaaatttgcacttattcaactgaaaatttacactaaaatagacattaactgtgcttttacattccaaaccatcatactaaacataacaagttaattgccaatg

SEQ ID NO: 24674 - DNA, 2300 bp, Homo sapien
cctctaacttactctcttcctcccttcccactcccaactgctccaaagcagggggaaaatgactgattgattgctttttttgttctggatgctttctcatcatacaggtgctatacaaagaaaacctggggacaggaattccaatccccatcactcctgagatgcagagagtcaaacacaatcaagaaaaccttagctcggtattttggaaagaaaggggaaaaaatgccacttaacttcagaattaaactgatctttacatttatttatttttgtttgaagcccatttcccttctttgcttctaatacatcttatattacaaaaggatatactttcccatttctataatacagttaatgtcaattttttacttcatctgatatttacaaacaaacatgttttaaaaataatgaatgtttccatttgtgtggataacaacaccgagttctaacagtctcaaatcctcatgtgattgtttaggaggcaccgtactcacaaaaatgaaaaaaaataacatggataactctgacagcccttcctcagcagctgaagtccctgcttctctagagggtgcagattccctatcccaacaacagcttccactaaagtagtcggtggcattttgtcagcatataacttctggctccttggatgactgtgttttttcctcatccttaaaaagtcccaagaaatgaaatgttactcatggttgtttttctggatgctttcttatcgcacaggtgttatacaaagaaaacatgggcaagggaacccctttacctgtcactcccgagatggaaagagtcaaacacaatcaagaaaatattagctcggtactttggcaagaaaagaaaaaaactacttatttaatgattttgaaaactttcatgatttaaaataatacgtattaatcctactttttaaagacaacttaaattttgtgaatttctttagcaaatttatccttttttcctttgggctacttctagcctaacaccattcccatttctataatacagttaatttcaattttttatttcatctggtattttcaatcttttttttaaaataatgagtttttcagtttgtgtggataacaccactgagttctaactgtctcaaatcctcatataattgtttaggaggcatggtactcacaaaaaaggaaaaaaaaaaataacatggataactctgacagcctttccccagcagctgaggtccctgcttctctagagggtgcagattccccatcccaacaacttccactaaagtaaagtagtcggtggcattttgtcagcatataacttctggctccttggacaactgtgttttgtcttaacaaggaagctgaccttacccttaaaacctttcaacaaatgaaatgttactcatggttgtttttctggttgctttcttatcgcacaggtgttatacaaagaaaacatgggcaagggaacccctctacctgtcactcctgagatggagagagtcaaacacaatcaagaaaatattagctcggtacttgggcaagaaaagaaaaaaactacttactgattttaaaaactatttcatgatttaaaataatacatattaatcctattttctaaagacaaattttgtgaacttctttctttagcaaatttatccttttttcctttgggctacttctagcctaacaccatttccataatacagttaattttgattttttatttcatctgatattttcaatcattttttaaaaatgagtttttccgtttgtgtggataacaacactgagttctaacagtctcaaatcctcatgtgattgtttaggaggcaccgtactcacaaaaatgaaaaaaaataacatggataactctgacagcctttccccagcagctgaggtccctgcttctctagagggtgcagattccccatcccaacaacagcttccactaaagtagctggtggcattttgtcagcatataacttctggctccttggacgactgtgttttcttaacaaggaagttgaccttacccttaaaacctctcaacaaatgaaatgttactcatggttgtttttctggatgctttctcatcgcacaggtgttatacaaagaaaacatgggcaagggaactcctttagctgtcactcccgagatggagcgagtcaaacacaatcaagaaaatattagctcggtacttggcgagaaaagaaaaaaactacttactgattttaaaaactacttttatgatttaaaataatacatattaatcctactttttaaagacaacttaaattttgtgaaatttct

SEQ ID NO: 24675 - DNA, 2300 bp, Homo sapien
tgacctgcctgaagtgaaacgtgtgaaggagacgcagaagcacattagctcggtagtggccatactctcagcttccatttgtgtgactggccatctctcaattgctaccctggtgctctctcatctttctgcttcctatcaagagcttccatgccttggggatgttgtgaattctcccttagtcttgatggggtcactacaggttgcaaaagtagataagaaaccacttttctcataatcaaggagtagaagggatttggctttcttttcctacctgtcactgacttgaagctcatggacttggcttcttaattaattatcatgccattcgtttccaaagtaaaatgttttgatggtagtaataaggttattgggatgatctcaagtaatttaactaaaagcatatacatataaacatataagtagtataacatactttggttttgtgtatatatataaaacatgtgtgtgtgtatgtatgacacatcatatgaatgataggattcccagtgtccaaaaagaccctgggtagacatgtgaagtctcttctcccctccctttcaaggtttcttctcctgtattctttgctctctccatctagtaaatgcagtggtacaggctgcgatctacctacaatggtatattatacattaagcctgttctgtcatgggaatttcaggcacctgtgcagtttattgcagggcacgtgtcccccacacctgaaatatcaggttagcacatttctcctgaccttttgtcaagcaagccctggctctgcacccaccccttttcccatccatacgcagattctaggcaggtgttggctactagcaaaagactatgtgaagtttgggaaatagtttatggccaataaaaggggaggaccttggtcttgggattcccctggtcaatggaggactgaactctcatttgattttctttaggatacttgatatttctcttgcaggttgttcatattatttagatctcattcccttctcactctctgcttatactctgtggtacagatttccttgtggtacaaatttcatttagagttttgtgtcctctaataagagttgagaaagctagcctaggctcctttgtcactttgcattacaacttcttggttttctttaattttgctttgtgctgttgtccgagatcaattctgctgctttgttgggtgaagagtaaagaaatgcaactttgttaccaagaaggtagatgttcaaaggttcctagaagcttccttgcaaaacaaagctatcacgcctagcttgtcactgattttaagaattaaaatctgggtacgttgctccccacgccatgcactaatacaccagggaatccatccatttaaaagaactcattcagtcctttaggctgaaaacttaatgttaagagttaaggaggctcagagagtggaggttccttaatgttttcattaaaatgcatagtccttagatactactactaaaaaatatggacttctcccaattcagaaaacactagtttacttgatccagcaattagcagtaaaaatttcaggtaaagatgctcttcctgaaaaataaactgattaagccatctcacatccagggactaggctcctacagattaggagccagcgaggaacattcattagaacatacaaaacaaaaagaaaattctcaataagcctgaaggaatagagtatcctatgattggaaaattttaaaccaagcaatctattcattaagtacaagtctactgcaggcctactatatttgaggcaccaaagctagatgcaacaaaatggttagatttttctcattggtaaatttatttattaatgcattttaggcatgcactaagtggttacagaaaatgcataatttagtgcccagttttcaaagtagtaaaaatttttactattttggaaaagacaacataaatattcatggaattttcccccctgttccttgaatgttatatttgagagctagattgtttttatgagtttcccccaaatagcccacatgtggctgctatctaaaggatttacggtcattttacctttctgggtattctaattattttctacaggttatgtacaaagaaaacttgggaacaggcattccaaccactgtgactccagagattgagagagtcaaacgcaatcaagagaactttagctcggtatttacaaatatatcatataagaaactatttcccataaaaaatttaccacaataacccatcttttttaaagaaagtaacatcttaacagcaattctgtgtgtgtctgtgtgtgttgt

SEQ ID NO: 24676 - DNA, 2300 bp, Homo sapien
gatattgccattgttactcccacatatattggtgcacagaagtatccatctgcacccaaattttttctttctattttatccagcctttcctgtaaccatctttgcaataatttaagttaaatttagctcaagatggctgaaataaacaagctatgaatttatttagttgggatggttttatagttaaagttgtatttaatttcctattttcagattttttacagtttctgtaagttcaaaaattccgtgagaaaattagtacaatatttctaaaaatgaaaatatagccaatggtatatttacttaaatgtatgacttttttgtttgttgtctttacatttgattcagttcactttcagtagatttccagactggacaaccctgaagaattactgccagtagcttcctatgaatacaatcttgatatattttgtttctatttttctatttcatgaagaatttccaggtctcctttataatccagtaaattaatagcattagaagactattacaaatttcccgtggatgttttagcatcagttatgctttgagattctcacagccttagttggtaaagctgtagctgatcagtaccctattttaaatataccgttagatgccataaaacctaatgttgttaatggcatcatatgcaaagatggaaaatgtttgggcacaaggaactctaattttggtgtcataaatctgacctatcccacactccagccttcttcaggtaatcttcctccacttgactctctttgcttccctgtttttattgtcttgggtatgttgggagcccgccactagagatgacatgttctggccctctggagtgtttaccttgagacatttttgtgtagccttgaagttgtactcttgctataatatgctatgatgtttgagcagaaaaaatacagagctgattatgagcagcggaaagataaataccacctggtagtcgatgagcctagacatctgctggctaagaccgcaggcgaccagatcagtcaggtactgtgatggggctggccggtggcccaggcaggactgtgctcccagtttctcatgagatgtcatcccgtctgctgcaaggatgtcataggttctgcctatgatattgggttgttctgtttcaaagtatctgtctagccacccaaaaagcccgtcagctatttgagtgtgccagtccatgctctgtgttctcacttgtgctgtggtgaagatgaaaggaaaagctgggtcctcccatcctttactcttctggagaacctgtttgaaaactgcaactgtaaactgcagattgagttgcaaaagcaaaaaataaacaaacaacaacaaaaaacaaacaaaaattaatggaaggaaagaagacataactccttactatatatctttctattccaaagatgtcttcttttctataaagctattttggtggtaacgtaagtgaaactagctgtatcattccccattcacaaggactatgaatggccaaccgcaagcattgcagtcattctgcttcacattataatgtatttgatgtcttcacccgcacatatgtgagtacataaagtgtgtatgcctacatctcttcactcagaggtgattgggatatagagccgtgttcttttctgtcttcataagtctcttttgtgcttcactgctctttgcatggacagagaaaatataaatctagtgccaagatgtttctgcaacatggatgtaatgaaattctgcgtccagatatgttgactgctctctacaattcgcatatgtggagccaggtaatgtctgatgggatgtgaagaaggaggtttagaagaagtcttggatgcattcccttgtatgctttcattgatttcctcttccactccctgcccatgctggcttcatatggtaaagctatgtaaatattcattccttgtaaatgatctctgaatgtggccaaaggtgatgggacagtggtcatccgtacatcatctgacactttcagaactcttaataaaattaactgattctttcaagtgttatttccaaagtggtataacattaatttatacttttcagtatttgcctcaaagaaatagattccttagagattgaagatagtaagtagattcaacagcatgtaaaaggtctgaatatttaatgttttcatctaatgtgtctcttgttcaattatcactacaactgttgcagggagatgaggattaccgtgcagctctatgaatattgtatatattcatggcgcctcttgactttgatgctgaattgctaggttatttccagcacatctg

SEQ ID NO: 24677 - DNA, 2300 bp, Homo sapien
tattgactacattaccatattctttatgatttatattatgacaaatttgagtaaatttgcttatttttccattcttgtaaacaaacctttattttccctctatagaaactctaccaaaaagactggaatgacaccaagcagaaaggctatgacataagggcagatgccattgaaatcaagcacgccaaggcctccagagaaattgccagtgaggtacgcttccttctcttttcttgtggtttttcttttctacaaaacgagcagggagactatttttcaagaattttgtgtttttaaaaaatctgtgcatagaattgcatctcatcctctgctagaagctttctgtatttgaaaatattaaaatggaatggaaaacattaaagttagcatagatgaggtatatgtgtaaatttactttgatgctgttacaaagtagaaacaaaacatcatgaagagtctgtattaaattcctgggaaaattcaggacccaatacaatgtcatttttatccctaaaatatttctgacattctccacaaatataagtcacagatgatagtttcatataagacttaagactgaaatcatatttatatgcaagattttatactggaggcttatgtagaatactcttagtaatctttggaacttcatttaattctaattttaaaacttactagtggtcaaaataattatgctacctgtcgggcatggtggctcacccctgtaatcccagcactttgggaggctgaggtgggcggatcacctgaggtcaggagttcgagaccagcctggccaacatggtaaaacctcatctctactaaaaatacaaacaaacaaacaaacaaacaaaaacttagctgggcgtggtggcgggacgtgtaatcccagctactcaggagtctgaggcaggagaatcacttgaacctgggaggcggaggtttgcagtaagccgagatcatgccattgcgttccagcctgggcaacaagactgaaactgcgtttcaaaaaaaaataaaaataaaaatagaataattatgctaccaggtgcaccctgcccccagctccaactctttaagccaccttgttccctttctctgcgttcttctctgattttcatcatgtagccagttgtttcctccttcttattcttcatttttgcctctaataaccatagctagtccacgttatctgcttgattcccagttttctctctctttgttcaaacttgcctatgttatccaaacataggaaagaaacagaaaccaccttacactagtcctgagacactcatcagatggaaactcttgtccacagaacttttgttgttatcttctgattcaagccacagccttgctttccatccttgaaacatgcatctttcttgtctgtttccaaaaccacacacgtatgacctctccctacctgaggttccttcagtactcttaggagatcatttgacctaatgttgcacttgtcagggaaacttggtgatggagattatcacctgtgccttgttttccccaactggaatatatgttaataatagtatctacctcatagagacattgtgaggatgaactgtgatcataattgccaccagtcaatgatttttgaccgaaaaacatggtagtttcatgtggatctacccaacacattagaagtagtcataatagtgtccggcatagagtaattacttagtaaatgttagctattgttttcattactcttgttcaccataccatctccctcctgatttactcatgtcctctctgaaatgacccaaaatcgtattatctaacttctttaaagtgaactgaaatatgtaatgactgccaatgttgagccaatttataccaaggctaagaaaacatactgaaaccatttaaattagaaaacccctcttaatacattattttcatatgtctttttaatatgatttcttactactttagtacaaatacaaagaaggttaccgtaagcaactgggccaccacatgggtttccgcaccctacaagatgaccccaagtcagtatgggctatacatgctgccaagatccagagtgacagagaatataagaaagcttatgagaagtctaaaggaattcacaacacaccgttggacatgatgtcaattgttcaagccaagaaatgccaggtcctggttagcgacattgattatcgcaattatctgcaccagtggacgtgtctgccagatcagaacgatgtgatccaggccaagaaagcctacgacctgcagagcgatgtgcgtatattatcgccagaccccggggagatgtg

SEQ ID NO: 24678 - DNA, 2300 bp, Homo sapien
gaacatgtttgtttctatatcaggtggtgggttacaaatatttgctttctttaaaagatggatttgctcactgtcacaaggacagaaaatcaaacactgcatgttctcactcataggtgggaattgaacaatgagaacacatggacacagggtggggaacatcacacactggggcctgtcataggatggggggagggaggagggatagcattaggagatatacctaacgtaaatgatcagttaatgggtgcagcacaccaacatggcacatatatacatatgtaacaaacctgcacgttgtgcacatgtaccctagaacttaaagtataataaataaaggatttgctcacatttctaaaaatttttatctttccatttcttttgtctatgaataaaaaaaactctagatttttttctttatttccaaaatatgggaagtaatcataatttaagaataaatgacaatcacagaagggttaaataccatataatgaaatacctacctgtcattaaaaatcatgtgtataggtcaggcaccatggctcacacctgtaatcccagtgctttgggaggtcaaggcgggaggatcacttaagggcaggagtttgagaccagcctggtcaacatagcaaggcactatctctacaaaaaacttaaaaattagccaggtgtgatggcgcatgcctgtagtgctagctactcagaagctgaggtgggaggatcacttcagcccaagagttggaggttgcagtgagacatgattgtaccactgcactccaacctgggcaacagagagagatgctttctaaaatacaaaacaaaacaaaacaaaaaaaacagtcatgtgtgcaaagactatttaatgacacatagaaatgcttatataataactgaaaagagcaggcacaaacccatatacaatatgacttctaattatattctcacacacgaatcataacaaattattttagtggcagaattacatcttaatttttcttttttttctgtgtgtataaatatacagacattctttgcaggcaaagataatttttattgaatctgcggtacttatctagaattgtgcctgacacatagtagatactcaatgaaattttggatcattgagcatataaaacccatgcaggagaatttcatttttattgtcattgtcattgcagcataatctcctgaaatttatacatctaaaaattaaatattttaaaaacaaattctaaattctaacagaatgactttcacattaaagaatgtattaaagtaatgcctatctatatggtatatattttatataagatatatatttcatatgtgatgatatgtgctatatttattttctaaattgtttctacatctatcatataatttacatattcagggaaaattttttttttaataaatagagcaagttaggcttagtgattgctttttactaaaagttaaaacagatgactatctgtctttttcttcttttagttcaagtacaaagaaggctatcgtaagcagctcggccaccacattggtgcccgagctatacgtgatgaccccaagatgatgtggtccatgcacgtggccaagatccagagtgacagggagtacaagaaggactttgagaagtggaagaccaagttcagcagcccagtggacatgctgggggtggtgctggccaagaagtgccagaccttagtcagcgatgtggactacaagaactacctgcaccagtggacatgcctgcccgaccagagcgacgtcatccatgctcggcaggcctatgacctccagagcgatgtgagtactgagagtcataataacgtgcagaggtgggaaattatttaacaccccttggagaaaatggcaatatatggcacaagctcaccagcccctggaggaggcaaatagcattgcctttatcgacaggaattttaatcctttaacccttcagaccaaagaggaatattgtgtgatacctggcccgtccaccaaactaaattttgagagtgcttttacttgatctcttatccttcagatgaaaatgcattgctgatacagagataaatatttattggctatttgtgtcaacagaatatgtacaagtctgatctccagtggatgagaggcattggctgggtgtccattggctctttggatgtggaaaaatgcaaaagggcaactgaaattttgagtgataaaatctatcgccagcctccagacagattcaaatttaccagtgtgactgactctctggaacaagtgttggccaaaaataatgccatcactatgaacaa

SEQ ID NO: 24679 - DNA, 2300 bp, Homo sapien
tttaacattaatctattcattgaattgcaacaaagcagttcaaacataaaagcacaggttgtcagtacatcacatggtacagggcataaggaacttacatcactcaagttataggcattgactttgtgctggataaaagcaggagtatcaggggggatatggcacttgaacttttcactttcatgttttgctttgtaatttaactatgacagagagagaaccaattagttcagaagaattgttccagaatacaaaaattcttgtgtggtacattttgtaaagttagtgacagcattattgagatcagaagagacatctagagcttgggtaggccatctgcattactgatcctgtgtgcaggacacttggcagctattatcacatctgtcaccatggtaggaccctaagggaatgaggtggctctgtcaaacatgttcccctccctgcgtagcacaattgtccctgcaggttctgagaggggccccgccctgtctctcttgtcactgtcagtgctcacgtaccagagccactttcctttcatctgattaagagtcctctcacagacatcagggcttttgatgctctaattggagccttcatttctggccattcatctattgaggtcacttttatttttttagttcaacacagctttggaaatccacacttaaagctcatataataaaatttgtctcagagattccaatttccagaaacttactagggagagagaaattcatgtactgaatacctgctgttggccagggtatgtgcagtgcatatttcttccttcacttactcttcaaaacagccacaaattataaaatggaaatatcaggcagaggggggttaaatctttggccacccagacatcaatgacagagctaacatttgaatgcggttttgtttgactctagaactcatgttctttccattgctttaagctacatttgtttccttcacagaattgtttcactgtaaattttatccacccaagaaaatgcagaaatatatttttatacaaatgtatactgtttaaacttgctaatacttacttagccttttgaataaacttgataagtcattggattttatgtatagagttatgaaatgttatccctcataattgggtgtcctgagtagttagaggaacttacgtcactcagttgtttggaattgacttgggcttgtagcagaacaggagagtctgtaacttgggtgaattttgtcttatctggatggactttgtaggtgtgctgtggggaagcaaaggcatttggtttagtagtatcacctgtcagatccaaggtggcccacaggccaagcaaatagaacctcatgccccacaaagcaatgaaacttgtagttaataaaatatatttttttctaactagactgtagtttgagaggtgctcttatatctgtatgagaaactttcctatatcttcgggtttccaataactcttctttgggaaaatgagctagaattacctcttaaaatgtagggatgtcaacaagggaaaataggatgtttactacaaaatagacttcatttcttgcgattgcctggcttacatttatttgtaaaagtggcaacattttaaacatatcctgaccactagatgctatggaaggcagtcacattcaaagttcagactacagacttacgtctttacactgatctagtttcttaattgcttcatattcttgagttatggtctgagggaagaagcctttgcctctgtcttcttcgtattctgctttgtagtttttctatgaggagaagaaattaggcataagatgcagccattgtattcatgccctgagaaaaatgttatttggaaagtcaaacaattgtcttagaacttacatcactgttttgagctgtgactttcatgcagtgtgaatggtatggatcctcgaagctgcctacataatgtcccaaaatatcttttaagtaggaatctttatattttttctgcaagacaaaacatacttcatttattaattggtgaaataatgggttctttttttaacagaaagagtgacagtaggattgcttacatcactactgaagttctgcagaacagtatcgagcttgaatttgggggtctcgcagtaatttatgctctttgcttttgtcttttcatagttttccttgtatagtttctgtcaaagaaaaaaaattcagttaaagtagattcctgtcactcccacgctgattataacacttacattttctaacactaaacaaaagatgaagaaaagatatcgcctgtcaactgtcttaaaaactgaca

SEQ ID NO: 24680 - DNA, 2300 bp, Homo sapien
aacacacttggttctaaccctggccttggctatgctggagaaagcaggattacatcacttagaaggctattacagcatccacgtgtaagacggtgttttggaccaggagggtagcagggcaggtgataagaagtcttttgaaagcacagctgacttgatttgctgatggattggatgacacgggttttggtctaagcagttagatgaatggggtttccctttattgagacagggaagactatggaagaagttggtaatttttttggaggacagacaagagctcatcttcagatatggtagatttgagatgccttttagacatccacatggaagtgtcagaggtcagtcgactacatgagcctgaagtttcaggggagatatatggaaagttgtataaactggggtgtcatcaacatacagagagtgtttcatgccatgagtctggagagcatcaagggagtgagtgtaaacagaaaactttaggggctgagctctggggtccttccatgggaacatatatgtaagatgagggagaagcaaaatcaggagagggcaatgcgttgggaagcaagtgaagggggaagggagtcatcaactgtgtcaaatgtctctgaaatggatttaccaatgtctggtctctggtgacctgaacaagagcaatttggtggagtctgcttagagaggattcacaagtgaatgaaaagagggaaattgaagatataagtatattcaactctttctaagtattttcctggtaagaaaagaagaaaatgggcaagtagctaatgaaaaactgggtaaagagggactttttaagatacgaaacaaaagcatcatgttgatggaaagaatccagtagaaagggaagatttggtgatgttggaatggggaagaatgtctggagtgatatcctagagcaggtggaaggggaagagatttggtgcttaagaggaggggatggctttgccacaagccctgacagttcatctgcataacaggggagaaggctgtgtatcccagatgcgggtagggggagagtaaagtttgtgaatctgctttctggtcgtttccatttttcaaggaaacagttaattctctaaggtggaaaagtgatctgagtctcccattactgtagcatactgtcgtgatgctctgtggaggctgaggggttgatgcctctgtgcttcccttgtgtatctcttgcctttggataccaagctgattgccttgttttctgagttcataagtggtagatttatctaggattccttgaacttctgtgcttatattgcctgaataaagggcttacactggggatcatggtgggaaccaggatcagtttcttgttctaatccctgtggacaggctcctgatgggggcttgtgaaccctgccttccctattctcccccaacacccctcaacttgctgcttctgccatagctggaattaaaagtgcaaataggaacagcagaaggaaaagcaaggctccttctccctgctccatcctcctcctcctacttgtaaattgaatacatgtgtgctccatgcacagttgcaggtgaggcataaaagcgtggattagtggtacttccagcttcctttctttaggagcgtgttggcaggtaggtagctgggggttgagagctgagtgaaggttctatagcagcaggtatctgggacattatgcatgatcactatttggatttctttctccctcctattatttctgtatctctctctttgagggcaaggaccatgtgttctttcttatatctgtccccaagccagaaacagaattgacaccctatggataattttgaatgaataaatgaatgggaagaaaaagcatcctggaaatttatgcagtttctctgctgcttttaagagttactatgagtattttgtttataaaatgtcaagctgccatttttctaaagagaaaattgatttgtggaagtatgtcatattcataatagagacgggggcaaaaataacccatagagttactttatcattttatttcactcctacaggtaaaatacaaagaagactatgaaaagaataaaggaaaagcagattataatgtgcttcctgcttcagagaacccacagcttaggcagctgaaggcagcaggagatgccctaagtgacgtaagtatatttttgtcaaagtgtttttaaaccttagctgcaaaagagatgaaaattttctcctttaatgactaaatgaatatataactttgcaaatacattaaggttatggagtggtaggttcattggaactatgtaaccacagaaag

SEQ ID NO: 24681 - DNA, 2300 bp, Homo sapien
cagcaagctccagcctcctcctgtgtcatgaaaatcttcccagacttggcagtgctcgggagtggattgtgagagctcgatctccaccctgacccatttcagctgctggataggaggaaataacatgtcgtggtctgtgaagattaagaaggaaggaaggactttggatgagggggttgagtgatcttacactcttgttttgcatcttgttttaatatcttcttgaaaaccagacatctatctctcactgtgagaattaatctcctgctcaattatccttaacaaatctacatatgcaatgcctatttcttgataaatgcccaacatttagacctcattaagaatatctgctaccttctcaactttaaattatatttcaaagttctctggatctcagttttggggatcaggcccaattgccccttcccaatcctaaggtttttctcctttgacaacaagcaagaggtagggccatgtctctccaaaaaatgatgcattaggagatcctaacctgaggtatgtgtacatcaagaacctctgaagttataactgtttgtgagcattttatagctttctcagtttcttgaagaggtctgtctccaaaaaaaagatgagaaacatttctataagtagtcttagcaaatccagaaatcaattttattgacttctgttctttaaatcttcaaaacagagtgcaggtaaatcaatcagcagtatagcacaaatcttatctcagcaaagatttccattgaagagttgttccctccccgcacatacaattttctttcttacagagtttctttctgttatgatgatgacaatagtaataactattattattattacaatttttataccctatatttgcttagcactgtggggtttacaaagcactctttagcgaatgatcttattaaacttcctagcagccttctctgtaaatattattgccagcacttgtggctgagaaaacaatcatatttggtcaagacaaagtcaagtcttggtcccagagtttgaacccaggcccaggactctaaaatttatagctacgaaaaccagttggctatttatttacatattaaccttttgagaagaaaggaaattaggcatttgagtgagggctaagtttcctctaacccaagctcgttgactctgcacatcactcaccttctcttaaaggtataccagaaagacattttctttttccttaaagggtattgtggggatgtaggcatatgccagtgccttgagacccattagttatgtctgttaacacatttttatgagccatggagggagaattgctctaactcagcttgggctctagctcatggacccaggtttggggttggcttggttaattctgctccaagaacacttcagccaaggtatttcaaaaccgcatatcatggtctcagtttagtgtagttgaacaaacatttatgatgtaacttctgtgtgctgcattttgtgttgggttctgaggctatgaaagtgaagaagacataccacttctctcttccaggagccttacagcctgggattcagatggagtgggatttgggagtcagatggggcaataattcaatttttgaattactttccagttcctattaaatttaactctaaaggcgaagatctattcgttagcctgcaagttgaattttattgtggttgtttctttctggaaaactaggagtgtttgtaaagcttagaaattaacggctaagttcatttggcatagaaatctcaggttgataggttgtattgtaactgaaatataaatagaggatgacttctgactctatttctttaaacatcaggggacatctgcaacttccgaatgaatgaagtccccaaactcagcaaggggagggggcgttagtaccctctttctccattctctatccctatcgcccaactttctggttgggtaaattgacagtacattggaagattttttttaaaggcatttattaaggacctaagaatggcttgctgaagatatttttaaaagttaatcattatttcttaatttgctgtcttatttgtcaattcatgagttatgcttgtcttattttctttttcttttttctagcaaaaatacaaagaagactatgaaaataaaatcaaaggcaaatggagtgagacaccttgctttgaagttgcaaatgccagaatgaatgctgataacattagcacagttaagtgggaagggatggctggttggtcatcctgggagggagacccctttccttagtgacttctagctacttgctctacctgaatgggtgcca

SEQ ID NO: 24682 - DNA, 2300 bp, Homo sapien
gggctccacccttatgacccaatcactttccacacatcggggggtaggacttcaacatataaattttggggggacacattcagctcagatagtaatgatttttcagtctaataatccctaaggatattgagatgtgtatacataggaaccctcattctctgttagtgaaacataaaatagtgtaaggattttgactggcaacttgacaatatctatcaattttcaaaatgtgcatatatcttctgcctcagtatttctatttctagaaatttaccttacagatacatttcatataagtatacaaaggtaatgtacagggatgcttactgtgtgttttgtttcgcattgttttgctttattttgtaatagcaaaaacctcgaaacaacctagatgtccattaataatgattaaactattatactctatccaatcaatagaattatttgtggaaattagagtaggatatgtttatgtgatgtttcataaaaatgtctattgcatattaagtatatcgatttatgtcaatatctatattgaaaatatctgaaacttaaaaatgactaagaaggtcaatgctcattttttactttatataattttgtactctatgtttttaaagtatgggcctgtattattttttaattcaacaacacattttaaagcatgtaatgactagtaagtcacaattctagtttgcagctaccaagtgagtgatctcatattacataaatatcctttggtcataagacctgtgagaacatacaagatgaacaggtataatcagttaagatgataaaattctgttagattttatttactaccatgtgaatcatggagggggaaaaggtacatgtatttgaaatatgagattactttctcaaactcctggcctcagacaatctgcccgcctcggcctcccaaagtgttgggattacaggcgtgagccaccacgcccagcgagattactttctaatgtttaacttaaaaaagaaaaaatattacaatatgtttaatctcaaatccatatcaagatataggtgactcacagggttttgcctgaatacaggagcaacccagagaaagagcagttctctgtcacataagagcctgtgatttctgtcgctgtgtgtaaggacagacagacagacagatagaattagattttaaattagaaaaaatacttcaggagcaaagaaagtgcaagaaagacatcaggcaagttttaagaaaatggttagataatttttatgaaggaaatgtcttacgttcggatttgccaaatagggcattattttctcctgataagttactgatttccatgttatctgctcttgctgttcagaaattgagcctgtttgtgtccgcattcacacgttgcttctgggagccaggagtcatctgagttaatagaaaaatcactaactcggttacatatgagagaggttctgtattcctagcagcttgccttatctaaggagggagaaggtgctaaataggattttggtataccctcttggtttagtaacagaaaaatgatggggtctaatctttctaattacaccctgtggatatcttatttagtgccattgtcaaatattttcacctttaacttcactcatcacatttttaaaaattgcttttgtcaacttgatgtttactgggtcttattcctcagtttctttcacactagcaccagtaacttacctgtagctcacctggtgaaccttaccagagtgagtacatttaccaccatgactggacaaatgacatgaagaaagcagtcacggaagggttaaagcctctcaaagtcatgcttattttctactaaattcttttgcatgaatatgacattgaatggggcctcagtaaatgggaaattcaacctaaaattgaactgcacaggctggaagttaggtaaaatttgattccatttgaattgttctaagcaagcaatttgttaccctttatcctttagtggaattgatgaacaggtggttttcagaagatcacttggtaaatttagcttctgaaatttgagcaactcaagatctgattggttgctcttgccacatgataattcggagcccaggcatcacgctggcttttgcctggggttctcaggaggggagagttgggagaggctttgctgctgaggaaatttatttggtagattgaaggtaaggccagtttatgactttttctgtaatactctttcaggagatgctccacaacttccctcgaagtatttttcaaaggtttgggccataactgaggaaattagtggtagaaatatggctag

SEQ ID NO: 24683 - DNA, 2300 bp, Homo sapien
aggtttgcgccaccatgcccggcaaatttttgtaatttttggtagagacggggtttcattgtgttggccaggctggtctcgaactcatggcctctagagatctgcccaccttggcctcccagtgttgggattacaggtgtgagccactgcacccggccctaggatggttttgaatgtggcccaatacaaattcgtaaactttcttaaaacattatgagtatttttgtgattttacttattttttagctcatcagctatcaatagtgttagcttatgttatgtgtggcccaagacaattcttcttccagtgtggcccagggaagctaaaagattggacacccctgtcctatatattcagttctcttcactctggctgaagggaactcaaatgattcctgacccgttgtaatctctgggaatcatttgcattacagtttcctggtacttatttttcctcaggaattgtgactgaccagcctcttgggggttcatactgcacgagcacaaattgatatgcagccaaagactcaatggccccttaacaggtttccagagcttttctctgtgtagctccctccttccagttactctgcttcacaaattctagtcaccttgatctctgggaatgctgatatgcgtcttcagttctaagaggtttccagattctcatttgggttcccacttcctccgtagttgactgggaattgcttttagggataaagtccaggaaatggtaagactccacctgttcctttctcttttgcaaagaatcacagtactgtgatgtgtttttcaatatctgaaatgtcgttgcctgtactttgtgcagttttctatttgctaatggtaggaggatatattcaaaccatcctactctctcatgcctgaagtcagaagtctctccaatgacattttgcatttctctgtaatcatagataaattggtctttaaactctctgtctctgtctctctctctctcttctttcttcactcggaaaataacctgggagaccatttccttgggtagattgtaaaatatgaagctccgccatcacataatgtgtatatgacatccatttcataagttgacatctgtgtgggagtctgaaaaagtcttagagctaccaaagcattacctacggtgtgcgagaatggaaatattacagagttaatgcaaattggttatacaaactacattgttcttctaaacagtgtacagaatattaagtaaatccagacatgataatacataaattaatatggattactatgattttccttcccttcatgtatggctcctctaaactttggctttttaaccataaagccccaaaagaagtcaacgaaattacttttctatattttgaggtaaaatactgggtagttaggagaagtgagttgggaaggtgcggtttattgctgattttgcttaatttcattcagctgttggggatgggagtgcaaagcagttcaaatggctcctacaagtctcccaatttttctttattttcctttttactaaggttaacgagaacagaaagggatggagctttggtggccactaaaggtttttaaacagggtagtgacttgatcaaaatcgttgttttgggcaatactgacgtgagagttaagagattggagagaaaagagccctgaagtgcaaaaatggctttaaggtgactatctaggtaaggccactgacttcagctgagtgtcagagggcagcagacttttccctcaaagacccacaggggacacaatgtcttaaagagtcatgacgtggaactttaagtgtagtgtatgtgaagggttggggatggacatggggtactcaattatatgtttacattatggcgcagtggagaaaattcgagggaaatataaatactcggggacgcaacagcaagcagtcggaagccatctgccccaacttgcggtcttcacagcctcagtcccagggtaaagtcctgcgccttccgcagtcttggttatgcaaataagcgaggacagggcgggcgccctttcctacgctccgcccctctggccgcgcgcctgcgcactcacgtccctccaggcccgccccttcacttcccccgcccgcgtggtcgtcgccaccgcagccgcccgagaggagctgggggaggacggtggcccgcgaggctcgtcgcagacaacgcggcggcgatgtccgcgagccaggcgagtgccgcggcggcagcggcggggccttgcgcgcggcagggcggcctgggcttcggcctccctccggttccctggaagcgggcccgcgaccagcgcg

SEQ ID NO: 24684 - DNA, 2300 bp, Homo sapien
acttcctttaggccctcacattggctatagggagcgctccacggcagccatccacagaagagccgagctatgtacagtttatccagttgggaacaatttgtctcatcttggtgaattgtgaaagtgggctgcctctgtcttctccccttaatttagatgtccattttaacacaatcggggaatatctatacttgcaattgaagtggtaaagtcgggaaatgatctggagaatttaagagaaaaaaagaacctcttgtctcagttttctgttgattctggttgaaataccgtatggctgtaattagagagttaataattaaaataagagtctgacacatgaatttgagcacagcagccctttgatctggtcctcttggtgtatgggggagggaaccgaggttccacgtggccagggactttctccaacatgcatccttgtcgacaggtagagccagcactgggtttctctctatggaatcccgttgactgcactcatcccctgctgctgtcctccctccatgggggcacaatctcagaggtgacaatctgttcaaaccctaccattttaggattctgaaggacagcaatatcttcttgctatcatttatatttgacagtggactaggtattgatgccactcccaagatgtgcgactgtgattgaaagacatgaacgggtcagcacagacctggaagaactatgctctgctcagctgttgtagctgttgtgttattattttgactcaggtttgttcctttaagagttacgcttttcagagatactggctggaaggacaggcctcctttcctagatccagggccagccagttactcttgtgctgagctcccatgaactgcagccagtgccttccagctgacaaagcagcttctcaatggtaagtgtttatgttgcactttagatttgcagagttctttccctaagttatttcttacctcattttggcgggtgaagaaaccagagcccatcaagatggtgactgactggtccagagtcatctgaccaattagtggcaaagctgatacaggggacttagagcctctgagtttctgggtcattacttacccagtcagtcatgcagcttctctaaaatatgttctgtgctcctcaccagcttctttgtcctcctgaatttagctggctacttttagagtgggccataaagctctcctgtttcaaagctgcagctttttttttttttttttttggttgaccagaaagttctaagtacctagagaaactcatcccaggctgctgcaatgtgggacctgtcctaggtcacctgagttgcggtgtggagcagcaggtggagggagtctgacgtttctatttgggttttggggaaaagaccaatgccacttcaggattattaaagatttgtgcatgggaaggggatgaagaatttacgtgaagacattggctgttgcttaaagttgatttaaaaacattcaactaaagagcattaaacatttcacatctaaaagttgagaagtttttggcttccttttcaaacttcaccagttgggacacagagctcttttcttgccagtgaggcagagagacttcaacgagaatattgaaaacttttactatagaaattcccacaagaaatcttaccatctgtttattctagtcatttttttcttcacattgggtgtaaagattttttttatgactcattgcccttttgacttaaatgcatctgttaagtacagatgttggatgagattagtatctgtttacctgtctttacatgatattctctgaaaataaaatctttcctttgctcccttctccaattgtgaatttaattaagaagatgagcagttgtgtttggagtattcaatagtttgcctttccaaacattccacgcagccttttggatattgataagtgtttattgtagaactaacaatacaggcgaaacaggaagcagctctttgctgggtaggatgctccgaggcgccctccactctccgagggaacgctcttcagctgactgaagcagggaagccgagccaatcagaggccgctttcctagctcagtcaccagtctgtggttgaggaagggttttgctttttgtgctctgtattgggaaggcagataaaatgccaggtctggactgcctctggggataacctcaccctgtgggatgtgaatgaatagcatcttgcctggtaaatccacaggaattgataaggcaggcgcagttctcccaaacaggccttttctctttaagctgtagctgtggtttctgcagcaattttgtttttgccttgaa

SEQ ID NO: 24685 - DNA, 2300 bp, Homo sapien
aaattcatggagtatctactatatggaaggtataggaatagaagataaaccgctaaaaattctgaaaattaggagattttcacaaaaacagaactaacaaactaataagctaaggcagcctattctaagtgcccagagaatacatgctccagtttttcagaagcacaagaattatgtgggactggagtagtcagataggatttctgtggaggaagcgtgagctgagtcccatttagaagaaaggtaggattcagccgggtgtgtaggttgttgggagggcatattccaaggaggcattccaaagcagaagagctcaaatgtgattgtatttggaatacttgggtattgatgactagacctgcctgcttgctggaaggtttgtatagagagatcaagatggagaaatgagatggagagtgatcagaaatgcaggagaggctgagttgttggaccatggagtttggactttatcttagagaagagtgacttgggcaagatattttaggaaaatggttttgcctgtagtgtgtagatggaatgaaatctctgcgtgtgtatgtgtgcatgtgcatacgtgcacatgcaccaggaagcctggaggcaaggacattagttataagattgttacagaggtttggattaagtgaagggattaggaatggaaaggaagtgtctggtggatggtaagatataaccaggacctcaataaagccaagcaattattaaaacaagcatggtagttgtgtccataaacataaagtcctagaatgcaagctgatttagcgatttgagatagtaagtatattttaatttaaacggagtctctttatttttgaatttgcatatacttttcttccctcttcttattcctctgtcaatacctcgcacttattcttcctttccgcaatccctctcttttaatttgatcacaaattaatctcttgtatgtatttacaggaggaaaccaatggcaaacgttgtgtatggttgcaaggatgagtttctcccccttgaaaatatccattcgcatagaaatgggaggcacagtgaccaactcttgcttcttagcaggtctaacatgaccttcaaaactccgtaggacatactggtctttggcggggcagcatctcccgtcagactcaggctggctgggtttctcacagctgcctggatgtgtgtgactcgcagctctaaggacagaattgccaaagcaatacaaaaacacggacgaaaagcaagccacaaaaccccatgccttacacattaggctgatgagtgaagtcgcggaaggtggctctgctcttgcccttttaaaattccagtgcagcaaacacacacacacacacccgctcggttcttcccattcccgccacactgcaccagcttccgtccccaagtcctgattcatgaaccgtgccacctttgtctcattttaaactgtgcagactattttaatcttgccacccccatcccagatttccccctcccttcatcctctggaagctctgatgtaaagcgcttgctaggtgggagagcgcttctcccaatccgctcgggtaggcgagtttccgagaagccccctccccgggaccccgccgcgagcgcgggggaagcgcctcggtccctttaaggtgccgcgctctccgaagtgcgggcagggagcctgggcgccggcgcgggtcctggagccgggtggggaagtcctgcgccctccccctccgtccgcagcccagcctcgggggccagccccctccgcccaccgcacacgggctggccatgcggcggctctgaacgatgtcctcctcctcctacgccaagaacgggaccgcggacgggccgcactcccccacctcgcaggtaccgccccctcctcccccttctcctcttcctcctcttccttcctcacacctcctccgccgccctagcgcgccccgccttcgtgccgggcgtgcggggccccagtcccgggagtcggcggccccgctccccccacccctcctccacgtccctttctcctcccgctcctcctctttctcctccttctcttcctcctcctcctcaccctccttcgggtctctgcgctcccgctccggagcccgcagcctcccccagcggatgccggggactcggaccccgcaccctgagagtctttgttaatggatgtggtgggtgcttgcgggctgctcttctcgagcatcttttcagcagtcgaggcttgcagtgggtgggtgggggtgggggctgtatttgggagtcgcggaggagacttgggtgcgggctctaggggaccccagggagcg

SEQ ID NO: 24686 - DNA, 2300 bp, Homo sapien
aagctcacttttcttactgggtttcagtaggttttcttgaataaatgttccttcatttgttgtgcacctttaggaccatttttagaaatttaaatggttgcttatatataaaacatataattttcaccagttttgctttgagctgggtgtacagggcttctcatgttgttatgcctctgtgggttctgtttcaataacttaaagtcagtgagaatgtggacagtggaaaaccacacaattcaaagtccagtgctcacatagtaatttaatatgcacacacgtatcaactatgaaaatggctcagaactaaatacggattgggttgacagtaactaaagtagggagtcctgcatggttagacctccattccccataaattcatggagtatctactatatggaaggtataggaatagaagataaaccgctaaaaattctgaaaattaggagattttcacaaaaacagaactaacaaactaataagctaaggcagcctattctaagtgcccagagaatacatgctccagtttttcagaagcacaagaattatgtgggactggagtagtcagataggatttctgtggaggaagcgtgagctgagtcccatttagaagaaaggtaggattcagccgggtgtgtaggttgttgggagggcatattccaaggaggcattccaaagcagaagagctcaaatgtgattgtatttggaatacttgggtattgatgactagacctgcctgcttgctggaaggtttgtatagagagatcaagatggagaaatgagatggagagtgatcagaaatgcaggagaggctgagttgttggaccatggagtttggactttatcttagagaagagtgacttgggcaagatattttaggaaaatggttttgcctgtagtgtgtagatggaatgaaatctctgcgtgtgtatgtgtgcatgtgcatacgtgcacatgcaccaggaagcctggaggcaaggacattagttataagattgttacagaggtttggattaagtgaagggattaggaatggaaaggaagtgtctggtggatggtaagatataaccaggacctcaataaagccaagcaattattaaaacaagcatggtagttgtgtccataaacataaagtcctagaatgcaagctgatttagcgatttgagatagtaagtatattttaatttaaacggagtctctttatttttgaatttgcatatacttttcttccctcttcttattcctctgtcaatacctcgcacttattcttcctttccgcaatccctctcttttaatttgatcacaaattaatctcttgtatgtatttacaggaggaaaccaatggcaaacgttgtgtatggttgcaaggatgagtttctcccccttgaaaatatccattcgcatagaaatgggaggcacagtgaccaactcttgcttcttagcaggtctaacatgaccttcaaaactccgtaggacatactggtctttggcggggcagcatctcccgtcagactcaggctggctgggtttctcacagctgcctggatgtgtgtgactcgcagctctaaggacagaattgccaaagcaatacaaaaacacggacgaaaagcaagccacaaaaccccatgccttacacattaggctgatgagtgaagtcgcggaaggtggctctgctcttgcccttttaaaattccagtgcagcaaacacacacacacacacccgctcggttcttcccattcccgccacactgcaccagcttccgtccccaagtcctgattcatgaaccgtgccacctttgtctcattttaaactgtgcagactattttaatcttgccacccccatcccagatttccccctcccttcatcctctggaagctctgatgtaaagcgcttgctaggtgggagagcgcttctcccaatccgctcgggtaggcgagtttccgagaagccccctccccgggaccccgccgcgagcgcgggggaagcgcctcggtccctttaaggtgccgcgctctccgaagtgcgggcagggagcctgggcgccggcgcgggtcctggagccgggtggggaagtcctgcgccctccccctccgtccgcagcccagcctcgggggccagccccctccgcccaccgcacacgggctggccatgcggcggctctgaacgatgtcctcctcctcctacgccaagaacgggaccgcggacgggccgcactcccccacctcgcaggtaccgccccctcctcccccttctcctcttcctcctcttccttcctcacacctcctccgccgccctagc

SEQ ID NO: 24687 - DNA, 2300 bp, Homo sapien
agactggacctgtaatcagtctgatttttttcggacacccaatttcccatctgctgcacagaaaacgtggggggtttgcaaaggaagtagcctctggtccttttgttacttaggtgtggaaagttagggttggttttcctttcaatttagttataagaagtcagcttgaaaatcagccttagattccctgcctccagaccctattctcctgcctcaatatcagcctagctattacaaggattaagcagttcttcctcttagtttccctttgtgaatattctttcattaaatataaaaaagccttttaatatattaatagaaattgtgctaaattaaaaaaataatttatattactaaatacatgctaaaaactagaagagtattataatacttttcttctacatcaggaagcattcagaattgtctgaattgaatgttaaagtcctggaagctctggaactatataacaaattggtgaatgaagcaccagtgtactcagtctattcaaagctccaccctccagcacattacccacctgcatcatctggggttccaatgcaggtgagcatgttttttgagaacattttctaaattataaacaacttttaaaagtaaaagaaaatgttttatagcatagtattaagatttcttttgtctgtgaataaaattataaaatttatctttgattgtttcagtaaatattggctaaacaattaacattcaccagagcaaattagacagatactgatatttcacaaatacattttagttcagttttaacatggatgaaaagaccattaaatatgtgagggtagttctggttcttcatatgcttttgtaagtataaagcataaatcttttatgtaaacataaatcctttttgtaaatatggagtataaatcttttgatttaggacaatacctgacatatcagaagttccccaggtgaggtactaacgctttcctgctgctcaacaagatttaacatttctttacaaatttccataaagatttatttgacttacatgattattaacaggcacaatgaacttctagagtatgctttatacttcctttacttagctgcatgacttacattgttaaaaatctgtgcatagcaaagatatgatacatgtctaggaggtacagactccgtaagccatccatgaacatccataagccatctttttccagtacttttcaccttttttgtgtgcttgccatgtgaagcgaatacttacatttgtcagtatccccattcggaagcgttttttgaaatttcagccaattagccaattgaattcagaatgagcttggatgagcaaaattcatgttaatttatgaaaactggtatgtaaaggtgcatgtgaaggagacaccaaggagaaagggtagaatgtgggtgcataatttagatgacttgacacaacataattgttaagtaaaaaaagaatagtcactatggtaactgtcacgtcagacaagatacatttatcaaatatgccatgccttgatctttttgaaaattaggagggtaggaaagatttttctggctgcaaaagacctttgggatttattcagtttgcttctgttttcagagttgttcgctgctgctgtgaaagtggaacaaaacagcagtgtctgcatcattgtatgataaaactttatgtttgcttttttgtgtgtctgtaaagggttatttgccattctgtgtcaggttttggtgtttagttgcattctacttactgcgttttgccaagcacaactcatgtctctaaaaagttaactttctgtttgattcctcacgtaatctgtacctacactgttcactcaagagcatttgaaatattcaaaagtttctattctaatttgacaaaaatatatctctactagaagcagttggggtaacacattagttatattgtgtaggctactcaggaaccctaaactgcagaagacgctgattctcacagtctcagcctattgtcagtagattgttacatgtctactaaggaggtaatgtgattgtacttaatatagcttatttggcatttctagcattctaaattttcagatgaatggtatttactttaaaaatagcttaatttaaaactggattgatgatcattatggtatgatatgatattaaatgtatgcattgttttgatgctatatttagtagacaggtggtagaccctgtccttaaggagctgttgtcctgaaaataagtagggcacatataaatgtccaaagagacctaaaccatttttgctgtttcctgaggatacatgtcttttgccc

SEQ ID NO: 24688 - DNA, 2300 bp, Homo sapien
aggtgtgaagtgggaaatcaggggtctcacagccttcagagctgagagccccgaagagagatttacccacgtatttattaacagcaagccagtcattagcattgtttctacagatattaaattaactaaaagtatcccttaagggaaacgaagggatgcgccgaattaaaggaataggttgggctagttaactgcagcaggagcatgtccttaaggcacagatcactcatgctattgtttgtggcataagaaggcctttaagtggttttccaccctggaagggccaggggttccttgccctcattccagtaaacccacaaccttccagcgtgggcattatggccatcacgaacatgtcacagtgctgcagagattttgtctatggccagttttggccattctcctgaggcaggagaatggtgtgaacccaggaggcggagcttgcagtgagcccaaatcgcgccactgcactccagtctgggtaacagagtgagactccatctcaaaaaaaatttttttttactattctgctacccaatatccttaaataattattgagtgccttaatcaaaataaaaaattcccagcttgccctttaaaattcttgtcaatctgtttcctcttatacctagtcagccttgttttccattccaacactaagtcttagacaaaaagtctttatctgtccaaaaaatctctaagtcttttttttttttcttttttcgagacagagtcttgctctgttgcccaggctggagtgcagttgcctgatcttggctcactgtaacctctgcctcctgggctcaagtgattctcgtgcctcagcctcccaagaagttggcattacaggcttgcgccaccatgcctggctaatttttgtatttttagtagagacggtttttcgccatgttagccagtctggtcttgaactcctggcctcaagcagtctgcccgccttggcctcccaaagtgctgggattacatgcgtgagccaccatgcccggcctcccaatttatcttgaacatccctaggttcaacgttctatgaaaaacagccccttctgcacgattccttctcatttgtgccccgaactttataaaatgcaaccacctttctgaatgtgtatgagctctctatagcatcaggtctttatactagagtttgtaaaatggttttgattaatctattatttaaaatgttggagtaattctcaacatttaaacatcattgaaaaattgcaaactctagtaggacccacatttcaataaatggctgcaatttaccagtagttgacatctttagatacgcactgttcagttagaaagttacagcttcattcgaaaagcattgagcgtctattacttgggacactgttttagacgctggggatatagtagtgaccaaaacttatcagggagtttataatctaatgaggaggagagacaggcaacataatcattactacagttttctaagaggaacagagaatatgtgggtgggaagggtgcttgggcttttgcattcatttaaatacctggctggatgctgttggaatttgagtttatgactcgtactaccatccgaatcgtcatacaccatcatgtacgttatgcactgcccctataaaactctcaacaagtctaaggcagggagtgtgcctccttcgcctttggattccgggggcccagcagtgtttttatggaggggacacgatggaaagcgaaaagttaggcgtagttacttcgaccaccgctgtcccgggtggttattctgacggggtttggactgggcgcctgggagggtgcaacacaataattgttgaagagcagtcaggtctttcgcagaatctcaaagccacctccgcgccggcagctccgtttctagggaaacaggactgtaacgcgtacgcgtcgtgggtcctcgttctctagctacgagtcctgccgctctgaaacaaactaaattcgtgacaagaacttggccctcagagcccgtcgtccaacgcgaaaaaccacgggtaaccgcgccccctgccgcgccgccgctggcactgcagcttccggggtcgtccagttccaggcgggactacttccggctccgaaggtccccggcttcgtggctagccggggtcctagcgctggaaaggtggccgtagcggccgcctgacccctacaaaagtctgggacaggggcagcgacaaaggccttgggaggacgcccatggtcggagggatctcgccccgggagaaaagttgggacaggagcgcgggatcgaagggtggactccgagccggcctgtc

SEQ ID NO: 24689 - DNA, 2300 bp, Homo sapien
tcctttccctccatgccgtctccccgcaaagaatttcctaagattttgatggattcttatagaaattgtacaagcctatggagtgtttatttctcctcttaataatcacaaataacaaccaaatattagagattccaaacattgaaatggcaggaaagttcttttggttcatagatttgcacactttttccttggcttccctcgaagtgtgagcttatgagagagactagatgtgataagacgtaaggggagaaaaaggtcttggttactggcagaaatatagccgcagggagacataaatgtaatcaaaaaggctttctcaactgcagaaaagaattccagccttttttatccagatgggcaaccctctgggtgggctgattttgtgagtcaatcagatccaaagtatatgtctagagattacaaggaaataaatacatttgtgggtcagaaatgtttcacctggtccgaactgctttctttctctctcattttcattagtttggagtgtgtgtgtatctaaaccgccctgcttttctctcagatcagtaacacatttgctattaactttgatacaacactgctttagaaatacaggttacagttattcagaattttaagttgaatttatttatactgtctccattctttaaagactagaagtggtttaatagaacatacatgatgtatttgtgtgtatttgtgtcatatgcttttggaaaaagtcacttgtcaattccacaaatagttcttgggcgtctactatgtttaaagtatcttgaagtttataaagatgaatgaaatgtccttgattgaatcttggtgtactaccttgtccagaaacacttgctatttactaaaaggataacaaccttacctgcatatcaaaatcacctggggagcttgttgaaaatacaccggcccaggcttcggctctcagcttagggagattctgataatacgcagagcccaaggtgtgtgtagttttaacaaaaagcttcccaagcgaatctgatacacatctaggattaagaaacactgctttaaactaagaaaggactaactgcagaagttcagccacaagtcaaccagatgtatgcccttaacattcacatgagcagttggctaaagtctcttataaggctatttctatttccgaggtttcagaacgggtagttatagtctgaaatacaccccagaggacagagtcaggtccaatcttttctgtaagacaccttgctcaagactgctgtgaaggaataagagagctgcagccaaagatcatcccaaagtctcccagaacactctatcattatatccatctcacatgaaatatgggtgtgtacattttttccttcactagattggcaagtattccagcgcagggcaaatctcttttttctcccaccaaggaacacaatatcccatacataataggtgtttgacaggttttttttttaaattgaattgaatccttacctagctcctagggtctgactatatatacccataaattatacatctgtttataaaacatttcaatcacaccaaagaacatatatatggaagaaagaacgataaacaagcacccatggacccacccccccgtttatgaaacagaactttgccagtgctttcgaagttccttactgaactagatcttttaaaaacagcaacgattttctgaattttaatcagaaggcatgcattccttcattcattgattcgattccgtcatggtcagacccgcctaccaagtgtcaacatgatatacacgatgtaagtattccactgttggggtgaggagggtcaaaagtgacaatatgctatctccagagactacggatcgcctttgctgcaaatggtcccaacccggcctggcgctctagagcaggcgtggtttctgcgcgcggacactttggagagaaactacgcgtcccggcagtccgcggggcgagtgggcggagccgggccgggggcgggggccgggcgccgggcgagaggtggcattgtgtaggggagcgcggagctgcatttgtctgctccaggtgctagccaggcaggcgcagccgtggccggctagggctggaagtgtcagcggcggccgcgggcccggcagaaggccgagtaggagggaccacgcgccgggggccgcgatctctggcagggggcggtgtgccagcggagcaccatgcacataggcgcccagcgccccaactacccctcccgaggaaaagaggccggggccgcgctggggcggcggagagcatgagggaggccggggggcggctcggcttgga

SEQ ID NO: 24690 - DNA, 2300 bp, Homo sapien
cctgcagaaatggagggaggcacactgtgtatgttgaacactaaggagcagacatgtgggtcttattaagaatcatgtctaagttatcaattcctggtagaagcaaatatgtattcagaaccatattataaacattaccatttccagaaaacaacttgcggaacacatgcagggccctggtccctaataatcttggagctgcactttctgagaactgagggctgatcaagatgatcctgtattgtgacagctttcttttcaaaattttacagttatctgaaaaactgcaagacacagagaatgaagccatgtccaagattgtggaactggaaaagcaactcatgcagaggaacaaggagctggatgtcgttcgggtaagtgtaatgatgacaactgcccagatgggcacggtagggaatgtactccagctttcgtccagtggaacgcagagtaccttcatttcagaggaatgcattgatgcagcatatttattggaaacctttgagaggtgatgctcagttgaaaactacacatagtcggcgttatgtatacacatgtgtgtgcaatcagatactgggggttcagtatttccttatcacagattttgggagcaacagtgttttcccatctggaggaggctgagttaattctgtggaacacccatttggttggaaataaaaacacagcatggatttaattcatgccacttatttatttttattaggacttgagcttctttgtatttttttgctttgcttccactcaaaaccagatttggtggttgctgtgtaaacagtgaaatacaacacaggctaggcttaatggcattcaccaaaaaaagggaggggatgtgcaaagcaaacccaatccattttattatcagctaatcccagctattttatttggccttagtattgtttaccttatgtgccaggtatttatggagtgccatccctgtgcttggaattgtgctgaacataagaacaccaaaatgcctggagagctttaaggcaaatggcttgcctttacaccactgctaatgaaattgcaccttttatgtgatggttatcgtgtctgtgtgtgtctgatatcctgacatgtcctacagttcagtccaggaaatatattttctggcacgccttcgagacagagttgtagcatatggactcaattcaacttcagactcttagattattagtaatagacagggtgtgaagaatgtttccctgcttgctggaggtttgtggtgagagatcgcttgtacaaggcccagcaaggaagttcagttccataaaaccctttcactagaacctctatgggccccccccttataaaaggaaccaggacagtctttgaattgaaaattgtaacttctttgttttctgctaaaaagctagacagaaataagtaattagtgaagggaagctttggcctgttttgttaaccgcattaccgatgggaaaatgttacaacaatcgctatcctgagcttggtcaagggggcgttgtgagggccagagaaagccattcagaaacagtcagcccctggttactcatgagtagattattccatgctttgcagatttttaatcccagtctgatttgtatccaagtctgatttagggcccttttgtctattgttagctgatatgtgtatctaagagttacaaatgaatgttaaaataaaaggaaggaaaacatgcaccaccagaacaccctcaggagattccagagtcagcattccgggtcatttctgctctgtttctttccacctgcagggaaaattgagttagctgcatttattaaatggaaagaacttcattaccaacaacaatagctagaatatattacatgcattactagcatacaactaataattaatgggactttataggttctagctgaattccaaagaattcccattcatatgagtatctttttttctctttatcctcagtttgccaatctgatgctactaagtatgaatgttatgtgaagataaactcttgaccttggactttattgcaggaaatctacaaagatgcaaatactcaagttcacacattaagaaaaatggtcaaagaaaaagaagaagcaattcaaagacagtctaccctggaaaaaaagattcatgagctagagaaacaagggaccattaaaattcagaagaaaggggatggggatatcgccatactgccagttgtggcttctggcacattgtccatggggtcagaagtggtagcaggtaactctgtgggacccacaatgggggccgcttcctcaggacccttgccccctcct

SEQ ID NO: 24691 - DNA, 2300 bp, Homo sapien
cttaaacattttcttaggctgggcaagatggctcacgcctgtaatcccagcactctgggaggccgagtggggaagctcgcttgagttcaggagtttgagaccagcctgggcaacatgtgaaactctgtctctacaataaatataaaaattagccaggcatggtggcacacagctgtggttccagctacttggaggctgaggtgggaggattgcccgagcctgggaggtcaaggctgcagcgagccatgattgcggcactgcactgcagcccgggtgacagagcaagacctcaaaacctattttctcatttaggccattcatatcccttagtctgcttgaaataacccagcagccaatatatcttcattatcggaatcacccacaggaagtcagccttcatgacgttgtacttctggtagtctagtcagccactgtctgcagtccctgatcatcttctaaggtttgtttgtaaacatgtggtctgcaaccaagaatttaggatgtccaaatatggcaagtttttgccctctctgctatctagtaacatgagtaataatctttgctctccaacactttttatttgtcccaaccattgtcctaatattgtaactgtaatgcagcaaattagttgcctgagttaaaagaaaaaaaaaaatcaacccttggcccttaagacgtcttttaatacaatgatgtgttagtcaaccaaatgatgacctcaaatggctctggccaaggccatgtgtgttgttttccagctttaaaaacctacttgcgcgcctcttgccaaccttcctccagtgtcaaagtgtcatctgcaaggactgttgtctgattgttcctgagggtcgtaggcttttggtgggatcttaattccattctctttgatgtctttagctgtgaaaattaagaagccaatcaagacgaagttcagaatgccagtgtttaactgggttgctctgaagcccaatcagatcaatggcacagtcttcaatgaaattgatgatgagcgaattctggaggtatttttctcattggttagaaactagaggtgcactctgtgcagcaaagccggcatgggtgttctgttaacctggaagtgtcagagataaagtactagtgttttaagtcccctgatgtaaagaagaaacatgtatgtaatattggagaataacatttgacactgttttgtaaggtggctctaaaactgttcaaagagttatgttaaattggaataaatgcttttgagcatctttagtgtatgccacagaatatagatctgacataataattccttcccttaattgagagaaagacataaaaacttttggactgcaagtgagctcaattatcacactcactgccttatctgatggataattttaatctgtggcagctgtctgtgcaagctaattattgaaaagtaattgaattagtgggttagaatcggtagtctaatgttcacttatttttttattttattttatttttaaattattattattattattttttgagacggagtctcactctgtcgcccaggctggaatgcagtggcgcaacctcggctcactgcaacctcttcctcctaggttcaagcaattctctggcttagcctcccaagtagctgagattacaggcacacactaccatgtctggctattctttgtgtttttagtagagagcgcatttcatcatgttggccaggctggtctcaaactcctgaccttaagtgatccacccgccttggcctcccaaagtgctgggattacaggcataagccaccacatccgacctatgttcacttttgtgtatgtgccagaagttgtactataacaaaaacaagaaaaatagaggaagccatggccaaagacaagtacttaatagaaaaagtgacgtttttgcttaagaaactaactggtggcttccggacttcatttttaaatataatccaattttccatggtcattcctctctatcttaggatttaaatgtggatgaatttgaggaaatattcaagacaaaagcccaaggacctgccattgatctttcttcaagcaaacagaagataccacagaagggatcaaacaaagtgacattactagaagcaaacagggccaaaaatcttgccataactttaaggaaagctggaaagactgctgatgaaatatgtaaagctattcatgtgtaagttcaggaaaattatattctagttagtttatgataaaatgaaaatgagaaagttatgaattagtagatgacaaatatttcaatagtgagacaagacctaagataaaagc

SEQ ID NO: 24692 - DNA, 2300 bp, Homo sapien
tattttctgctatgggaggatcaactggtactaattttctggaacaccatttgacagagagcacatagaacctataattactcataccctttgactcagtatttccatttctaggaattttttctcaagtgtctgaattttgaatcctgtattttatttataattgcaaattaacaatctaaaggtctaactgtgggaatgattaaatgtgctgtaacactagttaatacagtgaactattattcttccaccgttagcatactgatgaagagtgtcccaagaaagatttgtgtttagaaaagaaagcagggtatgctttgcatgtacagttgaatctcagctaagtaaactatgtggggagaaagactgaatggaaataggttaaaatattagcagaggttggatggaatcaggaaattttttcaaactgctttttgtaagtacttttctatattttcttaaatttttgttgttgttgttgcatgcagggtgctctaattttcagagtcacctaactaatgtgaataagactagagaaaatcctccgtggactccctccagactgtgcaggcctaacgtgattgtcacatgagaaggctgggcagtgggttgagtcccccgaccagggagctagttatttaatatggagtgtctagtcagtcacagttctggcctccagcagatcatgatcagttaagcatgtctgtttcaggtcttcacaggctaggaaataagggagggcctaagctaaatgtaaaaactggagcataggagccctgctgtgtaggaggcacctgcatgcacctgctggctgtacatccccatttctcctctggctttttactttgaagagcactaaaattagagccgtcctgcttttaaggcaaggaaggtgggatagcagatgcagggctgggagagttcatgtaatcagtgtcccccttatccatgggggctgtgatccaagacccccagtggatgcctgaaacctcagatagtactgaatcctatatatacactgttttttttctagagatgcatatctgttataaagttgaatttataaattaggcacagtgagagattcacaataactaaaaaataaaataggccaggcctggtggctcacacctgtaatcccagcactttgggaggctgaggcgggaggatcacctgaggtcaggagtttgagagcagcctggccaacatggcgaaaccctgtctctactaaaaataggaaaattagctgggctaatttttgggtcacaggcacctgtaatcccagctactcgggaggctgaggcaggagaatcgcttgaacgcaggaggtggagtttgtagtgagccaagattgtgccactgcactccaccctgggcgacagaacgagactccatctcaaaaaaaaaaaaaaaaaaaaaaatagagcagttaaataaaacacgttacttgaacacaaacactgcaataggcggcagttaacctgataacccagatggctactaagtgattaatggcaggtaatgattacagcgtggatccacttgacaaaggggtgattctcggtctagggtggatgggaatggcacgtgcgaggttttatcatgctgctcagagtggtgcgcaattcaaatctgatgaattgtttatttctggaattttccacttagtatttttggatacctgaaacctgtgggtttcctgaaaccatgggaagtaaacctgtgggtaaataggaactactgtagaggaaagctgcgaatcattcttaggtgcttagagtcatccctatagttaagcatgtgccctggttggaaagtccttgagccagttaagcatcaatggactggttcactaaggaacaaatggaatcctgaccctcctctgggaatgctccagcctgttgggcgactgttactcagttaatgactctgggtgggaaatcgtcacctgaggggtaagtgtcttgttaccctttactcttgtacctaacccacgttcccttttgttttcagctcttagatacaaagtcaacagacagaaagcaaacactgttgcactatatatccaatgtggtgaaagaaaaatatcaccaagtgtccctgttttataatgagcttcattatgtggaaaaagctgctgcaggtacttgatttcagctattaccgttcgtcttgggtatttaatgcctttaattgtggtggagccattccctgcttaaacacttttcagaacccatttaaaaagccaaggctaagaagtcagacacactgagctggaacacatcggccgtggtgttgtc

SEQ ID NO: 24693 - DNA, 2300 bp, Homo sapien
accgagaagctacgtttggtcagtggctaccttattgaacagtgcaggtataggaattgtgggaacagaatatagggttacagtttcttttaggcacatttgtgtatagcagcggtccccaacctttttggcaccagggaccggtttagtggaagacagtttttcttggtggggtggggtggggagttggtatcatcaggcattagattctcataaggaccacacaacctagattcctggcatgctcagttcacaatacggtttgcagtcctatgagaatctgatgccgccactgatctgacaggaggtggagctggggcggtaatgcttgttccaccactcacttcttgctgtgtggcttggttccggttccgtggctgggggttgggatcccctggtgtataggattaaactccctgaggattgggttggaagcaggaagtgtggaaattgaaactagatatgggtttgaatcctaggtctccaaactactttgggaaaattatacatcctcctcttaaggccccttgttttttaaaagtaaataaaaatacctagaacacattaggcactatttttaaagacagaaagtatatatttaaggaaacatgcatatacattctttagcctcatcatttgaggtagatatccagtaatttaagttaacttttacctttttttttttaaagctaaaaattaggttctatcttaaagggtaggaaatagaaccttaggaagataatgtgcagtttcaaaagttattttctctaaaggacaaaatatttttttgcctagaggcagttgttactttgcccaaatagcaaatattctttgtgcccaaacaggtttgggataacattggtagaagagttttaactatgtcaaagtttttgtgtgttttcatgttagacgcttatttctcatgtactcgagatgactttccaaatataatttttctccctagatatttttagatgaattacatgaacatggacaactgcattctatgtcatcttggatggaattgtatccaactattagttctgatattagattcactaatatgcttggtcagcctggtaagattattttctttcctaatttaccgttatggtagtagttgaaatgggccaaatgcaaaggtgattgtgttgggggaaagggtgctttatttttgttttttaaacaacaaagtaattgcagctctttggttagagctagcttttgacttctttagttttttcattaggatcaactgcacttgatcttttcaagttttatgttgaggatcttaaagcacgttatcatgacgagaagaagataataaaagacattctaaaggtaaatatatttattcttaccttttaaccaatagtatatcttaaaagttagtactgtattcctttgatttatgcattattaatgttaagatttcttttttttaggataaaggatttgtagttgaagtaaacactacttttgaagattttgtggcgataatcagttcaactaaaagatcaactacattagatgctggaaatatcaaattggctttcaatagtgtaagttatgttttctgttgtaagtaactagtttagtagtatagtttttaatttattcagataaaagcagctaagttgcagagtgttggaataagggaatatgaatagaattttacagagtggtagccagtctttcaggtaaggtaaaacaaaaaactttatttagatgatggattgatattaaacttcctttgctcaaattaactggtattatacataaaatggccattataaatcaggccttgggccacacataaagtacactaacgatagctgatgagcttaaaaaaaaaattgcaaaaaatccttatagtgttttaagaaagtttacaaatttgtgttgggccacattcaaagcggtcctgggccacaggttggacaagctcgttttaaacaatgcgtgattcctaaattaacaataaattatttcagctaatagttatgatactattataactgattaaatatgattttcttaatagttactagaaaaggcagaagcccgtgaacgtgaaagagaaaaagaagaggctcggaagatgaaacgaaaagaatctgcatttaagagtatgttaaaacaagctgctcctccgatagaattggatgctgtctgggaagatgtatgtatacttgttatttttttctaatggaattcttttctttacagttgagaaatttaaaatatttttatttttcattttatagccacaaaaataagctaaatttatttgtagaata

SEQ ID NO: 24694 - DNA, 2300 bp, Homo sapien
gatccactattgaaataatttcagtctcacagttctttgactttatcagacagatctcaccagtctggaagtgtaagaaacactagcaaaacaggtatgatagagtgaggtaagttctaaggtactagagcatcactaaagatggtttccaaactattttagatactcagggagcaagtgaggaagctggtgagcacaacaagagtggttaagacaaaattccatttatgttgaagggtaagggtagttgacagaagggtagatacaggcagggtttgagaaaagaatttccgagttgtaagggagtatggacatatttagtcttgtttgaagaggagtgagtgcagttgtaagtgcctgatgttactttgggacagctctatccaataaaaatgtgaatgccacaaatgcgattttaatttcctatttattttagtaatttaacccaatataaccagatattattttaacacatcaatatttttaaaaattgctaatatttgtggtattaaatcttcaagatcattgtgtattttgtacttaacagcacatcacaactcagactagctacatttcatgtaccgagaagctacgtttggtcagtggctaccttattgaacagtgcaggtataggaattgtgggaacagaatatagggttacagtttcttttaggcacatttgtgtatagcagcggtccccaacctttttggcaccagggaccggtttagtggaagacagtttttcttggtggggtggggtggggagttggtatcatcaggcattagattctcataaggaccacacaacctagattcctggcatgctcagttcacaatacggtttgcagtcctatgagaatctgatgccgccactgatctgacaggaggtggagctggggcggtaatgcttgttccaccactcacttcttgctgtgtggcttggttccggttccgtggctgggggttgggatcccctggtgtataggattaaactccctgaggattgggttggaagcaggaagtgtggaaattgaaactagatatgggtttgaatcctaggtctccaaactactttgggaaaattatacatcctcctcttaaggccccttgttttttaaaagtaaataaaaatacctagaacacattaggcactatttttaaagacagaaagtatatatttaaggaaacatgcatatacattctttagcctcatcatttgaggtagatatccagtaatttaagttaacttttacctttttttttttaaagctaaaaattaggttctatcttaaagggtaggaaatagaaccttaggaagataatgtgcagtttcaaaagttattttctctaaaggacaaaatatttttttgcctagaggcagttgttactttgcccaaatagcaaatattctttgtgcccaaacaggtttgggataacattggtagaagagttttaactatgtcaaagtttttgtgtgttttcatgttagacgcttatttctcatgtactcgagatgactttccaaatataatttttctccctagatatttttagatgaattacatgaacatggacaactgcattctatgtcatcttggatggaattgtatccaactattagttctgatattagattcactaatatgcttggtcagcctggtaagattattttctttcctaatttaccgttatggtagtagttgaaatgggccaaatgcaaaggtgattgtgttgggggaaagggtgctttatttttgttttttaaacaacaaagtaattgcagctctttggttagagctagcttttgacttctttagttttttcattaggatcaactgcacttgatcttttcaagttttatgttgaggatcttaaagcacgttatcatgacgagaagaagataataaaagacattctaaaggtaaatatatttattcttaccttttaaccaatagtatatcttaaaagttagtactgtattcctttgatttatgcattattaatgttaagatttcttttttttaggataaaggatttgtagttgaagtaaacactacttttgaagattttgtggcgataatcagttcaactaaaagatcaactacattagatgctggaaatatcaaattggctttcaatagtgtaagttatgttttctgttgtaagtaactagtttagtagtatagtttttaatttattcagataaaagcagctaagttgcagagtgttggaataagggaatatgaatagaattttacagagtggtagccagtctttcaggtaaggtaaaacaaaaaact

SEQ ID NO: 24695 - DNA, 2300 bp, Homo sapien
tgttgtttgtgtcatacttttctgccatgtgcagtagctgatccagagctcattaaataaaactagatgattatgaatgtggaaacttgatgaggtacaaaataaatctgtagttaaatgtagaatttaacttgttgacttaataagtttttgagagactggaagaaggggagaaagactgtattcaataatcaagttggaggccagacgtggtggctcacacctataatccctaccgtttgggaggccaaggcaagcagatggcttgagcccaggagttcaagaccagccttggcaacatggcaaaaccctgtctctaggggaaaaaaaaaaaatacaaaaattagccgagcatggtggcacgtgcctgtagtcccacctccttgggaggctgaggtggaaagatcacttgagcctgggaatgtcaaggctgcagtgagccataattgcaccactgcactccagggtgacagcgagaccctgtctcaaaaaaaaaaaaaaaaagaaaaagaaaatttgattgccttttacttaaaaacattgaaattattgatatttgtggagtaaaaagaggctattttcattaagtaggcatagcattttgaataattgttttatgtagcattcttcattttagattgctttattatgtaaaattgtgggtaatattaaaatatttttgatatgttatgaagcctattttctgtatgtatttctttgatctcctcagtattccagagaagtctgtaatttagttctgtaggcagtttggtagtctgtgtagctgcctttagatatagagatagtctagactataagcagtgcctaatgtgaattatcccctctatctctaaggagagagggaggcatgtgttttttgtttgtttgttttgttttgttttgttttttcataattatccaggagtttgtctttaatatatttatgaactttgaataggaagtattcattttgtagttttaaatttagtttaaaaattggttaaaattaatttttattgtataatttttttttaacagaaaagcagagcaaatgtttggagagatggaagtttggaatgcaatatcagaacgtgatcgtcttgaaatctatgaagatgttttgttctttctttcaaaaaaagaaaaggtattctttattcttagttattggtatttatagataacacaagatgtttcctcattcggatgaggattggttttataatatgtacatttttctggcttagtttatccagtttatgtggtatagcagatttatttattggaagtaaaatttaatgatggaatgtatagcttctgtaataatcttctttatcgttcatgtagcatattaagtactgatgtagactcagtgggtactcattcaattatttgtattgtcattagttggctatcttatgctcactttgaaaagataccttttttgctcattaggtttaaaaatgctgggtttttttgcttataaccagcatgattgttacaagaatgacagcaacatgcagttgtttctactaaacttacaacattttaaaatacctattttactcatgtctctttttcattgtgcactattatattttatgttatctggtttccaaggaacacatacagatgcaagtattatcaaatttaaacatagctgaaggtcattgaagattttagcatttacctgcaatgcgacttgtccatagtaaccttagtttcagactgtctgtaatacatagtggtagaaaggtttatgtcgtatgggggaaaagccaaaaacatggtttccagattctggcttttagaaggaggtggaaaatttgaagctaagtaccaaagccaagcgcttaggaaagagcattagcaaagtcagcagtgtggccatttaaagtaaatgaaatttacttgaagtttgacttaacctttgcaatttggtcatccgttagaatataaagaagccgtcactaattgcaatttaaatatcttaatttcttggaactttgaaacatacatattcatacttttgctataggaacaagcaaagcagttgcgaaagagaaattgggaagccttaaaaaacatacttgacaacatggctaatgtaacatactctaccacttggtctgaagcccagcagtatctgatggataatccaacttttgcagaagatgaggagttacaaagtaagaataatggctaagtaagagaaatagttttaaacagcgtcctccagcagcaaagaattattttcactttttatatgagataactaattgaattttatgcagttgttt

SEQ ID NO: 24696 - DNA, 2300 bp, Homo sapien
attatttaaatttctcagaagacttttccattattcaaatttccgttacagtcatgatttaacatttggcttatttgaaattattcgggcataaactaatcattaaacagctataactactgacctagattctgaaatcttgatagaatacctgaggcaaaaacaaataaataaatgcaaaataaaacaaaaacagtcttacttgtcccattggtggccctcccatagggggcatcatctgcggcatcattccatgaggtacaggaggcatattcgctctctgacccatagggtgcattcccattggggcataatgcatgccagggtgccccatctgaaaaacagtgaacatttttaaatgagcaaataatactaaatgcttctcaaaaatctcatttcaacagatcagttatctgaagcgacataatattaagcttatgtgtaataacatcattggattagtctataccttgtttcaaacaaaacgcattctgctagtatttaaaacgagcttgcaaattccgtaaaaaaatgggaaaagttaagatgaatcctggaccgctggatcataggttttctctctcttttttttaagcactgacttaaccagctactaattggcttgctaagcttggaggatacacattgaatactaattttaaaactgttatggtgaaaacaacaactctcctatttcatgcagatataaaagatagccagctattgttattttataacactactgattttaaactttaaaatgctctatccaattaactcaggtgagagtcggtcttacaaaacacaaacagtatggctacccaggcacaattcactcctaacaaacttatttcctaacataacctttaagacaggtaaaattccttctgccaaaaatacattttcaaagactgaggttctgtcactcacggacactaaatgcaaacaactaattcatcctttttaacgcagtttaaaaagacaactactttctttaccgatgagtccattgttctatgttttaaattaaaaccacctaattatctcctgccaattgtcccaacagttccccctgcagaccaccccgacgactaatgaaaacaaattttggcagccgctgttaaagtcttacagtatcaagcccctgcctccccctcccagctaaaatcgggcctaaagctccaagacgctcaccccgcccaagagccagcaccttcaccacgcatctgtctaggccaagcccacggggaacttccagggtctcacatccttctctttgtgcatttccaccctccacttctctccctcagaacatatcccaccatctcgagttcttccttcgtccactcttatcttcttctcctttcggagaaagcttcctgtttctcactccgtttttcattgtgccgccttccccctgccccactgatcccttaccgagggccgtctcctcaggaagccgtcagcagagacccaagagccggagcagaggcttgagccggacaatctccgctccccgtccccaggaccctgcgagggaggatggctctccatttcactcaccatgaggcctccacgctcagctcccgtccccggcctcatcgtcgggctcagactgctccgccggcggccactgccgctacacataccaacaagaagcgatctgagtggctggcgcccactggggctaaaggttaaaggctgccctgcgctacggggcgggatcagcggggccaacaggctgacgggcttccccgctgtccaatcagaatgcgccgccgacacgcagctctgcggcgattcgcccccagcctcagcctcactcggcgtcgcctgcatgggggggggggaggaggaggacggaggaagtttctgcgccgagtcctccgtcgggaaaactctaccaacttccccaggggaagggaagacaacagtgtcccagcttcccgagcttagaccgcctcaccccgtagggggtggggcagtgggggtctgccaccttcaccctccccgcccgagttacgtacgccccacaaacctgaggccgccaggggtagggtggagggggcgggggtaagcagcctgtagtgttagcggtggctgggaccgaatgcgcgcgcgcggtgctcgaggcggaggggaggaggcggggaaggcgaaaggaggggttcggaggagagggttcgatctccgtacgcaccaggtggagagcgcgcgcctggggaaggaggcgtgtcgagtagcgggagggaagttgtagtacgggtggggagaaccacactaaagggagatgggggtga

SEQ ID NO: 24697 - DNA, 2300 bp, Homo sapien
ttgttattttataacactactgattttaaactttaaaatgctctatccaattaactcaggtgagagtcggtcttacaaaacacaaacagtatggctacccaggcacaattcactcctaacaaacttatttcctaacataacctttaagacaggtaaaattccttctgccaaaaatacattttcaaagactgaggttctgtcactcacggacactaaatgcaaacaactaattcatcctttttaacgcagtttaaaaagacaactactttctttaccgatgagtccattgttctatgttttaaattaaaaccacctaattatctcctgccaattgtcccaacagttccccctgcagaccaccccgacgactaatgaaaacaaattttggcagccgctgttaaagtcttacagtatcaagcccctgcctccccctcccagctaaaatcgggcctaaagctccaagacgctcaccccgcccaagagccagcaccttcaccacgcatctgtctaggccaagcccacggggaacttccagggtctcacatccttctctttgtgcatttccaccctccacttctctccctcagaacatatcccaccatctcgagttcttccttcgtccactcttatcttcttctcctttcggagaaagcttcctgtttctcactccgtttttcattgtgccgccttccccctgccccactgatcccttaccgagggccgtctcctcaggaagccgtcagcagagacccaagagccggagcagaggcttgagccggacaatctccgctccccgtccccaggaccctgcgagggaggatggctctccatttcactcaccatgaggcctccacgctcagctcccgtccccggcctcatcgtcgggctcagactgctccgccggcggccactgccgctacacataccaacaagaagcgatctgagtggctggcgcccactggggctaaaggttaaaggctgccctgcgctacggggcgggatcagcggggccaacaggctgacgggcttccccgctgtccaatcagaatgcgccgccgacacgcagctctgcggcgattcgcccccagcctcagcctcactcggcgtcgcctgcatgggggggggggaggaggaggacggaggaagtttctgcgccgagtcctccgtcgggaaaactctaccaacttccccaggggaagggaagacaacagtgtcccagcttcccgagcttagaccgcctcaccccgtagggggtggggcagtgggggtctgccaccttcaccctccccgcccgagttacgtacgccccacaaacctgaggccgccaggggtagggtggagggggcgggggtaagcagcctgtagtgttagcggtggctgggaccgaatgcgcgcgcgcggtgctcgaggcggaggggaggaggcggggaaggcgaaaggaggggttcggaggagagggttcgatctccgtacgcaccaggtggagagcgcgcgcctggggaaggaggcgtgtcgagtagcgggagggaagttgtagtacgggtggggagaaccacactaaagggagatgggggtgagcagttaaggaaccgcgagagcgccaggtagagaggtgcccttaatgggggaacctggagaagagtgtgagcgtagtggggaagaagggagaagacaaataggttcgggaatgtgtctccgagggcgcgagcgggcgctaggacccggcgtcgaaaagatgaggctttggggctgtcggggcgcgcgctcccgttggtgacgcgggggtggcggaggtctccggccgggacgaagccccgcagggagtggatactcgacagccttcggcctccgctcgcttctccctgcgcgctttcctgctcccctttccggctacagccctggggtcgagctctggtcgaagcgcattccgcctctcctttggccctgcggcttcctttgcaacccgccgcccacccttgctctccgtggtttacccctgggctctgaggcctggtggtagcggccactgccgcggattggctgttgcggacccggggcggggcaggtgggagaggctcgttctccgcgggtttcgttgtgtttcgcgccatgtcgtttgctgagagcgggtggcggtcggctctgcggcgccgcggtcccggcaccccgggccctgtggctcggccatcgtattcctcctttactcagggggacagctggggtgaaggcgaagtcgacgaggaggagggatgcgaccaagtggcccgcgacctgcgggcggagttctcggctggggcgtg

SEQ ID NO: 24698 - DNA, 2300 bp, Homo sapien
tgcaacagaactccgtgcactacacctggatacaaacttaaaaactgagaggctaattattttacctataaaagaagaaatttggactatgcgatgaaaatctttgtccctcaagattctgtgtagaggaattggtggacagcacatctttatttgtggatgaaggccattgaacatggcctattttaattatatgcacttttcactgtctccttttaatggtgggtgtttcgcattttgtttaatcttcacaatatttcatccccagtgttcaaggacttgaagatatttcttcaagagtacccatttaatcaaacgatcctttttaaaaatacgtctcctgatcatggatcaggacgctccacttagaaaaggcaaagggcgggagagcaaagtaagatgcaaatgaggactctgggtgaaagcagctgccagcctgagggcttagcgcgagggaaagggagatgggtggagacgagagccacaccctggctcaactttactctggacagactttcaaggcgtcggcttcaatacctttaacgatcaagtaggcgatggcgaggaggaaggcgagaagaatggcgaagagcagcgagcagagaatagagaggacctggaccggccaccgccgaggctgggctctgctgcccgcggccgcgggaaagataccattgcgcttatcgggcagaacgggcgacccgttcccgtccggcgggagcaccgagcgctttctgggctctgaccacgccccagccgagaactccgcccgcaggtcgcgggccacttggtcgcatccctcctcctcgtcgacttcgccttcaccccagctgtccccctgagtaaaggaggaatacgatggccgagccacagggcccggggtgccgggaccgcggcgccgcagagccgaccgccacccgctctcagcaaacgacatggcgcgaaacacaacgaaacccgcggagaacgagcctctcccacctgccccgccccgggtccgcaacagccaatccgcggcagtggccgctaccaccaggcctcagagcccaggggtaaaccacggagagcaagggtgggcggcgggttgcaaaggaagccgcagggccaaaggagaggcggaatgcgcttcgaccagagctcgaccccagggctgtagccggaaaggggagcaggaaagcgcgcagggagaagcgagcggaggccgaaggctgtcgagtatccactccctgcggggcttcgtcccggccggagacctccgccacccccgcgtcaccaacgggagcgcgcgccccgacagccccaaagcctcatcttttcgacgccgggtcctagcgcccgctcgcgccctcggagacacattcccgaacctatttgtcttctcccttcttccccactacgctcacactcttctccaggttcccccattaagggcacctctctacctggcgctctcgcggttccttaactgctcacccccatctccctttagtgtggttctccccacccgtactacaacttccctcccgctactcgacacgcctccttccccaggcgcgcgctctccacctggtgcgtacggagatcgaaccctctcctccgaacccctcctttcgccttccccgcctcctcccctccgcctcgagcaccgcgcgcgcgcattcggtcccagccaccgctaacactacaggctgcttacccccgccccctccaccctacccctggcggcctcaggtttgtggggcgtacgtaactcgggcggggagggtgaaggtggcagacccccactgccccaccccctacggggtgaggcggtctaagctcgggaagctgggacactgttgtcttcccttcccctggggaagttggtagagttttcccgacggaggactcggcgcagaaacttcctccgtcctcctcctcccccccccccatgcaggcgacgccgagtgaggctgaggctgggggcgaatcgccgcagagctgcgtgtcggcggcgcattctgattggacagcggggaagcccgtcagcctgttggccccgctgatcccgccccgtagcgcagggcagcctttaacctttagccccagtgggcgccagccactcagatcgcttcttgttggtatgtgtagcggcagtggccgccggcggagcagtctgagcccgacgatgaggccggggacgggagctgagcgtggaggcctcatggtgagtgaaatggagagccatcctccctcgcagggtcctggggacggggagcggagattgtccggctcaagcctctgctccggctcttgggtct

SEQ ID NO: 24699 - DNA, 2300 bp, Homo sapien
tctccgctccccgtccccaggaccctgcgagggaggatggctctccatttcactcaccatgaggcctccacgctcagctcccgtccccggcctcatcgtcgggctcagactgctccgccggcggccactgccgctacacataccaacaagaagcgatctgagtggctggcgcccactggggctaaaggttaaaggctgccctgcgctacggggcgggatcagcggggccaacaggctgacgggcttccccgctgtccaatcagaatgcgccgccgacacgcagctctgcggcgattcgcccccagcctcagcctcactcggcgtcgcctgcatgggggggggggaggaggaggacggaggaagtttctgcgccgagtcctccgtcgggaaaactctaccaacttccccaggggaagggaagacaacagtgtcccagcttcccgagcttagaccgcctcaccccgtagggggtggggcagtgggggtctgccaccttcaccctccccgcccgagttacgtacgccccacaaacctgaggccgccaggggtagggtggagggggcgggggtaagcagcctgtagtgttagcggtggctgggaccgaatgcgcgcgcgcggtgctcgaggcggaggggaggaggcggggaaggcgaaaggaggggttcggaggagagggttcgatctccgtacgcaccaggtggagagcgcgcgcctggggaaggaggcgtgtcgagtagcgggagggaagttgtagtacgggtggggagaaccacactaaagggagatgggggtgagcagttaaggaaccgcgagagcgccaggtagagaggtgcccttaatgggggaacctggagaagagtgtgagcgtagtggggaagaagggagaagacaaataggttcgggaatgtgtctccgagggcgcgagcgggcgctaggacccggcgtcgaaaagatgaggctttggggctgtcggggcgcgcgctcccgttggtgacgcgggggtggcggaggtctccggccgggacgaagccccgcagggagtggatactcgacagccttcggcctccgctcgcttctccctgcgcgctttcctgctcccctttccggctacagccctggggtcgagctctggtcgaagcgcattccgcctctcctttggccctgcggcttcctttgcaacccgccgcccacccttgctctccgtggtttacccctgggctctgaggcctggtggtagcggccactgccgcggattggctgttgcggacccggggcggggcaggtgggagaggctcgttctccgcgggtttcgttgtgtttcgcgccatgtcgtttgctgagagcgggtggcggtcggctctgcggcgccgcggtcccggcaccccgggccctgtggctcggccatcgtattcctcctttactcagggggacagctggggtgaaggcgaagtcgacgaggaggagggatgcgaccaagtggcccgcgacctgcgggcggagttctcggctggggcgtggtcagagcccagaaagcgctcggtgctcccgccggacgggaacgggtcgcccgttctgcccgataagcgcaatggtatctttcccgcggccgcgggcagcagagcccagcctcggcggtggccggtccaggtcctctctattctctgctcgctgctcttcgccattcttctcgccttcctcctcgccatcgcctacttgatcgttaaaggtattgaagccgacgccttgaaagtctgtccagagtaaagttgagccagggtgtggctctcgtctccacccatctccctttccctcgcgctaagccctcaggctggcagctgctttcacccagagtcctcatttgcatcttactttgctctcccgccctttgccttttctaagtggagcgtcctgatccatgatcaggagacgtatttttaaaaaggatcgtttgattaaatgggtactcttgaagaaatatcttcaagtccttgaacactggggatgaaatattgtgaagattaaacaaaatgcgaaacacccaccattaaaaggagacagtgaaaagtgcatataattaaaataggccatgttcaatggccttcatccacaaataaagatgtgctgtccaccaattcctctacacagaatcttgagggacaaagattttcatcgcatagtccaaatttcttcttttataggtaaaataattagcctctcagtttttaagtttgtatccaggtgtagtgcacggagttctgttgcagaaagtatagtccactcgtcctctaataattttgttt

SEQ ID NO: 24700 - DNA, 2300 bp, Homo sapien
aagaaacttagccaacgtagtagccaaagcaaagataaaatagaatacatgtgtatagaagggaaggtgtcataaccaaatgcttaatttaaatgacagtaactttgatctgtattttcttgctctcatatataaagtgtattttaacaagtttcccatctttttgtccttcttaaaaatattgttctagttcacataaaaaagcaatgtcttaataagtattaaaatgactagtataatttgtagaatatcaataagagaatgtggcaaaactagaagggacataatctgaaggtcctggctttggtattggatatagtatacaatggctacattgttacatatgagtactgttgtaagcttaagggtgaaaagagaagctgaccagcagagtgtacagtgattatttgtatttgtggttgcttgatatccattcaaccatcccaaaataatttcagatgctgccttcaactagagaagccaaaggagtaggcacacagtctaatcttggccaactgggcactctctgcaaggatccatctatatacattatcctgaccaggctattcccactatcagacagtccctttgcttcattttccttgactctctggcactttctaggttcctccccaccagtcctgattcccttttccttagtcagatggtgtgacagttaatattaagtgtccacttcattgaatgatgcaaagtattgttcccgggtctgtctgtgagggtgttgccaaagtagattaacatttgagtcagtggaccgggagaggcagacccacccacaatgtgggtgagcaccatcccctcaactgccagagaggcaataataaagcaggcaggtggtgggagcagtggacttggtgagtcttctggccttcatctttctcctgtgctggatgcttcctgccctcgaacatcagactccaagttcttcggcttttggactcttggacttacaccagtggttctcaggccattggccatagactgcaggctgcactgttggcttcccttcctttgaggttttgggactcggactgagccactactggcttccttgctcaacttgcatacagcctattgtgggacttcaccttgtggtcgtgtgaatcaattcttcttaataaactccctttcatgtatacatatatcctattagttctgtccatctacagaaccctaatacagatggtttctggcagctgacataaccaagagcatgggcagaaataggaaaatagacaaatatagaaaatctctttttaaatctgacttaccagaagtctgtcaatcatatcttttccaggaaacgacttttggtattggatattgtccccacttctttggtgtgagtctccattgattgtatccttatctttcctatttccaatctttcttgtgtgtgtggtgggggcggggatgttactctgctgcttgtgctttttatctgcattcttagctctttagctttcaatagtactttcgtcctgataaatgtatttgaagttataaattacccttacacagtgttttatctaggtcctacaaattctgacatgtagtattttcactgtagtttaagtattttgttaagtattattcttcccattcgacaggtaaggaaaccgggaaatgctaagatattaagtaacagttgtagttcaaactcattacgttgtattaactaaagaatcatatcttgataactacagtaatattctttctgataacacttaaggtggaactgaatttggggacataatttcttgatgaaacagcaagattaataatagtttaatttattctaaaatgtcttttcaagtccctgagactaatcactagccacaggaatacttacaccccgtttatctttcacaagtaactaaatagaatgctgtaagctacacataaggagatgagatcatctgagtcagtttcacaatagagatggattccagctgctagataagctcattttgacttgttttgttgcaaatgacaaaagccaatgtaaactgcaaaggccaaaagacagaaatttattgactcacgtatcaagaatggcaggattgccactgggcttcagggaccagggtaacgccattagcaatatccgttatcagccttattctttcccactgagcctggctgaactacagctgccagcatttcctgggcttgcattttcccagcttcgtcacatcttaatttcaagctgaaaaatcctgggaagagacatacttcactgaagtcatttctctattctactcattgtagccaggcaa

SEQ ID NO: 24701 - DNA, 2300 bp, Homo sapien
agcatccttccatattggatcttacaaatgtactataaactaactcttggtttttgtcacataaagaaggggctctccatttgcttacacctaacttctactgaacacacagttctgtacaacttgatccctggaggtgggcctctgttctctgaccttttatttttctaaatttctattacttttctctaccattcatctcaggatgactttatattgccttaaatttgttgtaattttttccatgtatacattacgttttattattcttgaggactacccacattaactaagatagactgattgtatgatgagatttaagtaaattcttacttatcaattattaataaatttcttcaaagaagaaattgccgagagtgaggtatttttcaattctaattaaattatgggaaactagaacaataagccagtgaattgtggtagaagcccaagcctgaattttcagctgttaaacatccccctcaaaataataatagctattttaaaaaatcaaacttattgcagctgatataccataaatatcaaaaaattgaaaactcaaccagaaggcatttcattctattttatgatagtcatgaagcagtgcaaaaacatttaaggaacactctgaagatggaataaatgatgttttaagaaacagaaataagaggatttaccaagcaaacagaatgaaattaagagtagagttgaaaatggcaagacagctactatttttcagttttattttatttttaattgacaactgtacatatttatgaggtacaaagtgatattttgatacacatatacatgtggaatgatcaaatcagagtaattagcgtacccattatctcaaatttttatcagttctttgtggtgagaacatttaatagaaagtaaatgtattctattggaagctcaagttactggtttccagctgttacagctgaaagaaagagggaggaaggcagggagtaatggggaaaaggagggaggggaaagaaaacagaaaagggggagcgggaacatgcaatattctttcagagttaagaaacttaatctgacaggtttatagaatttcgttggaacctagagcaaaatcacaatggctgaagcgtcaatcaggcctataaaaacatctgtgtttagtttaaatgactaagggtgaaatacatcagcttatggaaaatggggagggctcccagtatttggccagcgttctaggtgatggatgttgatgagcaattcccttcaacaactgatttactgccaacggacaaaatgctggaagcacatccaaaaacttatctgcaattaaaattacaagcaagtggtcactctgttcacctcctttaccagagaggtgaccctgctcccggcaactacctccacccaagggccacagaagaactcctccttcctctaaccctctttccttggcctcaaacctcacggtaaaacctgccttgctctgtctcccaatcgcttttgtaaaggaagctgggtgtagagctcttctttctccctcccttccttttttctttccttccttcctttcttccttccttcttccatgcctttctgtctttccaaattcattgctttgtaagaaacattctcagatcacctccactccactagaaatccaacgcaggcgagtcggagtcaagcacaggcagtgggcgggtgcctcagccggcaccatctggcacctgcgattcatcgccactttccattcgcccagaggtcaggggggcagcaggcaaaggacacgcagagctcgtgtgtcccagttcctctgaaactttcagctgaccgcaccctcccccgacaaactctttaatcatccatcaagctagaagagtacagtgacctctgcctggcctttggagtttgcaaaagaagcaagcaataaaaagcaagaccaggttcgcccctttgcttcctccacctcccaagagcagcgcgcagcgcggcggtgcggccggaaggggccgctgtttgctcagcgcagccaccccgccgctgcagccgccgcggcccgcacctcccacggccgggctggtccagccccgccaagttccaacagccccccctcgagcgagcgccgggaacgagcaccaccagggctggagcggacggctttagaagagcctagctgctgcgcgcgtcggagaggctcctgggaaactcccacggcccagggactttcgaaagcagagcgaggagccctcgcacgcgctagtctgcgagtgagcgctcagcccggcacctgttcctccagcgccgccgccttccca

SEQ ID NO: 24702 - DNA, 2300 bp, Homo sapien
atgagacaccagcaaatgtacgtccacagaatctcagagtacttcacattggagcttgcactcccttgttgctttttggagccctgcaactacgactactgctagcctattgaaggatgatgggctagattaaacaaaagacaaaacattgcagctgagtcccacaccctcaagactaataagtatgccacaccagacaagtgagtgaagccatcctagatctctaaaccaaactgagctagccagggcagaaaccaacctgacaacccacagagctttgagaaattacagatgtttattggttggggctaataagttttggaatggtgtgttatgcaccaaaagccaatactttctagggtgatactttgggactacgtaaatatccaattacccaaataaattttaccaagtttatgattctgcctaagttaaatattatcacaaagactgcaaaatggaattgcgcctttttttaagagatgaaacatgtaagaatgggggcttatttgtctttgaaaaacataggactagtaagtagctgtatcagcatcagaaccccaatcttttacctggtccacagtttttctcagtatgccatgtagaggtgagtgacctgatgttaggactggaattcactagagagagcagtagagagacattccagagtgttatgagtgggaccctgtgtactcacacatgcacagaagcatctctggtaaatgctccataattgacggtagggcaggatggacaatgtaggaggagacattaatacagttattaacatagaaatttaaatgatacttgactcacgaaaagatataaagataatatctctggaaattgcctttcatgagtataatcaagaatggcattgacatactagattatgattaatagtatcatatgtttgtcaaacgtggctgtttaatatttttatgtagtcgttatatcctcccccaattctgccaaaaacatcctataagatgtgtgaagtgacactgtgagaagcaaggacccctgtcagcccttattacaaacaagacaactgacacccgaagggccaaaactagccaagagccacagtgaataaattgccaagcaggcacttgaactcggcaatcccaatttcctagaaaagttcctctcccatggcagtgggggacaggtcccaagtctttgagacgctaataatgtctgcgtcttaggtttctgccttgtgccaggcactgttctaaaatctttacatgtatttaaactcagtaccatgggggtattggtacaacacattaactgagacattcatacgtccaggtacttcggagtgggtgtgtgtttaatatcatacctacttgcctgagaaaggaattcaaagccccacttttttctttacctcttcataaaaatttgagagccacaaggaagcgctctgtgtttccagtactcttacagtgcgttcggtggcagtagtcaccgccaaccagaacactaggatcctgccagggtgtagatactgtaaccaacaagaggccaacctccgtcctttctgcggagggcgccgaagcgtcaagtaccccgcagcatctctcggctggagagccgacggcaagggtggggttgccggcgctttccccgagggcagtctctgatcctccagctcccctctaagaggctccctggtgcattgggcgaacgcggtgcacgcaggccggctttggcgttgtggggccccaaagcggccaggggtcgcgaggcgccctccggcgagaggagctgaccccagggttgctcttgggggccgtgcctgccaagtatcgcgggacttgcgcacatcgcagaagcgccagctccagaagcagctggagcgcgctcggtgcgcaccgccccagcccggggaggagcgggagcagggagggaggagggctgggggtgctggttacgtaaatgatactagcccagtgagaggcctccaggctggggctacgagaggaggagggaccacgcgaggaggagggaccgggaggcggcgggctggggtgggaggggggcgggggccggggagaagtgaccaggcggcggcggctctgctgaggtgacaacgtgctagcagccctcgctcgctctgggcgcctcctcggcctcagcgtccgctctggccgcgctcgaggagcccttcagcccgccgctgcgctatgaaggcccctctctggggctggccgaggctggagccggctccctctgctcgcgggcaagtgtgaagagagaggcgcgggcgggagccggggctgcgcgcggcg

SEQ ID NO: 24703 - DNA, 2300 bp, Homo sapien
tctacaataaagtgaaaggatctaccctatcttaagactgaagacagaacatttgatagcttgaattgtttcatatctcaaatttagaaaagaatgtacacggtaacaggaaataaatatgggataatcattcctttattatcaggtttagaggctgatttccaatatttagctatcatttttatagaaaattaaagtggaaatgaaacaaagtagataataacatgttacttttttctaagaaaaaaaaccccaaatgtcatgtattctttggatttacatatatctctccattatatatatatatacacattctgaataaatgtaaatgtaatttttttgtaattactaaaataaaatctgttacaataattattttgtaactggcgctttatgtgaattttgaatttgttgctagtttaggttggttataacaggcaacagaatttctgttgctttatggtgctgtcagctgctgttaatttaaagagcttgtgctcatcaaattatactttgatgtttttgagacaaacgtttatgaaatatttcaagtgtctttgtatttaatactgttcaccccaattagctctgtcaaaacttcatcacttatcttattcacatcaataagcttacattttactcgatattatttaaaatgtaacaaatgatatcagaatatgttttgtctgatttacttactttatagataaaagttggttaaccaggtagttaaacaaatgtagtagtataaataaaatgctcaatgtagtataaataaaacaaataagtgtaaggtattcattctacacttaccttgaaaaatgtctcttaataattatgtacatatctttgttatagcctttaaattcttgctctgattattttaaatcatttatgttaatatatttttcccctgataaattggatgcgtgctatctattctaaacacacatttattgtagatactttctctgcagatcagctgggattttagaggctgtgtaattattgatcgtgtcttgcaattgctctacttaagaatatgagaacaattttttctgttttatgtatttattttattttatttttacgtatgtatgtattttttttttttgagacagagttttgctcttgtcacccagactggagtgcaattgtgtgatctcagcttactgcaacctccacctaccaggttcaagtgattctcctgcctcagcctcctgagtagctgggattacaggcacgtgccaccatgcctggctaatttttgtatttttagtagagacgtggttttaccatgttggccagactggtctcaaactcctgacctcaggtgatccgcctgcctcgatctctcaaagtgttgggattacaggcgtgagccgccgtgcccagctctgttttatgttttattaattatctgttctgcaagatgctttataaatatgattctacataatcctcataacaaatgaggtttagctttggcatttctatccacattatacagatgagaaaactgtggcttagaaagtcttctattcttaggaggtgtacagacccagacgtgtctgtctatgaaggccagattttagccactataatatattgtatcccaggatgatttctatttcagaattattggctagtcagaagtactgaattagagtaaagtcagaattgcactatttgacaacctggagctataaagaatatcatgatatgactttaagttcattacaatacaacttaaaggaatcaagtagtttgtcaagggcctggcagagtagtggcagatctagtattaggtattaaaatgttagccaactagcttgctagcaactttcatttatttaggcttttaattttggattcgaaggcttgagtactgatatatttgagaacattaaataagtcatacatttcatgttatatgttctttatccaaaaatctatgtgtacaattaatgaaattttcttctttgttttaatgcagtggaatgtatcctgctttcatcttggagttcacctgtgtggcttggatttatcacagtagcatttgtcttcaatctgtgtgttaactagaaatcaaggaaagacatgaggagatttgtctactgcaaggtggttctagccacttcgctgatgtgggttcttgttgatgtcttcttactgctgtacttcagtgaatgtaacaaatgtgatgacaagaaggagagatctctgctgcctgcattgaggggtaagtgcttatgaagcaaatactgtctttatagagatgagaaaagtggtgccttgac

SEQ ID NO: 24704 - DNA, 2300 bp, Homo sapien
aaatgctcatctgggtcatatcaaatagaattagcctaatagttgtatgattatggaattgtctcaagttccaaatgcatccattaccttaaaaattaatagttttgcaatggagataaatgacataaccctattagtaggaggacattaaaaagtgtagtggaggttaaactgtatcaatataaagaagaacaagaaaaatgttaaagttctctctctgcctccaacccttttcccaccaactcccaagtcccttgcatggaatacaatgcaccaatagaaaggaaagatggaaattcacttgatactcaacacatatgtattgggtgcctagaacgtgccaggtattattctagatacttgcagtatatcacaatgaaattaagattcctgttttgcagtaccttttattcaaggggtgagggtgcttggtaggggtgaggggtagagagagagaagcaataaacaactaagcattaaaagtgataactaagtaaattagactacagtattacaaagagtagatgggggatctcatagagaatttagttgtgatcaaggctaatgagttcccatgtagacatctaggaacaagtattccaggtagaggccctaaaccaaagacatgcctggcttgttcaggcatggacacagtgcttgggatgaagtgaataaggggaaacattgtatgggaggaggtcagagagttaacaggggccagatcagcatgcagtgttgttggcttttataaggacatagccttttactttatgcaaaacaggaagccactggatagttttgagcagaagagagacatatctgagttacattttatatcattattctggttctcttttaaacaatttttttatataaatttaaggctctctctgagaacagactatggaggaggcaagggtggaagcaacttggaaaccagtcaggagactccggctatcatttagttggtggtacagaccagaatgggagtagttgaggtgttaagaagtggtcagattcagcaaacactgtgaaggtggaattaaggagattttctaatggagagagagatttcaaggataccaagattttaggcctgagcagctggcaaaatggagttgccatcaactgagatggaaatctctgggttgaacagatttgtaggagaaggcaaaaagttaagttttggacaaaccaagtttcaggtgtctattagttatccaagtgtagatgtcaagtaggcagtttttgaactggatagagatatttgggagtcatcagcatcggagacattgaaatatgtgcttctggatgagatcaccaaagagtcaatgcaaattgagaaggccaaggactgcacctcgaggcactccaatattaagacatgggagaaagaagggaaagcttagcaaaggaaactggaaatcaatggccaatgaggtggaaggaaaaccaaaaaatgaagaaagaatatccaaaggaggagttggtgagctgctgaggcaaatgattctaaatccactaatggaaactagagttttaaaaagctaactatgtgggaaaaaatggattctccacccctttggtccatataaataaaggaagaaatttgaagtgcttttatatatgcaacttaacttcatgtcgttgtttaaaagccaaaacgtttcacaggtacatagggaaagcaagctgcaggctcagggctgagaacacaggtcccattagtcttaaggaagggtgttttaaattctgacctcaattgtttagacaatgttgatttcacagcctccaccttatatatattatcatgtaggagatagagtgcttgctgcagtaagttcaggtgttttgtgttgcagagaaaactgtaaaatctgttttagatgtttgcatgtttacctagtttttcacttcaaaaaattggtgaagagacttctgtcaaaagaatttcagtgggctacctaccacctctttcccacagtggaagcagagattggtgattaatatcctctgtcctgcgggggaaaaaattcatgatgtcagaaaatgagtgagtcaacagaaagcctacctaagagtctccttggctgaggaggaagacgaaagcacagttctgagcatgagagctcacattctgtttctaccaggtgctgaagaaaagcaagacagggtaagttatggatctatcaaagcctgaagtgggtggggttgctttattaggttatacttgagtacctggttactgctggaaatgtatgctgtgcgtggacaagagtaaccgaaaagagagtaacaga

SEQ ID NO: 24705 - DNA, 2300 bp, Homo sapien
tgagcttgggggagagtagtcagagatgagatgagagtataggtgttagttcacagcatgctgccaactccaaaagctcatttgtaatctcttcttggtcttgttgcaactttatagcccactatataacatccttcatagcagaaataaaaaaaacacatttactctcttttttcataccaacactaggaaaatgttcaaactcccaatttctcaggggagaaaattaggtctcaaagttgttcagctacttgctcaaggtcacacagcttgtaaatggcacagacgcgactcaaatcaggtcttatgattctaggaccagagaagtttccacttcccacggtgtcactttcccttcttatgtaattttaagagaacaaacagatagttactgaccttttatcagcgaactggcaggagaagcatctgtaactgaggatagatgttttaaccaaataacagtgagagtcccctgcttatggctgacaacctgacatgcactttcctgcagttggtttataagtagagaggtagagaggagtacctattggcagagaatgcatagagtaattatgtacttattttcctttccatgggaatcttatagcagccttttgcttttataatgccatgatttgatgattttccaacaaaatcaacttcatgtatctgggctgactgaaatatgccttaagataccatggcattttaaagcaaacgtgaaatgtggtaaacaagctggtatttactcatgggcactctattagctatttctgcactttgcccctccattaagttaactgccaggctgaggccattaaaatccagccttcttccttcaattataggcacacattaactctagatattctgagcctttctaatagagccatttgcagaaaggatttctattagtgtttctctcctttctgttctcatcctaaggcccctcctgcttcctgcaactttgagttctgaatatgcctatctgagagccagttgggatctctgtttatgatgcaaccccaaatccaggcatccgtttaaacgagtgcccagttacagagacatattgtacttctcttccttcagagagcagcatttgctttttactgggggctttctgactgatgcagggggcgaggaaggagagttggcgggcgtttgggagcagatttagagccgcttctcattggaggggctcgcttttcctgagctgccagacactgcaggctcaactgaggctcggaggtgcaattcaggctggtggagcagcgggggaaggcagggacaggcggggctagcgcggctctgcagctgatcacacgcaccaccacacacaccacattcctgctgccccggcttgcgcctcgcatcttccacccggggccaccgaggcgctgacaaggagtgggggaccgaagaaggaagaggcagaggaaaagctagagcggcgctactgtttaacctgaaagtctgaccggcagcccaaggctcgaaccccgtccagcagcaccgctgtcgcctggaaggagggcacagcgccaaggaacccacgagcccccgctcgagtcattctgtgctctgtgcgccaaggatctttctggcagggacagcgcggtgccctcagggaggtgcggagcttgggggacctgcattggcgcccatcgtggtacaccaggaaaagtgggaacgaggaaaacagccgtgagcgcagagtgcgaggccaggctgccgctaccgcccgctgcgccgcctcctgccctctcccgctgggtgagtgcccaggcttcgcgcactgccgtgtctcagctgagcgcgggggcggcctgcgggcccttgagggtccgccggagggccccggtggcgcccgcggaaactcggcggtcgggggacgccaggcggacaggtctctggagtccggaacccgggaatctgagcccggagggcgtgggtagggggcgttgcaccagtgcccggcagacatgcctttgggcgggattttggctaaaagataggagacaggtgcgccgggggtgcggggagcggtcccagggggcgggagattggggagcggcggggaggggggagggtctggtccaggcaggtaaaggcagcttcttaggcagccagcgagttggcaggtgggttgggactcgcttgtcaactcattaattttaagcagtcagtttgggggtactgcaggataatcaggagggccgtggggagtcaagaggtgacccgggatgccggtggtggggaaagaaaagaggagcctctggaagcttggaggcaaaatt

SEQ ID NO: 24706 - DNA, 2300 bp, Homo sapien
ggtgcagagctgagttcaagtcctgggtatccttgttgactttctgtctcgttgatctgtctaatgttgacagtggggtgttaaagtctcccattattaatgtgtgggagtctaagtctctttgtaggtcactaagcacttgctttatgaatctgggtgctcctgtattgggtgcatatatattcaggatagttagctcttcttgtggaattgatccctttaccattatgtaatggccttctttgtctcttttgatctttgttggtttaaagtctgttttatcagagactaggattgcaacccctgcctttttttgttttccatttgcttggtagatcttcctccatccttttattttgagcctatgtgtgtctctgcacgtgagatgggtttcctgaatacagcacactgatgggtcttgactctttatccaatttgccagtctgtgtcttttaattggagcatttagtccatttacatttaaagttaatattgttatgtgtgaatttgatcctgtcattatgatgttagctggttattttgcacgttagttgatgcagtttcttcctagtcttgatggtctttacattttggcatgattttgcagtggctggtaccggttgttcctttccatgtttagcgcttccttcaggagctcttttagggcaggcctgctggtgacaaaatctctcagcatttgcttgtctgtaaagtattttatttctccttcacttatgaagcttagtttggctggatatgaaattctgggttgaaaattcttttctttaagaatgttgaatattggcccccactctcttctggcttgtagggtttctgccgagacattcactgttagtctgatgggcttccctttgagggtaacccgacctttctctctggctgcccttaacattttttccttcatttcaactttggtgaatctgacaatgtgtcttggagttgctcttctcgaggagtatctttgtggcgttctctgtatttcctgaatctgaacgttggcctgccttgctagataggggaagttctcctggataatatcctgcagagtgttttccaacttggttccattctccccatcactttcaggtacaccaatcagacgtagatttggtcttttcacatagtcccatatttcttggaggctttgctcatttctttttattcttttttctctaaacttcccttctcgcttcatttcattcatttcatcttccattgctgataccctttcttccagttgatcgcatcagctcctgaggcttctgcattcttcacgtagatctcgagccttggttttcagctccatcagctcctttaagcacttctctgtattggttattctagttatacattcttctaaatttttttcaaagttttcaagttctttgcctttggtttgaatgtcctcccgtagctcagagtaatttgatcgtctgaagccttcttctctcagctcatcaaagtcattctccatccggctttgttccgttgctggtgaggaactgcgttcctttggaggaggagaggtgctctgcgttttagagtttccagtttttctgttctgttttttccccatctttgtggttttatctacttttggtctttgatgatggtgatgtacagatgggtttttggtgcggatgtcctttctgtttgttagttttccttctaacagacaggaccctcagctgcaggtctgttggaataccctgccgtgtgaggtgtcagtgtgcccctgctggggggtgcctcccagttaggctgctcgggggtcaggggtcagggacccacttgaggaggcagtctgcccgttctcagatctccagctgcgtgctgggagaaccactgctctcttcaaagctgtcagacagggacatttaagtctgcagaggttactgctgtctttttgtttgtctgtgccctgcccccagaggtggagcctacagaggcaggcaggcctccgtgagctgtggtgggctccacccagttcgagcttcccggctgctttgtttacctaagcaagcctgggcaacggcgggcgcccctcccccagcctcgctgccgccttgcagtttgatctcagactgctgtgctagcaatcagcgagactccctgtgagtaggaccctccgagccaggtgcggcttataatctcgtggtgcgccgttttttaagccggtcggaaaagcgcagtattcgggtgggagtgacccgattttccaggtgcgtcctttacccctttctttgactcggaaagggaactccctgaccacttgcgct

SEQ ID NO: 24707 - DNA, 2300 bp, Homo sapien
aaggggaagggaacccgggagggcgcctctgagctggagttgctgctattttgggcccagcctggccggtgcgtcaatgcctgcgcccctgcgtcaccgccacccccacccccttccttctccccagctctccaaactctcactttttccctttcgttcgcatggaatcgcttctgcccacggggcgctgacgctaccgagctcatgctaatatgctattcttcgccctcccctcctcatccccctactcacacaccctcacccgccaccacaacccgccccccccacccacttcctggttttattttttttctcgcgcccgctagggcatcgccgagcagcggcggcggcggcagcagcagcggcagccgcaacatctgggggaaacttaaggtggtcacgtaggtttccccgaggctgcggcgcaaaagagcccgcggcttcctggggcagccgcagggcatctgatggcaacgcctccccagccgccggcgagctgggggcagcagggagtaggcaaaggcggggctgcagattagggttgagcagcccgggatcccgaatagttccacggagccatcggccggtactgagaacacgagtaggggggcaagttgcaaaagggtcccggctgcctggaaacgagccacaccgagaaaggaggggcggctgggacgctctgcgcgagtagaaaagcgggggcggctccgaactctccctcccaaggcccagccgctggaagccccgcgggagaagccctaggaagccctcccagctccggccgggagacggggagggggcttgccctccggagctgcggcgtttcctttgctagaaagctccctgcgctctcggcgtggctaggggaaatgacttgcaaagcagaagcggcggcgacttggacggccgcgggggtgggacacgctcccagagccagctcgggcccctctcctggctgggctgtaggctcacaccttacgctttgcggagacgctgcccccaatccccacccgcttcgcttttcttgtccagtctttctgggctctaagattgaggctgtgatagaccttgtgtttcaaacgaagatcgatttattcccttaaaactcgtggaaggggtacgagttggtgggcacagaggagtatcgaaagtattagagtttgcagaaggtgggaatcagagtacctttctgcagaaggcgcacctgttgcctgctgctcggctgcattgtctgcgaaaggaaaaggggcgacgcttcactctgacttttggggtttctaaagagctgggtcacggtcactgtctaccctctccccttcctctcccccccccccgcaagcaccacgtcctccatcgaacgtgggcactgcatggaaataaggaaacatagaaaaataagccctacccccactcccattccctttcagatgggagtgtggggggtgggggtggggtagagagagtgagagagagagataattagaatgaatatatgccagaagaggaggaggcctgggacaggaaaagggagtaaaaggggatgaaccgggtagggaaatcccacccgaactgcgtgagccctctgagcgtctcgtgtcatgggacatctgtacgctcttccgctaagggggtgacgaaggtgggtgggagaggttagggcgctgcaaggcacatcccattccgtgcggctccaggtgcgtactacctggccacgccggccttgccttccgccggtgcttttgttgcaccctccccacatgtgagcggccgagccgctgcgcgggcgcaggggcttcggggaaagtgaagtgtcgcgacgctgcgggctgcgcagacctgggagaggtcacacctctttcggaaaaaaaaaaagaaaagaaaaaaaacaccaaaaaccacccaagctggctaccaaggtgaacgcagagcggttcccaccttaaaatcggccctgctcgtgacgtcaggtcggaaatataccaaagcgagcgcgggccaggagtccagggagcgcggcagcgcggcgattgggcggcgggccgctgacgcgcgctgacgcgcggagactttaggtgcatgttggcagcggcagcgcaagccacataaacaaaggcacattggcggccagggccagtccgcccggcggctcgcgcacggctccgcggtcccttttgcctgtccagccggccgcctgtccctgctccctccctccgtgaggtgtccgggttcccttcgcccagctctcccacccctacccgaccccggcgcccgggctcccagagggaactgcacttcggcag

SEQ ID NO: 24708 - DNA, 2300 bp, Homo sapien
aaaagcacacctcagatcaatttggaacgaaaaatgagataattggcttagggcaccacatttgttccttgggctaggtaaactagaatggacttttagcaagaaaaaataaataaataaaaaggcctttaggtaggccactagtaatgttttacataagacttttttccttgtgttctgagattttttttttttttttttttgagacaggggctcactttgtcgcccaggctggagtgcagtggcacgatcttggctctctgcagctttgacctcaggccttccacttgagcatcaccattggctggtgaggcctcatttttattgccctgctccctcagttccaccagctcatttttaaactccctatttatttgcctttgtttgttaggttacacgttcaaaataaaaactttgagaagccctgaactaaataatctaagattctttagatttctgaagttaggattcaaaattaaaaacaatatttaagaatctcaggggccaggcacagtggctcacccctgtaatcccaacactttgggagacagagcagggaggattgcttgagctcaagactttgaagccagcctggctaacatagcgagacacctctctcttctctccaataaataaataaagaaacaaacaaataaataaataaataaaattagccatgcatggtggtgcacacctgtagtccccaccatgaaagtgaggccttaccagccaatggccctgaagcacctctggaaaggtacatcacttcagaatgggattttaaaaccccatttctcccccatttctttcattttaaagaataaactaaagttagaagaagtaaaatgagttgaccttgttcttccacaggttatttaggattgtagtctgattccctaattccctaatcccttcatatcttttatgtctttataattctgtatttgtcttcagattttgctctttacccacacactaagaagtccttaaagatgaatcttaatggagaagtcattaccttatttcagtagccttttatgatctttctctaacaccattcgattattcttaatatataatgtcctaaactacatgcagcatttgagtttcaatacacagtgacctattctgttgtaggctgaacgggcagtgctaagcactccaacactgaacataatattgtgtgttccaatcttgcctctacgagcctcagcttcctaactcacggggttgaagtccatgtgtagtgtacttaacatagcctggtacacagttactatgtgttagctgttattttctcataacttttccccaaattattcttgaccaaagaatctggaaattattaggtatttccctcccagagataaaaagccaatgttgcctatatccacagccttttatctcgtatttagaatcatttccataaatccatttccttcactttatttttttcccctcctatatcttttgttgtatcattcacaatttcactttccttggaaactaagggtgaaggatcagactcatactattagagttaaaaggggtcttaaatgaaggaaggggcagcttagagaattcaggtcacttggcttgaatcatcaatatttcaagttccctatgcaaatcacatagttccaatttaccaatttccaaatcataaatttgggtcagtgttcaaatttctgttccctgtttctttgcctctgttcccaatttctaacaaatctccattatgtatttgtctgaataggtaaaataataaaagaaaaaaatggcagggggttggagggagagttgttataaattatctaagtgtctgaagataggctaggtgattgtgtaatcctgtgcatacatgacaaaatcttcatttgcctccttcaccaaagagagtttcagaagaatctcataaagttctaaagtagtataatgaaaatttttgtaaatgttaatgtttttctaattttttataactatgtgattaaaaatttaattgctttctctgtttttgaatacacaaatacgtgattgtttagagaattaccagggtgtaagtgtcttctagtaagcaatagaaaagcacatttgctataagcattggtggttcagtggtagaattctcgcctgccacgcgggaggcccgggttcgattcccggccaatgcaagttttgacttctagtttttttctgtgggtatcatacacaggagcctcaaagttcaataacagggcctttaaacactggactcatgcaaataaagaagtattaatgaaagccaattccctatttcactt

SEQ ID NO: 24709 - DNA, 2300 bp, Homo sapien
gcttgagatattttgcagaccctgcacttgacggatcagctggtaccacctagatcaataaactgactcctctgaccttgtggccctccacccaggaactgacttagtgcaagaagacagctccaactccctatgatttcatccctgagcaatcagcactcctggctcactggcttcccccaacccaccaagttgtccttaaaaaatccgctccacgaatgctccggagtctgatttgagtaataataaaactctggtctcccgcacagctggctttgcgtgaattactcttgcaattcccttgtcttgatcaatcgactctgtctaggcagcgggcaaggtgaaccccttgggcggttacactagctagcagtgtgactaggactagtggggaaaataatcagctgacatagtatggattggaccagatcgctcacctaagcattcatttcaaatcaagaaacatttaaacatcagttatattcaggcactatgctaggcactagagtacaaaagtgagtaactgatggtcccatttcccaagcactgaactgatctgggataatcagtgagaaggaaatccaggactggcacccaactcaaccagattattccttttctgggtaacatgttgcatttctagataaatgatgagggtttgaaaaaaatgataaaaatattggtttgatttgtcaaactaaagaaaaaagaactgaggcatacttaatataaccagtctcatgatgttgcccagtcacaagtttttatttatttattttttgagatggagtctcactctgttgcccagggtggagttcagtggtgccatctcagctcactgtaacctctgcctcccaggttcaagtgattctcctgcctcagcttcctgagtagctgggattacaggtgtttgccaccatgcccggctaatttttgtatttttagtagagatagggtttcaccatgttggttaggctggtcttgaactcttgacctcgtgatctgcccacctcagcctcccaaagtgctgagattacaggcgtgacccactgcgcctgcccggccacaaggaagtttttaaaggaaaagaagaggcagtttctaaattgtttaccaataatttacataaaaaaacaaactattaattgtctatagattgttcttcgtatcacaaattccaggaacatgaagatatggttgggtagtcagtcatgaacaaaatgcctttaaacaatcgcctctgagcatgagtgtggggggtgcaacttatgtcccatattcaaggtctctctgggcctgataaattttgcatacctcacattgctcaaatgctctgaactatttttcttttctcaactacaatttcctttttctggttgctcatgattcaactgggggagcttttaaaccgtggttctcaaactttaatgtgcatcagaactacccaaagggcttgttaaatctgggtagctcagccccagccccagagtctatgaatcaggtcactggagtacagtttctgtcaagttctcaggtgatgctgatgctgcgggctccagtgactacacttttagagccagttttaaaatacaaggacttgcagatcccacgtccagactgactcattggacttggggatggaaatctggcattccacccctccctgccccctccccccaattttaatgtgtccaagggtgagaatcattgctcctctgtggactatggatggttccctgaagttactgagtttgggatttaataaatatatgcattcctctgggtcaactacaggaattctgcggtatttaaggacattaaatgagtgacttaatactttatttaaaaaaataccactgctttttggttcacactaattttcttccttcttttggaaaggcatttccgtccatctcctggatattttccaataccacgatagaaaggttattagtacagcacccagaggtcttcggagcaaagctgttaaagaagtggggtccatttgagccccaactttgccttccttaggtccccttgggcttgtctagccctaggagttccaacaagtaagctgggcatgctcagtgggcagggtcgttttttttttttgggtggcggggggttgcaagtgggaagcctgctgttcagctgccggggctctccgcctccccccacctgtatgaggctgggtctggggaacctgtgctcagcattccaccccctggagcttgggcttggtcttccctgcgggtccctgcgctgacattcaggcggggagccaggaggcctggcgcgcc

SEQ ID NO: 24710 - DNA, 2300 bp, Homo sapien
tggttaggctggtcttgaactcttgacctcgtgatctgcccacctcagcctcccaaagtgctgagattacaggcgtgacccactgcgcctgcccggccacaaggaagtttttaaaggaaaagaagaggcagtttctaaattgtttaccaataatttacataaaaaaacaaactattaattgtctatagattgttcttcgtatcacaaattccaggaacatgaagatatggttgggtagtcagtcatgaacaaaatgcctttaaacaatcgcctctgagcatgagtgtggggggtgcaacttatgtcccatattcaaggtctctctgggcctgataaattttgcatacctcacattgctcaaatgctctgaactatttttcttttctcaactacaatttcctttttctggttgctcatgattcaactgggggagcttttaaaccgtggttctcaaactttaatgtgcatcagaactacccaaagggcttgttaaatctgggtagctcagccccagccccagagtctatgaatcaggtcactggagtacagtttctgtcaagttctcaggtgatgctgatgctgcgggctccagtgactacacttttagagccagttttaaaatacaaggacttgcagatcccacgtccagactgactcattggacttggggatggaaatctggcattccacccctccctgccccctccccccaattttaatgtgtccaagggtgagaatcattgctcctctgtggactatggatggttccctgaagttactgagtttgggatttaataaatatatgcattcctctgggtcaactacaggaattctgcggtatttaaggacattaaatgagtgacttaatactttatttaaaaaaataccactgctttttggttcacactaattttcttccttcttttggaaaggcatttccgtccatctcctggatattttccaataccacgatagaaaggttattagtacagcacccagaggtcttcggagcaaagctgttaaagaagtggggtccatttgagccccaactttgccttccttaggtccccttgggcttgtctagccctaggagttccaacaagtaagctgggcatgctcagtgggcagggtcgttttttttttttgggtggcggggggttgcaagtgggaagcctgctgttcagctgccggggctctccgcctccccccacctgtatgaggctgggtctggggaacctgtgctcagcattccaccccctggagcttgggcttggtcttccctgcgggtccctgcgctgacattcaggcggggagccaggaggcctggcgcgcctccagagcccgccgggggagccgggcgagggttctgggctctgacggcggggtcgcagggtcgcccgcctcctggacacgtctgtaggcctagggaagcctgccggccgggaggtacagagtaggagaagccagatcccagggcggacaacgagaagtcgtcaggtaagccagccccgccagcgtgccggcggacgagtgtctcctctcccgcaggcagatggccagggcggcccgcatgggcgagggcacaggaaatcggacaccgccaccgtcttccccagcctggcctagctcaggctttccagtccgccagcccgctggcaaggcggggcggaggtctggagtccggcatcgccgaggcacaaagcaggaactgcagccaggggcgagggcccttgcgtgtggcgctgcgcgaccccacccggcggcaggacccgcgtccccgtctagtcacgttcattgggccacggagaccacctcgctcgccgcccgctgttggcttttccctcccacacccccgccaaccccggccccggttcccgcccccacttccgcgtttccccgctgggccggaggagcctgggcccgaggtatccgggcaggaggtggcggcctcgccgccctggtcaggcctccgggagggagcaggcgcgggagcgggaggaggaagtcgggaagagggaaggcgggggcgcggcccgcccggcgctcgagttacacccgcccagcccgcctcgagtgacagccccgcgcgcctcgctgggagcacccgggccgaggctctgattctggggggaggccgactccaccctggctggaggaactgggtgctcctgcccgctggcccctcgcgcgtgaggatctatctcaggtgtgtgcttcctgggagaccccttcccccgcctctagtattctagggggggagtggtccctttctgacccgggcgagtgttctgggactccag

SEQ ID NO: 24711 - DNA, 2300 bp, Homo sapien
tctctcttccctctggacttctttttaaacaccatttctagctgtacatcatctccagccaaacgagataactatttgtatgcctagaacgtaccatgatgctcccctttctccaccaattgtctttctctataacgttccctactcactcccctccaaattttttccccttcaagacccttctccaaaatcctgtcttcactgaagccttctttaattcttttagtcagagtcaatttcttgcaacattaaaatgatatagcaccttgctttttttttctatcagactataacactcagtatagcacaactagttataagacagagtgcagagttacaagacacactttgatatttaatcctacagatagattaattgcttgtgggcagttagttgataaactcacagatatatttagttgagcaccatttgtttaggttttgccaactgagctggtgttctccttgcaagaattagagctagctctggtctatgtcaatgcagcagctggtcctgagtaagcatatatgtgatttaattaaaaggctataaaacatggatttgaagctatgataaataagctaattctattttttaaaattttttcacctctggtttccttgaacatttattgcagaagttagtaaagatttgtgtatatttttggtccccttctttgctagttttctagtaaagctgttacttagaaggaaataatcttttttttttgtttgtaatcattgtgaaaacgtttctccttacaatggtaaatgggtacatgttgtccacagcatttggtttatatagttctaaatttcattctttcagcattaaaacaaagttcttttttaaattttttattttttgagacagggtcttactctgtcacccagactggagtgcagtggcgcagtctcggctcactgcagtctccgcctccgaggctcaagggattctcttgcctcaggctcccgagtagctgggattacaggcgcatgccactactgcctggctaatttttgtatttttagtagagacaaggtttcagcatgttggccaggctggtcttgaactcctgacctcaaatgatctacccacctcagcctcccaaagtgctgggattacagatgtgagccaccgtgcccggccctaaaacaaaggtcttacattacctggcagaagattactagtagatactttgctagagacttcttcattgccttggagattaacccaaatgccaagggactgaacatttgggtgactttgagaatagggccttcttttgggagtgacaacaaaatatggtatagcttttggggagaagttgccttttgagaccaaaggcaggacagaaccaccagggctcaagaacataaactcagtcttgttttctcacttagtaggcagtgactttggggaaatcccccatttcctctgagctaccactgccccttttatgaaattagatgttgtgagggtgaaatgagctgatgtgtataaagaattaaaagcacagtacctgttacctagtaaataataaatggtggtgattattattgtaacattcataacaataacaacactcataatgataatcttaggaaagtcaaatgaaactggctgattcttgcctttgactttgagctagccagatgaccgtacagaaggatttgatcacagtagaaataatgagccctcaagcatacattatttttttaaattatggaaaaaggaaaactctttattgattatagttgatattattgctaactctgcaagatgacatgagaatgtagttttttgatagtattagtggctcattgggaaaatgcatgaaaatatcttcctttgcaagttttggtctctgacaaatcaaattaaaacaatactatcaggtaggcagggaacatagggacccacacatttggaaatactagcttcaaacttaactggctgaatgaacacctctgagaatgaaacattttcattgactgtgttgtatataacttccctgagttggccatgttgatgtgtggtatcctttgtgaggtcaacaatgacattatcaacaagacagaagcaatgataagtcaatcagtcacaacactcatatcctagggaccaccacactgctatgagtcaggcatgtgcgttgtttaaggtaaatagtaaatagaactaggactttattctctgtctccagttgtcagaggaacccagttagccttgagatagcatgctatctcttggctgctagggcttacattgttgtgtgataggcacccatgtgaatgtt

SEQ ID NO: 24712 - DNA, 2300 bp, Homo sapien
ctctatggacaatctttacaactggcaatgtcaaaatgtgtattctgatttagttgttatgggaatgcatagattttattagactgtactttagacagggaaggaatgtcacacaagttgtagactgtattggccaggatttttcagagaaacagaaccaataggattcatagaggtagataagtgagttgcagtttattacaggaattggctcatgtggttatggagactgagaaacctcagtccaggccacctgcaagctggagaaccaggaaagccagtaacatggcacattctgagtccaaaggcctgagaaccagggaagccaataacatcactctcagtctgaggtcaaaagcctgagaacctagtgagggatgtggaggttgtgggggcagactggtacaagccccagaggccaaagccagagaatctaaagttctagtccaaaggcagaagaagaaagatgtcccagctcactaacagagacagaatccacctttcctctgcctttttttctatctgggccctcaaccaattagtggtgcctgcccacattgggtgagggcatctcctccccactcagtgcactgagtcaaatgccaatctcttctggaaacaccctcacagatatacctaaaaataatgctttactggttctctgggtgttccttagcccagtcaagtagacacctaaaattaaatgtctcataggcaatgttcaaaaaccaaaaacaaacaaacaaaaaattgagactttttttctagaccagtgtttctcaactttagctgcacatttgaaagacctgggaagctttgtaaaaaaaaaaaaaaaaaaaaaaatatatatatatatatatatatatatatatatatatatatatatttaatacaatatcagcccaaatgtcatctccacctcctctctcatcaattgaccagagttttggggatcttgtttcaagtggttctaatgaaaagcctgtggcggaactgctaccctaccagtcaaccagcatcactcaaaatctggtccaagtcctggtgtggtcctgaaactgttgcttgctggtttaagacgagataagtactgaaactgagagtaagtgtatcttaatctgttcaggctactatagaagaataacatagactaagtgactcataaacaacagaaacttatttctcacagttctagagactgagaagtcagaaatcaaggcaccagcagattcgttgactggtgaaggcccatttcctggttcatagatggcaccttctcattatgtcttcactttgtggaatggcaaggcaatagggcctcttttttaagggtgctgatcccattcatgagggctctatccttataatgaaatcaccttcaaaagccctacctcctaatactatcacatttatgattaggtttcaacatatgaattttgggtggacataaacattcagaccataacaaagtgtttagaaacttttatagcagtatgacaaattaagtttatttgtaatcaaatgtaataataaaaacagatggattagtgaaaaaaaaatagttggcttacaaagaaatacattgaaaccccttgaatgaatgatctaaataattaaacatatacatctctggaagtgaggatataccaggccccttctttaagctgttatgtcttaaagctgaaatgttaacttcagtgataaattcctcaggcagagcattggcacctggctacaacagggttaatgagcaggagtagggtaggtggggtcacaaaccaggaacacatgccctccaagttagatagctttttttcctctttaattgccgtttaaacacacatgctctcacataacacagaaggtgagagctgaatgaagttttctgggtaatggcatgaaatgttttccttatgagaagtggtgttgagttacagcgtgcagacggagaacggggaggagagaaacggcagtctcaatctggcccccaccttttcttgggcttgtaggaaggtggacatgggctcccggagacaagacaagtgatatgttgaactgttcggtggctggaatcaactgctcctggagtgacctaaggccagtgtttatcagaacttagccagggccagccaagcaggcacagatgctctgctatgaaatgccacgcaggcagagactgacaagcggtaggaactgagctttccccttggactgctgcttcctgctgtgttcaggggagggggtcactttctggcaactctgctgctgctgctgctgctgctgctacttcagcttcctct

SEQ ID NO: 24713 - DNA, 2300 bp, Homo sapien
cctttggagctaatgtatttctgtactcctgtgtttatcgcagggcatttggttgaattagtgccacttcctgccctaaggatctcacaatctagtatgtccccatttgttcctaagcttggtcttagtttctgcattctcccatatgattccactcaatatcttctcaacagtaagcttgtagttgaatttcttgggaggacgctcccagaacatcatcctcagcagctgcagggtgtctctggggcaggtcttgagactgccttaggctctctgctgccctctcctggccacaactgtctctactgccaaggtgctaatgccgaacccctgtgggatctctggtccaaggaaacatctgcacacaggccagggatggcgcttagcttcatctgtgctgcaaactctcatcagtaggcttgctggctctgtgaccttactagctgaactccttaatctctctgcacttcatttttctagtctataaaatggagataacaacagcacctacctcagaagactgttatgaagagtaagtgtattactatttatgagtcaattaggacagtagcttgcacataataagtgtgatatgagcgtttgttaaaacagttaaacaatcaaacaaacatagaattagagtgctgactagagaacagctggtgatgacgcgggagggagatctaggatctattagagatgtcttccaaggacaagggagaggggattatacaagagtgaggtgttgtccctgatatagacctgaatgggctcagccctagacacacttttaaaggtgatatgcttactacaactcttcaacacctattcttcttctctttaaaaatgatctgaaatttattctcttggggataaaatttattgtatatattatatatataatataattcttgttatgtatgtgtatatatataattatttgtgtatatatgtgtatatatataattatttttattgcgtgctactattccaagccagatgctaagtgctggggacacatgtaagcaagttaaactggcccctcgccagatgaaacttagtttgcagttggtgaaacagacattacagagataattgtgcagttgcttatttagttacaaccatgaagaatactctgaagggcaaagacaatgtgtaacagagtcctgtcctaatcctggcggttagagatagtgtagttaaggagatgatatttaagcttaaaaacagaacttagggaagctggtcagcccagggcttgggcttgaggaagagaagggcatttcacatagaaggagctgtgtgggcaaaggctctggaaccattttgtactatgagaaatccaaaaaagaaaaagatttaaaaaggaaggggtggtcagtagcagtcatttaacataatcacctgtttctcccaagggcagattgcattggtcctctacattttaccagcattgtgtaatatcagtatggaatagaaaggattgtaattctgattgggggaggagaaaccttcatggcgataattttattagggttttaaaggatcggctgggcttcagcagacataaactagaggataagaagctatagactaagtaaattactctgaaattataaaacttttggtattagcaagttggtagaatttgtttatttcataggtcccttctccagcctgctggaagcacaccatcaaatctgcagccagaaccatttacagtaaagttgtcctgtttataggttttttccataagctgttttattttttaataaataagaaacaatgccattgtcctttacaaaatagctgaggttttacttgaacaaaatctgtttggaaatgttaagctggttacacagaactaatatgcctcaaggtggtcattctctctggattaaagctgtgggacaattgtggctcctgttacagggaaaattacaatgggccattatgaaaagggacaaaaatctctgttcccagagggggactgacaagctgaaagtccctctctacatgccaacacaaaagcctgattgcttcagattgtttgtttatgtaaatcaaaaggatgcctttaactctgccagggaactggcaagcaacaaagaaggtggtgattggctggattcttgctcatggctcctggcagatctgacaaatcctcttgcttttgctctaatctctgtctggatacttttaggaaaagaaccttgttattatgtactaaagtgaataatttgtgctcttagagtaggagttggaactataggacttgaaggcaagagcaggtatcttat

SEQ ID NO: 24714 - DNA, 2300 bp, Homo sapien
ctcacctggtgcatgggcagcagctgggcctgcaactgttccacctccctggatcttcctccagcttctatgatcctgggccgggcttctttgggagggcattccaaccgctaaggtcagaggcactgagagccgacgcgggtttcagtttgcccccgtgtgtccagcttatacctgggaacccagtttgttcttgctctccccctttaagtttctatccatcatcccttcccaacttcctgccctgcagacttcaggctccagcatcaaatgcaacagcagacatatagaggcagcttcactggcacccaccattgtgtaaagtcaaatcccttctgattgatcaatcaattgatcgattgatagatggattgctccatctcttagtggttctgcctttcccttccaaccctaattgaaacaatacccctgtcccaactatgtaagtcaatgtttgtttaagattggcttcaagctgccaggatcaacatttttcttttaaatgtatttcttgtttttattcagtgctctgtgaccatctcttagccataacattagcttgtggcttggcttttcacatatgattaagattaaagatcaagattttatgacttttccccaaatcctgattctggacctaagatagccttaacattaagcatttggtattggacaaatggaaagtgaatatttacataattttattttgattctttatattcttatatgaaaatcttttcattaccttttttttggctttagatttaataatggttacatttgtacaatgtcctttagcattaagaataataactaggggccaggtgtagtgctttatgcctgtaatcccagcactttgggaggccaaggcgggtggatcacctgaggccaggagttcgagaccagcctgaccaacatggagaaatcctccccgctactaaaaatacaaaaattagccaggcatcaaggcgcatgcctgtaatcccagctactcaggaggctgaggcaggagaatctcttgaacctgggaggcagaggttgcagtgagccgagattgtgccactgtactccagcctaggtgacaagagcgaaattcttctaaggaaaaagccacaagatccagtaaactacataaaataaaacagtcatgtttcatacagtgaacattctgcaattgtatttgaagtaaggatgatagtgcaaattctaacatactttctaagtcataggttgttacaaataatgggagacaacttacctctttatgaacaaaatagcctatgttttatctagtagttggatagactcatcttgttgctaaatgtgtctcatgttgccgtctacttgtaggaaaaaataatacacgttacaaaccatttacccgacctccattattccctagggcagcataaaagcatgtttttaaataaatgtaaacacatggttagccaaggatgacagaactctggatcatttctctatctttccaaaactgaaataattttaaggccataaaaaatgtcacagcatggttttagaaagaaggcaatccaaaaataaagacacgaattcccataaaagctaggctatgggtatgaggtgcccgttgccatggggtaatagaaatctaggagtaggagagacaatgaatctgaactgtctcaactttgctatgtccctggattgaggtacttggcagccccgagggaacggagtgattggaggcatgacctttggagctaatgtatttctgtactcctgtgtttatcgcagggcatttggttgaattagtgccacttcctgccctaaggatctcacaatctagtatgtccccatttgttcctaagcttggtcttagtttctgcattctcccatatgattccactcaatatcttctcaacagtaagcttgtagttgaatttcttgggaggacgctcccagaacatcatcctcagcagctgcagggtgtctctggggcaggtcttgagactgccttaggctctctgctgccctctcctggccacaactgtctctactgccaaggtgctaatgccgaacccctgtgggatctctggtccaaggaaacatctgcacacaggccagggatggcgcttagcttcatctgtgctgcaaactctcatcagtaggcttgctggctctgtgaccttactagctgaactccttaatctctctgcacttcatttttctagtctataaaatggagataacaacagcacctacctcagaagactgttatgaagagtaagtgtattactatttatgagtcaattaggacagta

SEQ ID NO: 24715 - DNA, 2300 bp, Homo sapien
ttttcctaaggtaaatcctaaaagaaaagagatgttctaaacagtagaacacctttgtaagtcaaggatttgttgtttggaagtcacattccccttaaaagattactgtttctccaccctttatcacaagggacacttttgatcatgatattagtgactggcatgacacaggcactgacagaacagggaaatgaccaataaaaatagactaggtcaaaaatttgtaattaacaggtgtgaccacattgatatgggctggctggatgtcagaggtacttttgacccttgttttgtatccaggtatcccattatttgaaaaattttacttaacacatttcatgagttaagtaataagtattttccagtttcttaattgaatgatgatctatgatttacatcagcttaaggtcagtattacaatgaattggtacaattttagtagtcatttataaaaatgggtgagtcagttggcctgagtgggtggccttatattaagcaaatgtataatttccatttggcattttaaaatattaagaataaaaattaaaaatatttacctaactttatcagattcctagggtacagtggactgctgtcatccattaatagtgatgatttaatttatgtgcctcttagcctgaaaatgtttttaaaatcaatctctctctctgtcttcctaatacacacacacacacacacacacacacacacacaccccacatatacctgtatacatatctgtacatatctataaatatagattttacgtgaatatctttataattgatgtattctttagttgccaaggtatttaccactcccttttgccttacacatttatgttacttacctggcttctgaaaacgtatgtgtttttaattcctgatttagaccgttatatgtttgtggtgatatcactttgtccatgtcaaaattcaattccagtataatgagtcatgctgtgatagagtttttaaaatctataattggcttcaacttttgaagcactattaattcagattttactatttatatttggcaatttctacttgagttgaattcatcttcacttccagtacacacacatttcattttagttcaaagatttgctaactctttcaaatgctagtattgatcttcagagattttaaaaagcacatttgactttttgtgccatataaaacttctctttttgacttttgtttcgattcttccttttacttgcctcccctactcctccactgaaaccagttctctcaaaactacctgcccccaacctcagccaaaggaaaaaaaaaaaaagcatctgtgatcttgagtacttggtgatggtgcccttgacccatatgcacatgcagggaccaacaggcaatgttcttggtgccaccttggtttgcctgttaccttcctgcccactcctttcctcccctgggaccacttgctgatgctgccgcaaagtctcgtctaagaaatggcaacattgtgccctaaatgtgctggctttcccttcccattgtactttgtaaagatcatgggtaatttttgtaaggacaaagtagtaaaaggacaaccagaagaatgctgaatggttacaacctcagtggcagatataatgtctttttgatgaacattaatgatctagggtatacttcagggaaagtacagtattacaaggacttcgagagagaacattatgaccggcacctgtaattcttgcccatattcacaagaactgaatgtcctcgtgtgctgacttctgcattgcattgctaatgttaagtaagagaatggatgggaaacaaatggtagcacttggggacatttttctttcttctctaaagaaaaaaatggcaaatggtggtgtgaatgcaacttgccacagaacataaaagcgtaagaattctggctgtttgaggtgaaaaaataagttgatttttctttaaattgtaaaaattagctccaggttctctcaggagcttaaagaaaaaaagctttgagaaatgggagtgaatagcaagatagggtttgtgtaacaagttcctcaaaccacagaggtcacatgggctctttctgctttgctacttttgattacttgtcacagttgtacttttagcttcccccatcctgcaaggccactcaaccatgtgctagctggagtgatctttattcacaatgtctttacaaaggctcctgcaacacagcagcaatggcaatttggcggacttctgcgctgggccagcgtatagctcttactccacactcaccggcagccttacgatggacgataatagaaggattca

SEQ ID NO: 24716 - DNA, 2300 bp, Homo sapien
acaaacaatatattgaacccaagactgtactaattcaaaaaacgcatactatcttccaagtcctataaaatagaccaaagtgtgcaggctgatcaaatacagtgttaagatttgtgctccagtactgatggaggcattgccaagtgaatttctggcaggtgaacatcttatctagagtgagcttgttgagccgggaaagctcaacagccctgttccgtgggcagagatgtcccttgttagctagacacctggtctgccattattagctttctctgtagcttggagtgggtggctattattattcagccttttttttttttttttttttttttttttttttttttttgagcccaggctgtagtgcagtggcgccatcttggcccactgcgagctccccctctcgggttcacgccattctcctgcctcagcctccagagtacctgggactgtaggcgcccgccaccacgcctggctaatttttggtatttttagtggagacggggtttcactgtgttagccaggatggtcttaatctcctgacttcgtgatccgcctgcctcgtcctcccaaagtgctggtattacaggcctgagccaccgcgaccggcctattcagcttttttcagtttccagaatattccatattgagtaaaaatagcactacagaaaattgccccttccacttgagacaacatttccatgtggagtatggccgttcattgttaacacaataggttggaataataacagcttggacactcagctccactttctgatgcagtcaacccccagattaataatttgtattagaaaaagactgttaaagctgggcaggtgactcacgcctgtagccccagcactttgggaggccgagatgggtggatcatttgaggtcaggagttcaagaccagcctggccaacatggtggaaaccctgcctctactaaaaatacaaaattagcctggtgggtggtgagcgcctgtaatcccagctactcggaaggctgaggcaggagaatcacttgaaaccaggaggtggggattgcagtgagccgaggttgtgccactacactccagcctgggtgacagagtgagactccatctcaaaaaaaaaaaaaaactattaaaagaaaataaatgtaacattataaaatacaattatgtttatccacatttgaaatttttaaaagatagccttgattttggtaaagtcagaccttaattctgggatttatgtctttactttcttgattggtagtataatgctcttttttctttttttaatgtgagctattttatttttattcttttaataaatattttaattaacaaatcataattgtatatatttatgaggtataatgtgttgttttgatatgtatacagtatgaaatgattaaatcatgtgaattgacttcttttttgaaatcatagtaatagaggatgctttttttttttttttcaatgttcttccttgacaacacaaaaatttggtgtaacccttggttgggtccccaaattatttttgaaattttactggtcagtgaaatttccaaatctggtaaccaccattatcaggtatgattttatgtgagcataaatataacagctataagaccaataggacctatgtgaatatgcaaattataatacacattaggggcttaattatcagtttctcatttcttcttacaatttagaaagacttcactggcaatatttggataggtggaatcttttggttcaaataagagatttctctcaataaataccggtctagcaaatcctcccgggctagaatggtgatctttaagggcgttcacgagtggagggccactatttccaaatgaaaaagcgtcatcaaatcatcactgcattgatttgcttctagacaaggcattttattttaaaatttcaaataacagaaaatcgagagtgcgacattttatgattattttaaagacacacaggttttaaaaatgcttgagaaatgctaatccggagtggaggtcattctgtaaaaaatagcctgcctcctgcttctgctgccactagatggtacccgggtgcgccgggaagccgtcggagaacgtctcctgggggttgcgctgccgtcgggcaggtggccgagccccgcgggagctgtcgtcggggccgaattcactgcgccaaggtccagcggaaagctggggcatcccggcgaccgcagggtgtcccttcgcaaattcatcaggcgaaggggaggcggaagctcctggccgctgctctgggggagggctccgagctccaacctgcaagtcca

SEQ ID NO: 24717 - DNA, 2300 bp, Homo sapien
agcattgagtttgtgtagaatattggagttattcaatatttgacttcttggaataataagctttttttttttttttttttggagacggagtcttgctctgtcgcccaggctggagtgcagtggcgccatttcggctcactgcaagctctgcctcctgggttcacgtcattctcctgcctcagcctcccgagtagctgggactacaggcacccgccaccacacctggctaattttttgtatttttagtagagacggtgtttcaccatattagccaggatggtctcgatctcctgacctcgtgatccgcccgtctcggcctcccaaggtgctgggattacaggcgtgagccaccgcgaccggccttttttttttttttttttttttttttgcaaatgagagctttacaacttgcagaggatgttgctttagagacaaaataagtatgtggggagtaaatccctgccattgttgtaatgtgtatggtttaacaatgctctctcatacactaccctttttgatcctggtcaaagttctgggaaatagggaggaattaagttccatttacttttgaggaagcagacccagaaagttcattacattctgctatttaggctcccggtatcatgatctattggcagatcacaatttaaggtgcagttatcaaataattagcaagccaaaccagacaaaatataatgtgtcctagcagtttcttgcctttttaaaaaagcatctgttttgtgggtgtctgaaagggctcagatttgtcccacatctccagttttttgtttgtttggatccaggataaaacaagaacaaagtttttttgtgcttaggaatataagatggtggcagaaaagatcctcaggatgccacccacatctcaaagtccaacaaccatctcatctcccatactgtgatcctttgataataaagtcaattacatacaacatttcaccataggtctttcatagaacttagaacacctagcatataatttagtcctgagctaggtgaagaagcaagaaatgttttactctaaagcaatttttatgacgctatcacttttcaaggaacccccaacagtagtaataacaccagtattgtattcttgctttttcgcgttgttcagattgaaataatcccattcactttaatgttcaggctccataggtgaattgaatttaatttctataaattggtaatgttgccgttgtccttatattttcaggcacaatccaggccttatattttcaggcacccgtttgacagttagcctctagggattaaacaatactcaaacaagtttttcatatactactttaaacaattcttccccttcccttaatccgtgtgtgtgtgtgtgtgtgtgtgtgtgtgtgtgtgtgtgtgtgtatgttcccttagttcttcaattgctgaagttgtagctgccgaaattatcttccataggtgaggtcttttaccaccagacgtgggtcacacattgtagatggccacatcacctggcgcaggtggtccagctttggtcgccattcatagagggaagggttcccaaaaggcacccaagaagagatgaagtttgttaaaccaaagcttataggtccagaaggcagtcggacaactggtcatttccagggatgaacagagagggcgcccttccccagaggcacaaatggccaggacgcaggggtgggacaagccagtaggaagcccgcggggctctcacagcgcaacctggttggacttaaggaccctggacaacaaacgtcaggagagctaggaggctggctcttctgcgggaggttatagagcggatcacctgggcgcaatcgccgcgtagttgaagtttccctaaagtctcagtggggcttttcctcccgtgagaagccccattcctgagtatctagtcccggaggctccgcactgcttccccacgccccctctttcttcgccccagctctgggcgatctcactgccgggcacagggccgcctttgcctgcctgccctgcagcagcaggcccgggcggctgcgagagggcgcagggggcggaggcgcggcaggggcgggctctgccgcccgccccaccacccgctccccgcccggctgcggggccagtggcaggagcgccgcgcaccgccagccgcagggggcgtgggatgggggcggccggggaggggggcgcccacactgactagagccaaccgcgcacttcaaaagggtgtcggtgccgcgctcccctcccgcggcccgggaacttcaaagcgggccgtgctgccccggctgcctcgctctgct

SEQ ID NO: 24718 - DNA, 2300 bp, Homo sapien
gctctaatggtggagtgataatttatgcgttcgtttgcgtttgcaggtgatggaaaactccaacccaggcgagccttaataagatgaacatggaatggctgccattctgtggagtccagggtaaaacaggttttagatctgggttgactcagggctcaagcagtgtccctagagccctgttatttcccctccacttcttcttttgtcagttccatcctcagcaggttctcttttcaaggtagcaaaatggctatggcatatcctacattcaagtataatgagaaaatcacactttcttttctagtagttcctgtaaaatcccaagagtcactctgattgggtgggctcaggtcacgtcacaccctggaatccagtgcagtgtgatgattggttttcaaccacacctcagcatgcagaataggagggggtgtatcccagacccagttcaggagttgttgccgagaaggagagagggaggaactgaggaagcatagagtttctgcagaatgattccatgaagcacatattggggactttcattctcataaaaagagcactgttcttgggacctcatacagtgttgcttggttctcaaaaagtactaagttcttgtgtggtttctgggtaagtctggcatcccccagaagcagggagccagtgattttcctgatgcccttgggatgttcactgcatggtatcagattacagtaggtcataatggatgccatgcctggtagttgtgtggtgtgacattagatcaattagctttccctgtacgccattacatcaaagagtgtcgctggacagctattctcaacatatgttttgtttgtctctgaaaacacgtgttccatttctccctgggccattcagattcattttgggtgactgtcttgtcagcctggggctggggagaggggaggacaggcttcattttggcagtgcttcaagcttggagcagcatcctgcagccagcaccataagctgtataatttgtccatggaggcctatgcattatagaaatgaaaattccttatctgacagcattcattgcttagcatgcagcaatttggctgtcagaaacagctggccctgcagggtgggacaatagaaaggcgagacccgagagaggccagtgcttactcaagactcccactgtgagaggatcaggttactgagactgtcattaacaacagactgcaaggggctctgggcacagcttccagtgagcaggagcctgtggctcagacagtgagtgattttcccctgttttgctgaatggaacaaaaataaataaattaaaaataaaccattaacctttgctgacactcagatgttcagttctgattttgtcttctactgggtgatgagcatttctggggaagtaagtcccttctaacctaagtatagttattggtgcattgcagaaaactcaaaaaggagtggggctgaggggcaggatggattgcttgacacctgcatgttggagggctgtaatttttaggttctacttacctagaaacaatgctgaaaggaccaggattggagaccttatgaggcaggtttaaacatgaagtagaaatggggttgtgcgttctccccagatgtacatacttggaagagccatgcagcaagcagaggagaggaacagaggagctgtgtggcttgaccctcctcggaatctgcagtgtggctggctctgtgtgcttcctgtattgattccatgactcacggagcatgagctaagcagaaagcacacttaaactacagaggagacagctgtctgttacagaaggacatattttctgggtttaatggcgccacatttttcctaatagtttgtacactggggatgtacttactagtaatgtctgctaaagggtctttattgttttttcctttttgaataaaaaagacattctttaaaaaaatcacctaaatattattcttgacttttatttcacaacaggacttcccttctaggaaaacagtaccaataagcaacttgtcactatgggttgtttttttttcccccacctcttgatagcaagggtctatcggaagtttaaagcaatgcagcgggaagtaccttgcctttttgaagcgaatagcgtttcagagatattgggcggctcaaggttagttctcctgttggaattcgtttgttgttcagtgcgactggaactgtactttctcctgctctccctctaaatctgtttcgcttttacatgatagaggctgaagttcccagatgttgtttggattaaagagtgtgtgtggggagggggggaaaagctttc

SEQ ID NO: 24719 - DNA, 2300 bp, Homo sapien
tttacactcagcaggaaccatgcaaaatttgatccttgcatgcctttttgatgctctgggtaatattagcacactggggtgtttttgtgtatctaaggaccgaggttatcagactctctgcagcggagaatgttcctgcatttccactgtaagctcccatggcgcctaggacagggctagatcactgcagaagcccctccatgcttatttctgttactaaggaagccaaaggcgaacatggcaagctctgtcataaccctagaccttgcaaggaaatgagcaaagtggaaggggatctgaaggcaggtcagagatggcctggatgagaatgctaaggcttctctctgagaatccagcccaagtctgacatgcagggctcgagtaggtggccgcccgcagtcgccgggcccgggatgcccgcccgtccgcccgcctgccccgcgcgccctcgggagctgtccagacggccccgcccgcgcctacctgggcactcacccgtgccgcgcggcctcttctcctcccaccccggccacaggagcccagctcgggcctgccccgccgcctccgaggagccccgctggcggcgcgctcatagcttccacccgggccaagcgaccggccagacagcgccaggcgcgccgggggcggcgcggtcaggctcggcggggctcggcgggctcgccctcggccgggcgcctgcagggggcgcggggacggccccgccccgccgcctcctctctcccctcccggctccctggatccgcgccgggaggaaatgatgtgttgctgcctggttaatcacagctccagacactcattggccgagcgctccgcagccacttcctcctcctcctcctcccgctcctcccgctccggctcctgctctttgcagccgccgccgccgccgcagcctccccctcggcgcagggggaacttttctactctctgtgacggtctcccccgccgcccccgggggcaagcccagctggtccgcccgccccgcccgcggtcgtgctcccagcccgagcctctgcgcctcgggaagtttattctgcccgccctcctccccttcctcctcctcttcaccccgcctccccgccctcccccggctctttcccccgggtggctgccgctgccgccgctgccgctgccagcctgctcctcggccagccgcgccggccccagggccgggaagctcccggccccacgcaccgctccgctgcagccaccgcagccgccgccgctctgggccggccctcggcccccggctcccggccccgcagagttccgggctccctcgccggctgcaccgccccgccccgccccgcgccgccccgcgccgcgccgacctgcagcgcccggctgcctcgcactccgcctcccccggctcagcccccggccgcggcgggacccgaggtgagcgcaggtcgccggccgcgcctgctggagccgggaggactgagggaggaggtagcctagcgggagaagaggcagggatcgggggtggcagggtgggcgtctgcggtgcctccccctcgctttcattcctttctcccccaagcttgatcccctctccgtgggggaagcagccgcggaacaaaactgtcttgctttgggcctgaactgctggtgggatatggggggtgggggggcagaggcgtggagcgggggtctcaggtttgtattggggtgtgtgtgagtgcgtgtgtgtgtgtgtgtgtgttgtgaactccttcagggtgtgcgactctgacttgtaaatcgatctggccgcggggccacggggcttaccttcctagctgagcttgtagagagtaaggagatagataggcgaatttcccccaccctcaaaatatccatctcttccaagaggaattttctgctggagagacagccaataaactctgctcaactccctccctccctcggttcttcctagctgcagtttcaaaaagcttcaaagccaggaatgtgggattcatcttccgatccccagaaggcaaatgtggttacagatgttgcacggtactttgccaagtttaaaacccttccttcaacactgtaaccaaaacagtgaggctagaacctcgggcgcactaagaagagatgtgggcctctggggccgctggattcagtaacttccgtcgggttctagactggctcggctctgtccagtttgtgccagatagtctcccaccccctccccacccctcctttcccctggagatttgaacgctgcttgcatgggagaaaagctacttagagaagaaaacgttccacttagtaacagaagaaaagtc

SEQ ID NO: 24720 - DNA, 2300 bp, Homo sapien
acttaggcttcctgacgctgaataccagaaatagacaggctcaccaactggtatcaggtagtcctggacaatgggtcgttccaccgggaaaaggtctttgccactatgcttacagcttgcctaaaatcatgctccctgtgagagttgctaccaaaagagaaagaggctggaatacaaatacccagattctctcaacttatccttgccaggggaggataaatgaggaggtggaagtatccaggaatgttacagctcatgcagctctctctcatgggaggaaacagcaggagtggagaatgagtattccctcccacagaatgattagcacagtgcctggcacatgctaatttattatttgtcatctatgcctattatatttactggttcttaaggaaaagtgaaaataaatacaaattatactttgaacatatgtgagagtggtaggtggcaagttttagagagattgataaaacctgaatagttaaggtccttatatgtcataatgtgcattttcattttgtttcgtagataatggataaccaaaaataatcttaaatcagggagaaaccctctattaagtctgttcttacactgttataaagaactacctgagactggctaatttatgaagaaaagagatttaatatactcatagttctgcaggctgtataggcagcatggctgcggggcctcaggaaacttaaaattatggcggaagatgaagcagaaccaagcatatattcatcatggcggagcaggagatggagagagagcaaagggggaagtgctacacactttcaaacaaccagatcttttgagaactctatcatgagacagtactagggggatggtgccaaaccatcagaaaccacccctatgatccaatcacctcccaccaggccctacctccaacacatagggtcacaattcaacatgagatttggatggggacacagagccaaaccatatcaaactttcaagtttgcactttagaatatgaactctttcttagactgtttcatgttgctataaaagaatacctgagtctgggtaatttgtaaaagtaagaggtttatctggctcatggctctgcaggctgtatgaccatgacaccagcgtctgcttctggtgagggcttcatggagcttccactcatggtggaaggcagaggagagcaggcatcacatggtaaagggaaagaacagagagagagaatgagagagagaggaagaggggtggggagggaggtgtcagactctttaacagatctaacaggaactaagagtgagaactcactcaatcccgcaagaatggcaccaagccatttgtgagggattcatcctcatgaccccaacacctctctctaggccccacctccaacattggggatcaaatttcagtatgagatttggaggggacaaatattcaaactatatcaaactctaactgcagtatacaacatagagaagatgaacagtctccctgagccaggcactatggtatgcacctaatagaatgctctctcttttaatcctcacagcaatcttgagaataatgccacactcacatcactcccattttaagattgcataactgaaactttgaaagtttaaataatttagccaagatactcagcttataaatgaaaaaatcgagaatttgatcccatatctacctgactctaaaactcaggactggcttcatgggcccgtgaccagtacagtcacacagagacctgaatttagaagggctctgagcttggtttcatgctctgctgtctcagtattaaaattcttaatcattttagaacaaggagcctgcattttcattttgcattgggtcccttaaatgatgtagccagtcctgccaagatatcttttcttactattattccagtcaccactatcaccaaatcggaaagattctacacaaataaaactccccttttcatcagagttatggaaaagtaatgagtctaggtggaaaattaatatgtggatgatcgtatatgggtgtttctgcatttacacgtgtaaatgttcacaattcagagcccagtcattgtcaccactcttttctcaaacattttttttattcctagggacttcaccagtgctgccatgctggccccaggctgtgagttggacccagaccaagaagtggtgaggacaaggcctgaaggttagtgagggaagaggagaaatacattcatgtctaagcacatgtgtctggtcatattccaagtctcagtacaaattaattttgaattatgtggttgatgttttccacatttcagcttc

SEQ ID NO: 24721 - DNA, 2300 bp, Homo sapien
gaattgagaatgtaatagtgccagcatcataaaggaagacggtaggaagtgaagtgttttgtctcaggcaagacaccatggagcatggatttggcagatctgatgcaagaccctcctgatcacaaggctggactgagtcatgggctgtgcctggcacacagcctttgtttgcaaattacccagtggccaggtctgagtttgccttgtgcactcctgtgtgcataatttttaaaaacgaaaccttttcccctgctcttcaggtgactggccttttgcaatacagtcaatcaaaaagcattgctgagaaacaacctaccataagagcaggatcgagtcttgagaagattgaaaggtggggagaataatttaagactgcccagaaggcattaactagtattctactttcatcaacttttatagattccacaagattattctgaacttcatccaaatgacaattacttgcctaaatgtctgaccgagttgttacatggggtccataaatcttagatggcattacctggcactgttagtgatcaagatcactggttgactgaatctgcaccggaaacagacatgttaatcaacctagttaattcactgtggtaattaattactgaacacttatctaattagctaacatttttacctctcaaagccagaggtaaatgccagattgaaattggtggttctcctcattataccttaaaaataaaattgagagatatggcatggaatatcaaataaaggtgtgctggtgccagcagtagtgagtgagtatgttgagtctcaaaattgccagtggttcctgggaaggagcagcaggtagaccagcctgagatgagtcaggaggtaagagacagatgtatacaagctatcaacaagaactactgttctaagttacaaaggcaacacacatgttaaagactattttgcctcatagtcatcattaccttttccaggataagtgtcctcaggaattttttgctatctgggcacagttgcaaacgtctagttggtggtaacagtggcaagatttaggctacatggattccccaatatagagtcccctattctttttccttcctattctgtaaactttgctgtctgaccaagatggaccaaaggaggccagtggggcattcaaagaatttgccaagaatgactgtcaccaggaagaggagcatcttctaacatggagaactcagttaggatatgagcacttgattcttgactgtgatgcacattcttggaaagaaatccaagcatattaggaggtgtcttgtatttgctgctgtttggcatttatagacattttaggttctgatttgcctgaaagccatgagactacgttcttgaagctctcaccagcatagaacttcagctgattgctatgggagtgaagagaaaaaagatcaggatgaagttgtctagttttctagatttttctgtcccaaaagtgaaaagtgagaagcattagtgaaagtagtgaattcatgcctttcttggcagagactccgttttctgaaaatactatgctgtattattattccatgtggattaacccctggttcaataaattttaccaatggcctacagtttaactaaagaaagaggccctgggaaataagttttgtttaattatcagttcttctgtgtgaactggaatgagcaaagttcagataaagggacattctgaggtccagactttggatgcttccctaacttgtgatgacaaagaatgaaaacaagttggcgaggggctggatggagatggggaactgaaatgtttgagaactgaaagttctcgtatgtactggacacagttttgagaagacctggtaggtgtgttatagaaaccaaaagaggactcgtatccatatacagttgtctcaaagcaaataagcctgtttgcaacatcaaacctgtgttgggatcaaggacagatgtaagggaaagttctcaccaatagttaacaagctaaccaacctggtcaaagagctaggatgccacaccttcaaagggggcctatcttcttgaggaagtgctgctctgagagctgggctgtggtataaaagtcatgtcagggaggacatcttttatttgataggaaaatttaaaatgctaaaggaaaaattttcttagcaatttcacaggaaaacctaagttttaagagaggttatcattctgactgggaactgaactattatgactaggtctataatttaataacaagtcacaatatctctctttcttgacatcaatttaaggtgacttttcacatagtagagagaatggct

SEQ ID NO: 24722 - DNA, 2300 bp, Homo sapien
gattgttgcacaacaatgtgaaaatacttaatgccacttaactgtatgcttaaaaatggttaaaatagtaaattttatattatgtatatttatcacgataaaaagtcaatgtcttgaaagacaacaaaggctgtagaaatgaatcaaattaaagaagaacacaaaagcaatttaaaagttgaataaaatgttaacaatgggagaatctggggtaaagttacaacaattttattcttgcggctattctataaagttatttccaaataaaaaaagtttttaaaaatgaagaaagagattaaaagaattcaaaacaaagtgacaaataaagactacagacaaagaagatccaacatagcataatagcataataacagtcctggggaaaaaaggaaacataacaaacactaaaaattataattttacaaaattcctgaaataaaattgaatttatattgtgaaagggaatataatttactaagtatattaacccagaatgacaaacacaaagtccagtaaaactgctatattataaaggaagtgaaaaaaactctaattaggcaaaaagatcaagtgattcttagggaaagaaaaccatgttatagccagccctttgacattttatgctaagaaaagaaaatgtaaataaagtatcttagacccaggaaaaatttattttcaactataaagacgaccatcaacctgttattaacattcaaggacccagaaaatattgcttccatgactaattcctaaataatcttctggaaaacaggcttcagacaacctaaatgacaagagagaaattgacattaaaaactggcagtattggtaaatatatatttactaatagaataagattcaatcatggataaaagagagtgtgtataatgtctacacagtccctcgcaatatagataacaaaaagaaaaagaatagaaaaggcataataaccccaaattttattatttttgtttttattatattggtattttattctaagacttttgtgtggataatgtaaatgagtaattatgtcatattctaacatccgtgtgtaattgggcaccagaattgtcagtaaggaaaaaagaaaatacaaaagtaacatacaagatatcaagtgaaaatcctatggaatttgaagtaacagaataaataaaaaaaaattttatctttagataatataagcgtatgtctggatttgttgggttttttttgtttgtttttgaggcggagtcttgttctctcacctaggctggagtgcagtggcacgatttcgtctcactgcaccctctgcctcctgggttcaagtgattcttgtgcctcagcctactgaatagctggaattacaggcgctctcgaccacaccttattaattttcatatttttagtagagacagggtttcaccatgttggccatgctggtcttgaacttctagcctcaagcgatccacctgccttggcctcccaaagtgctgggattacaggtgtgagccactgcacttggcctgttttgtatatatgtctgtacatgtatatgtatatgtgtatgtatatgcatatgtatgggagtgtgtgtgtgtgtgtgtgtgtgtgtgtgtgtattttctaaccatgctcattgaaaaggtctagaatagaagatcaacctagtagcaatgtgtattctttgtctccaaattttggttttgaaatacgattttccaataaaaagaaccaaagcttctcagagaaaaggttagttccaggtcagagcaagaaatattcaaaatgagcttaaaacatcttgttatgcccgataacaaacatgacagatttcaaaaagtggctgcaaaaatatttcctatttcacatacttttttccaatgtgaccttgccatcaataagtggactttttctcagccttttttaatctgggagagttctatgactgctttgatgaaaagagtatggaggaaaagaccctatcccagttccagcagtagatcttaactggtctagcagcttgcattttatacctcttagaatgtttgctcttggaaaattctatcttggaacccagctaccattctatgaaaagccaagccatcttgagaagtcatgtgtaggtggtcggtcccattgacaacctcaaatgagctgccagccaacaaccagcatcaactgccagtcaggtaagtgagtcctcttggtcattcagccaagttgagcttttggatgactacgtcctcaactagcaattgactacaaatttataatataccccgtggtaggcagaaaatgtctcccaaagatgtcaa

SEQ ID NO: 24723 - DNA, 2300 bp, Homo sapien
atagaggaagggaaatgtgtaagcaagaaagtgtcagtggagactggccatggtttgctcccatggggaaaggccagagtgcaaaggtatcatagagttgatcctctctggaggcaagtaggctggctttctgtacctccaggtaggtcagtcattggttatggttggcctttgaaagagggtgggagggtagccttctctaaagagggtgggagaggcagctcctagttggtccatagcaattctccagagaaggaaggggcatctgtgagttatctgccaagactcacagcatctcggtgatgggaattccatctaataaaggcgatgtgggtgtggtaccaacagtatccattatagaggtgaatcacaatttagaggaacagagaactggttggacctagcttctattgcttcccccttcccagggcacacactacccatacatccacatttataatcaaataaaggtggaaattcaaacttttttcaagtccttttgattaaaaaaacattttacaaacattaatgaagacatgtactttagttctatttttttgtttgttgcttgtggtatggtaatgcagaatttatgtggctaactctgctattaaaatgcatttatgttaacctgaatgaagatgggctgcttgagagaggacctgagatgttgtccatgaaaacctgaggatgttttaaatgccaagtttactcaggcaaacctttctcctggcttaatactcctatttgtactgctttatttgcagaagcctttgtctatacgtgcataactgcttcagacaggactgaaacacttggtgtgttcaatgaattcatttccagttctctctgcaataaattattatgtcatactgaagaactttagagtattcctcttcctggtagaacctccaactctctttttttccccctattatgaaacagataggacttttttctttgaaaaagaatttttctttcttgctacttatcagaataataatcttgtatgagaacattggaattcccatcagtgtcactgatttaagaggtgttttattctgttttaaattgtcaaatattttttaggggcatggaagatatataagaaattctttgaaatgcacagttaacttaaagtataagaccattgatatagtagaaataaacaatgacaagtatcctcttggattaagaagtatttgttgctaataatattccctctgattgcatttgtatttgattattctaatttattaaacaggaataatgatatgcaaaataaactcagaatataaaaagatattaattcagtttagtgttcaaactgatattgcaaacttttcactctgcacaagactttgctaatagtctagaaagaatgcaaaccaggatggtgcctaggagtgttctgaaatgaaaaaggccttttggagcgtagtggatatgttactgggaaggtgacttgaagggatcctatttgcaaatgatttcttcagtggttttaatgccgttggttatcttttcactatcaatatttagtattgcctctatgaagcactaagaagataaagtaaaagataattttagactttcttttgaagtcaaaccttaaataagtctcttcctcagtctgtctttattttccgttacataattgctcatttaactgtctacatttatacttttctccagtttagacataggaaccttgttgaataaataaaattcctttttaatctgtatatataattattttccaatgtttatttcattcattggtcatgatttctaaaatattgttttaggcaagaataatttatttttgaaatactatgtctcatcaaacttaattgaattgtgcctgatactcatggcaagaccaaataaagaactgaaggaacccattgcattagaatttagaagcttttctgaaacagacattaaatttggctaatgtatttaaaatacacagaaacctcgttttgcttcgttactatcacttgctagtagcttgaacagtttgagtccctcaaatttcatgattgctcaataatatgttgtgacatttttgttgcttctagaaactgtcaactaagtgaagaagaccactggatttaccaggctattttggatcagtaccctggagatctctttggaagaaggactctgtatctggacatgttacaaagatattttcctcacaaatctaggcatgatttggtgagtactggacctacctacatactggcaagttaaattgttttagtagtcaataattattaagcaatgtacatgta

SEQ ID NO: 24724 - DNA, 2300 bp, Homo sapien
attgtaacttcatactttattggccttgagatcccaattccaaaatcacttcctcagaaaagccttccctaaccactcagtgaagatcaaatcctattatacaccaaacagcatggtttttattgcagtttatacttcggataattttacttccaggcttatttgataaacactgactcctctccctcccccagcaaacagtaaacttcataaaggtaagggctgaccatagcccaagatggccgaataggaacagctccggtctacagctcccagcgtgagtgacgcagaagacgggtgatttctgcatttccatctgaggtaccgggttcatctcactagggagtgccagacagtgggcgcaggtcagtgggtgggcgcaacgtgcgcgagccgaagcagggcgaggcactgcctcacttgggaagcgcaaggggtcagggagttccctttccgagtcaaagaaaggggcacctggaaaatcgggtcactcccacctgaatactgcgcttttccgaccggcttaaaaaccggcgcatcacgagattatatcccgcacctggcttggagggtcctatgcccacggagtcttgctgattgctagcacagcagtctgagatcaaactgcaaggcggcagcgaggctgggggaggggcgcccgccattgcccaggcttgattaggtaaacaaagcagccaggaagctccaactgggcggagcccaccacagctcaaggaggcctgcctgcctctgtaggctccacctctgggggcagagcacagacaaacaaaaagacagcagtaacctctgcagacttaaatgtccctgtctgacagctttgaagagagcagtggttctcccagcacacagctggagatctgagaacgggcagactgcctcctcaagtgggtccctgacccctgacccctgagcagcctaactgggaggcaccccccagcaggggcacactgacacctcacacggcagggtattccaacagacctgcagctgagggtcctgtctgttagaaggaaaactaacaaacagaaaggacatccacaccaaaaacccatctgtacatcaccatcatcaaagaccaaaagtagataaaaccacaaagatggggaaaaaacagaacagaaaaactggaaactccaaaaagcagagtgcctctcctcctccaaaggaacgcagttcctcaccagcaacggaacaaagctggatggagaatgactttgacgagctgagagaagaaggcttcagacgatcaaattactctgagctacgggaggacattcaaaccaaagggaaagaagttgaaaactttgaaaaaaatttagaagaatgtataactagaataaccaacacagagaactgcttaaaggaggtgatggagctgaaaaccaaggctcgagaactacgtgaagaatgcagaagcctcaggagccaatgcgatcagctggaagaaagggtatcagcaacggaagatgaaatgaatgaaatgaagcgagaagggaagtttagagaaaaaagaataaaaagaaatgagcaaagcctccaagaaatatgggactatgtgaaaagaccaaatctacgtctgattggtgtacctgaaagtgatgggaagaatggaaccaagttggaaaacagtcttcaggatattatccaggagaacttccccaatctagcaaggcaggccaatgttcagattcaggaaatacagagaacgccacaaagatattcctcgagaagagcaactccaagacacataattgtcagattcaccaaagttgaaatgaaggaaaaaatgttaagggcagccagagagaaaggtcgggttactctcaaagggaagcccatcagactagcagcggatctcttggcagaaaccctacaagccagaagagagtgggggccaatattcaacattcttaaagaaaagaattttcaacccagaatttcatatccagccaaactaagcttcataagtgaaggagaaataaaatactttacagacaagcaaatgctgagagattttgtcaccaccacgcctgccctaaaagagctcctgaaggaagccctaaacacggaaaagaacaaccggtaccagccgctgcaaaatcatgccaaaatgtaaagaccatcgagactaggaagaaactgcatcaactaacgagcaaaatcaccagctaacatcataatgacaggatcaaattcacacataacaatattaactttaaatgtaaatggactaaattctccaattaaaagacacagactggcaaattggataaagagtc

SEQ ID NO: 24725 - DNA, 2300 bp, Homo sapien
caaaagaaacctttcaactaaatacaaaaataaacaaaaaaattaatgttgagtggcaacttatttcaggggacattattcatggtggatttcagtaacattttaattatgacaaacacgaaatctacaatatcaaaatagtcatctgagaaaaacacccacacaaaaagattattggagtaataatcttttattttcttctttctatgctagcctaaggcaagagaaaagacccattttttctttccattagacacaactttcattcatttgatgttattgaaatttaaaagaagcaaaatcattggtatcttttcattaaacatgtgtctcatataacaatttgtggtttactttttctgttctataaacaaaaacacacattaaaaagccggaagaagtaaaaaacagcctatttccatgatggccagccatggcacagcacttcctggcccctgctgatcccttctcaattctgaaaatatttagggggaacatacacacgttcacctgttttgttccacagtcctaccctgtgtaggactgtcaactgagttcacattttactacaaatgtggagaggtttttttttttccaatcaaggcaccatattaacatttcttaggttacatctttgtaatcttcaattatagtaagataaaaaccagtagcaaagcatatcacccaacttaaaattcagaacaatacttagacatatgcagcttgcacacacattaacctgtttctcccaacaaaatatttgtaatttccaaaatcctatcagctttttcacacaatatggtccctccaatttgaggggtagtaacatagtctccttactaaagagattagtctaaaaaaagtaaaatcgccaaaagaatgtaagaatatcagtggctataggctagagcaatatcatcttttaaagcctaatatgttcatgaaatctcactttaagaaggtgatatctaaacataaaatttattgacaaaaaacaattagtattgataaaccaccacaaaatgattttaaatgaaagtagaagacattattaaagctcaagatttttgcgtgtactgatttcatgcctcaggttatttccatatcaaatttaaagagatactggaaaatagaaaacaaaatccatcaactgtaatccatttcccttactcttttgtgaaatcatcacaaggtgtgaaggattgtttctgtttcctctatctttaacaagcctgtaacctctcaagtgaaagaacatgcacctgtcaagctcatagtgcgggatgtacacacagatgtgtttaataaatatctgcccacagggagattagaggtttgctttgagaatcagggaacaggctagctcatgtgttgacgctttggcatctatcatacaatccgccacctcgttcccttaccaaaatatcctcaaaggaaatcctctttgagtctttcagaagagttatgagtttgaggacccaaaacgttgaggaaagatccaccccagggaagggggagtggctgcagagaacaaacataagtaggatttaggtggctcagtgacgtcaggaggaagcagcgatggaagggatggggtgcaaactcacctggagaagcagaagctgcacacatgtcaaaggtcaaagggcatagcctcagggactccccaaacgcaggaaaagtgaaacgcccactcctgggctctcgccgtcaggggtacatctaagggctcagctgttcctacctttgacgccagggacaaaccctaccaggcacagttgggattggcagtaaggcaaggaaagcctgccccagatttcagagccagcgctggggaatctccctgtcctctccgccaccccctcccgcgcccgagacctgagacaccttctctctcacacccaccctctccaggccctctcgcgctgaacagcatcggtctctatggcgacctgaaaccgcagctcccattggcctgttcaatatgagggccgggccaatggggagggccagccctctccttcccgccaatggggtggcgggagctggcccggggacggcggcgtgctgacgttcccgggagcccggggctggccgggcgggagggctggcagcggggcgggcggcggcggcggcctctgggcagtagagggggctccggggctgagtccgcgtcgacgccggccgcggaggcggcaccatgggcaaggggtagaggggcaagttggccaccgccgccgccgggggtggtgggagagccgctccgggggcgggggccggtgggggagggaggggcgggc

SEQ ID NO: 24726 - DNA, 2300 bp, Homo sapien
caactgagttcacattttactacaaatgtggagaggtttttttttttccaatcaaggcaccatattaacatttcttaggttacatctttgtaatcttcaattatagtaagataaaaaccagtagcaaagcatatcacccaacttaaaattcagaacaatacttagacatatgcagcttgcacacacattaacctgtttctcccaacaaaatatttgtaatttccaaaatcctatcagctttttcacacaatatggtccctccaatttgaggggtagtaacatagtctccttactaaagagattagtctaaaaaaagtaaaatcgccaaaagaatgtaagaatatcagtggctataggctagagcaatatcatcttttaaagcctaatatgttcatgaaatctcactttaagaaggtgatatctaaacataaaatttattgacaaaaaacaattagtattgataaaccaccacaaaatgattttaaatgaaagtagaagacattattaaagctcaagatttttgcgtgtactgatttcatgcctcaggttatttccatatcaaatttaaagagatactggaaaatagaaaacaaaatccatcaactgtaatccatttcccttactcttttgtgaaatcatcacaaggtgtgaaggattgtttctgtttcctctatctttaacaagcctgtaacctctcaagtgaaagaacatgcacctgtcaagctcatagtgcgggatgtacacacagatgtgtttaataaatatctgcccacagggagattagaggtttgctttgagaatcagggaacaggctagctcatgtgttgacgctttggcatctatcatacaatccgccacctcgttcccttaccaaaatatcctcaaaggaaatcctctttgagtctttcagaagagttatgagtttgaggacccaaaacgttgaggaaagatccaccccagggaagggggagtggctgcagagaacaaacataagtaggatttaggtggctcagtgacgtcaggaggaagcagcgatggaagggatggggtgcaaactcacctggagaagcagaagctgcacacatgtcaaaggtcaaagggcatagcctcagggactccccaaacgcaggaaaagtgaaacgcccactcctgggctctcgccgtcaggggtacatctaagggctcagctgttcctacctttgacgccagggacaaaccctaccaggcacagttgggattggcagtaaggcaaggaaagcctgccccagatttcagagccagcgctggggaatctccctgtcctctccgccaccccctcccgcgcccgagacctgagacaccttctctctcacacccaccctctccaggccctctcgcgctgaacagcatcggtctctatggcgacctgaaaccgcagctcccattggcctgttcaatatgagggccgggccaatggggagggccagccctctccttcccgccaatggggtggcgggagctggcccggggacggcggcgtgctgacgttcccgggagcccggggctggccgggcgggagggctggcagcggggcgggcggcggcggcggcctctgggcagtagagggggctccggggctgagtccgcgtcgacgccggccgcggaggcggcaccatgggcaaggggtagaggggcaagttggccaccgccgccgccgggggtggtgggagagccgctccgggggcgggggccggtgggggagggaggggcgggcagccgcgccgccgcggcacttttttaattttttcgggtgccgcagcggcgacccctcggcgccgatgtccctgatccctggagcgacgacggccgctgcctaagctggaaagtaagtgtgtgggctcgcgggagggcgcggagactcctgcccacgagaccctcggccctcgccccgaacacgcgccagggccaggacctgcgcgccgggggccgggggcctccctcccgctgccgcgtccccagcgcctcgcggccgccgcggctttcctgccccgcctcgtgttcctgcccgcactcgcctgctgctcccctccccccggcaggcgcacaagtttcaccctccatttgcttttcccggcgattcctctccccggtctcccgtacgcgcagcgcacgacctctgcccacgctgggctgttcggattcagagctcccagccccgaacttgagcgccgcgctgagccctgctggacgccctcgcggcggcttccccgctgcctgccgccgcgcgccccaagtcgccctcgacaccactgggcgcccgc

SEQ ID NO: 24727 - DNA, 2300 bp, Homo sapien
cagttctatctgtcccatcgctgaccgaacagtgcttctctgtttctattcattatgtattatacgaggtctaaacacagcccagtatgacgagggaaaaaaattacacttcttaggataccaaagtgatgcattcaagatctctctcgcagtacatgcccgtgagcactaacaggcattttttgatagagctaaaatatgttggctgcaagctcattactctaacaaccttcaggccccctgtttctgctggttttcagaaaaccctagtgaaaaccaggcactatccaaaccttgcacaccaaacttgccaacagccctgtgcaatgatcaataaccttggctacacagtcatcggccccaaattcacggtcctgaagaccaatgcagcaaaaacccagacgaaaggctagctggagccccaaagaattaccgcgcttcccctctgccgcatggagggaagctatgggaggagaggagtggaatgaggctcaccagctccgaagatgctccggtgacctctggctgcgcggcgagagctggggagggaaggcgctagggcagccgcggcgggctgtgtggactctgcccctggtgcattcctcgcattcctgcacaatctgtcgccagcccaggagccggcagcgcgcgtcccccgctgtacacacacacctgactaccgctgcgccccgagcggccacggccgccgcggcacctccactgcccgcgctcgcggtgtgtcgcactcagccaacacgcagccaaatcccggccccgccgctcgctctccgggtagcggtccaggggagagggccggcagcctcggcagcgggcggggataccagatccgccagggaggtgccgcagctccgcttcaactcctggcagggagaggaggaagcggcggcgcaggagggcagcggcgaggctcggcgctggggagccgggaggggtggagcgtgaggatccgcggccggtagagaggggcgcactaggcagaggggtgggcaggaccggcaaggagtacaggacttcggggacaaacgcaagaccgcgcgggcagcaggggcgtgggaagacggggaggggaccaaggtgcaggatctggggctagaaggacagacagccggccccgagtgctgaggagggcgggcgcccagtggtgtcgagggcgacttggggcgcgcggcggcaggcagcggggaagccgccgcgagggcgtccagcagggctcagcgcggcgctcaagttcggggctgggagctctgaatccgaacagcccagcgtgggcagaggtcgtgcgctgcgcgtacgggagaccggggagaggaatcgccgggaaaagcaaatggagggtgaaacttgtgcgcctgccggggggaggggagcagcaggcgagtgcgggcaggaacacgaggcggggcaggaaagccgcggcggccgcgaggcgctggggacgcggcagcgggagggaggcccccggcccccggcgcgcaggtcctggccctggcgcgtgttcggggcgagggccgagggtctcgtgggcaggagtctccgcgccctcccgcgagcccacacacttactttccagcttaggcagcggccgtcgtcgctccagggatcagggacatcggcgccgaggggtcgccgctgcggcacccgaaaaaattaaaaaagtgccgcggcggcgcggctgcccgcccctccctcccccaccggcccccgcccccggagcggctctcccaccacccccggcggcggcggtggccaacttgcccctctaccccttgcccatggtgccgcctccgcggccggcgtcgacgcggactcagccccggagccccctctactgcccagaggccgccgccgccgcccgccccgctgccagccctcccgcccggccagccccgggctcccgggaacgtcagcacgccgccgtccccgggccagctcccgccaccccattggcgggaaggagagggctggccctccccattggcccggccctcatattgaacaggccaatgggagctgcggtttcaggtcgccatagagaccgatgctgttcagcgcgagagggcctggagagggtgggtgtgagagagaaggtgtctcaggtctcgggcgcgggagggggtggcggagaggacagggagattccccagcgctggctctgaaatctggggcaggctttccttgccttactgccaatcccaactgtgcctggtagggtttgtccctggcgtcaaaggtaggaacagctgagcccttagatgtacccctgacggcgagagcccagg

SEQ ID NO: 24728 - DNA, 2300 bp, Homo sapien
ctgggttcattggtcctgggaagcagggtcagcaagataaatactgtgaaattaagtatgatatcctcacagtgatgtaatacaattaccataatataattctatgtctttttaacagtaaggctccttctatattaataaataattacttccccagtgacatttctgtttctccttttctcaaattatctttgttcactgaatttttccttctttttcttcttacacattggttgtttcatattatactcttgacatttaaaatttttggttcttggcattatttgtttcactgttgcatagtaacatttttgttctttgcaaccatctgcttattttaaggtgtgtaatttttcaatggctggaatacttttatatctttacttgccttaaatgctaatctaggatctttgtgtagcatttttttcctttatagaccttagatcttctctttaatgagcacttgatacagaaagaagaaattttatttagttgataatattttgttttacatctcaataagcattccacatacactaaaaaatatagattgccataaaattattacattgtataaagaactagccatttttatcagtgaggaagtgaggctcagcaaggtagaaactccccccagggcacttaggttttcatcctactcatctcatgtctcaggatccttctattcatacttgagaagatcctgcctgcagttcaaagtctatctaggccttatgtgccatgaaaatgagagattgagaattcacttgctagatagagcaggcaagagaactcatgaggctggggaaatgcacagataaactaatcagacccactatccatttatgcctattaatatggcaagaataaaacaaccaccagcagaaacctgaaacttagaccctctccactaacatttaagccaggagagtagggaagaagatgggatctcagagggtgtgtacatctccccttttacttacggattattattttggaaacagaagactgatactgaaatttgagggaatggggtaacaagtcccagatcaagctatagaattgaagactgtggaagttaattgattataaatgaataataatagtagagtagtttgcaagagaaaactgaagaatgttgagaaaaatatttatagtctcagatgtccctatttgaatatacagagtgacacatctaaacagatagggtctctcgggcatcttaagccttggcgggatttgcctaatgactggaatgagactgaaaatatatcatccttcattcatgtattcatttatttagcaaacattaattgaataccatttaatgtgccaggcactaggctagtttcatggtatgataaagactgtactcactagaagacagagagactgatgtgtaaatgagttattaaaattttaataacattttacactaatcatcgtttccccctattttccaaaactgtaggaagtccatatcaggtcagtaagtcttttgacaaacacactgctctcactatgtgttgtcttaggaaaggcattccatctgctgccaagaacctattctatcataagctatgggcctaaaaaatagattttcttttcaacaccacattcctagttattgttatctttgaataatcagattcttctaaagaaaccaagctagctataggactccaccaagggtgaccttgttgctagttattaatatgttatatttcttttaaataagcagacttttatttttaagccttctttaggttttaaactctttttttcttttctgttgcaaaaacctcttctgcaattggtaaaacattcttctcatgtcagttaacatttgtagatgtctttttgtgtgcatattactttgaaaacagacccctatagcaatctagaatgtttattatttagtttcttgataagttagtcatatttacttattggttacctgtttagaaaatttagcaatttcacaagtttttgatcatggtgtgtagactgtagtctactgtagttgctaggaaccatctgtaaagccttggttcctgcaagggagcccagaagaaagtgttaaccctttgcctgcttgattgcaggaggaatgccagctcctgagcaggcctcattggtggaggaggggcaaccacagacccgccaggaagctgcctccactggcccaggcatggaacccgagaccacagccaccactattctagcatccgtgaaggagcaggtacatcctcgtattgaaagttgcagtgaattatttctttaatgcctttaaaaaatta

SEQ ID NO: 24729 - DNA, 2300 bp, Homo sapien
agaattgtgtatggaggttgtttccatgtcaggatcttgaccttgagacctaatgcaggaagcacagcaagaaggcaatagagagagaaaacaagtgtcctctttgctggagtcagagtctcagtgtcagcacctgcatcacaacctggcatgagtgtactttcttggcagagccaaagtcacccgttctgcttttgagggaaggaattatgagaaattccaacttctgccttcaagcaggaactttcccagccatttccttgaaaggttgtttacaaggtcacaggcagccacaaacatgataaaaattcattcctgtacaatggaatttgtttctatgaatggaattttttttctatgttcttatttgcaatgtatcttcataccatactgtacctgatatggtaacttttgcccatcccaaaatgaggacagtactccagccctcaatccctagtagccactgaactcagaggacgaaggtattgtgatggcttggggaatattttgggattcctgagtagtcttttcctggcccagcttgatacaaccaggcagtcttgtgggaaaagatgcatataatgacaagtgagtaaatgaagtgaacaaatagaagtctataacaaaaaaaacaaaatgatgctgtttaagagcaaagaaagagtaagtgtgaggtaagcataatagtattttcaaattggttatcttagcctggtactgaatgctgaacaatttatgtctatctagtcttttgttactgaacatttattaagagcctaggaattgttaggcagaggcaggcattgtcccacttaccgattatgatcatattgtacagcattattgagccagctattattcatctaggccctgtccaatactgccacaccagttgggatcattaggaaaggattctcagtatcagaagatggtaaggagtttagggactgtttcttaaaaattattccaagaatagcttgtggaatttgcagagccagtactgtcaagcaattacatgtttgcctgatttcacagggagttcatatacttttcaattaaaatttttaatggcaaacgaatgtatacatataatcataaataatattttaggttgttttatttctgaatagtttctagatttaatactcatatgtctggtattttgaactagcagtcatcaaattaaactacttacagttcagcatttgctttgaatagacttgtgaggagacagtatggcacaggggagcttgagatgctatttgtagcttaaaacctttggaatgtacttgatctttagatattttataacatgacatgttttctacttactaaaatcccatcaagctaacaatgagagaaatacaaataaagttaaaacattctctcctttcatagaacttgtttgccttcactttgcagcatagattcaagaatataatttctgtagactatcttccagcttttgaatatattttaaattctatgttatggcttagtctttttcacttcttgtgttccttctctcctttgcacagtggcacatgattgcttttggacatagcaaatttttgttggttatattatagataaatacggcaagactttttctgtggcattggaatcattttttttcttaattaaaagactatatcaaacatggtaaagtgattctgatcacggggatttatatttttttaaactatgctgacatatagtataagaaatataaaaactagccattgtttgctgtgtctctgatgtagatacattaagtaaggtctctggaagccttaactttagtaaggcactgtagcagaagtactgtttgaagacctcagaaccaaaatcagaaaaggcaaataaagatctacatggtttttatgccaaataaaggctgatattctattgcctttagatttgaaaaagctaggaatcaataggtcatttatttcatccaaaaattgcatttcacaaagccacaccatagctttatgttatgggtacgttcctatgtttcctgtgacatacattaattcatatatctgcctgagcagcataccttggcgccttatatgccttttattttcttgaatcacaggagcttcagtttcagcgactcacccgagaactggaagtggaaaggcagattgttgccagtcagctagaaagatgtaggcttggagcagaatcaccaagcatcgccagcaccaggtacagggccaatggctccatctttatgcacactcaagttacatgccttactaggttgttctctatgcagcaaaagattctgttag

SEQ ID NO: 24730 - DNA, 2300 bp, Homo sapien
gggggaagggacaggaatgcttggaagggtgagcagctcagagttttgacaatgtccagtttgagaagtctaattagctgtctatgtgccagtgtcaagaaagcattggagaaaagaatccgcaattctagagagcagtcagggctaaaggcagatgtgtgccaacctatggccctgtgtccataggttgtattaaagacaaggagcagaaggcaccttggagagtgcaaagatgaagacaagacaggacctggggcactcctggaggtgcccatgggcagatgagtctgagaagtagcaaggtgagagagaagccaggtggggtcccagaagctgtggagaaaaggaaagtgctgcggagaggcagggcagatgagagccgccattccaccgccccctcatctagtcacagttttgcaaattctcaatttgcataattttacagttagcctagaaccattgttaatgggacataaaatagatccttatttggtatcaatttatgaaggcaaattgatataaaaaaatttagacacaaaaccgttttctgggtgttttataattgaaaagatcagaaaagttttagcataagcaaatatctatatttaacttgaaatgtttataatacaagaaattatatgtttcctctgttcatccaaaaaacatttaatgaccacctacttactgcacgcaaaatattataataggcccaggggactgcaagaagcttctggcctaacaagggaggtgaagcatgtctagtagtagccaccaccatgactgacagcaggccaccttctgggaaggaggcacttttctaattgctttctatgtagcaactcgtttcttcttcacagcaaccctgtgaggtagttactgttattttcccccttttacatatgaagaacctcaggagaataggcccctaaagaattatatgagggaattagaaagtgacacgtcatgagagagatacagtccaaatgtgcaggttcccttccatgtgtggataatggggagcgggccatcattgtgagcttcaggatgttaccatgcaagcccccagtgcctcctccgacctctaagtggctgccacctgttgttcgctctctcagatccttaaggttaagtccacgtggctgatgagtgcatggttcatctcagcagctcctcctgtctccacccctttaggaacctcagctccgcgggggaagaagctcggaagcaaatgcggtcctgcgaggggctggtagactcactgttgtatgtgatccacacgtgtgtgaacacatccgattacgacagcaaggtcagtgccggcctggttgcaggagggcgtggtggcaggtgaccatgatgcctggtgccactatttgcatgccattggttctttctgacctgcggatcctgtcctcctcaggaggccactctccagatcaaagggcaagtctccaaagttacaggggcaaggacgtggcaacttaagaaaatatcctgagaaccgtgagaacagagtggcttggtgtggtaaaggctttctctctggttcccctaggctcattctcagggtggtgcccatgctgctatttcctccaattctgtatccgcactagaatcagagccatcagtatttgagtatctactgactaaaagttcctggttgaggcactgtaatccccccaaactctctgccctcctggctgcagtgcagtccacagtccccacccccagcactaactgttgttgcacctctctacaccccctcctgctgctgctgcctgtggttggtctgtccccagcatgagccccttaccctctccctcctgtgcccgagtacagggcattctgctcatcatttgtcagctgtgacgaccatccaggatcctcctgggggccgaggaaagtggaaagaacaggaaagagggactgaaagtgtcaggacttccaaagcgggccagttacttggtgtcaggatggactggactaggagaggccattggaaggtgttggattgtaagggtgagcctgagagaaaaaaggatgaagagtgcctgggagaagagagaggaatgcaagggaacagccagtttttgagccttattgaaccaggagatctgcagatgaaattgagaggagtaagcaagttggaaagggaagcttgctagatagacaaatgctgaacttggttttagacactcaaacactcagttaaatgacagttggcctcccaatcagaggtgtgatgcagtcttttagggaacaaaagaccatgtacagaaggcaaatgtcagcagggaaag

SEQ ID NO: 24731 - DNA, 2300 bp, Homo sapien
caaggcgccaaaggcacaacattttaggaggcctttactctcaggtttgtacaaggtagggttggcacatgcacaaaccaaacagtgaggacctctgtacgctccgcaccccaggcagcttgcttgcctctgcggcattgccacatcctaggcaggatgcgggctaaagaagacatcagggacccccataaacctgagcttcgttcccaggatgtgctgctcactggccatgcaacctggggtatcctatataaccccgttcaggctccgtaattctatctagattggaaatgaaaggcaactcctcatctctgaaggggagctgttgatgcctgctgtcctaactgggtttgctgtaaagaggaaatgagagagctccatgccaagtcccacagctggtgacaggtcaggggagaaggaggggaaatgggacaagatcttatgtggattcatgtgaatctatagtaaacttaaaatacacctgccatgagagaaggagagagaaacaagggcgatgatgtttaccataaagaattgctgtaaggattaaacgtgatgacttacaatggaagcccttcacacagtgcctgacagaattgctattttgaattgttgcccagattaacctgctcttaacacaccattcctttaagccaaatcatccccctacggagaggaaaggaagttcctcctcaccctgttcatggtccagctcatgcctgattcttgtagatgtgccatatctctcagttcccacacttcctttacagaaatccttcaggtccctaaagagagatattctttaaagttatttttcttacgtctgtattgtttggatttcttataagaagcatgtataatttgggcatttttaatgctaaaaaataaatggttgacacgtatatcctgtggcctgtcatatttcacaacgcaaagacacaggtagacaggagtccttgagctggtactgtgaagtgctaagacctttggcaagaggaatgtgtgttccaagtcttggcttcctctcagtgcatttctgtgttttctgtgaataaccctttttaacttccactggccttctgcctctccagtgatgagctttttttttttttttttaacctggctggagcactcttgaactgttccatcagtctgtttttttgtttccctattcccgtcttcctgtgagatctgcctcactcttggattcagtatttggctctaatttacccagtacttcagttcctaggaaccttccccttctctgacctcttccctcttttttcacattcatcatcagcactagcaaaggactttcttttcagagccatttttcacaaagaagcaaagttttatcacttcataaaagttactacatactcaactgagtgggacccaccctgctgtctggagctgcaagttctgaggggaccgccaggctcactcattcataggcagagtgagctgcctcggcctaacccccaggagtgcaatttaaagttatgccttagcaaaatgacaaattacatgtcatgggccttttggtcattcatgagtattcaaaatcaccagagctaacttatcatctgctctgaaaaccacatttatcttgtggccttacagtgtcagcactgtttttccactcttcatagcagtgtttgtcgtgagcaagccagagccttccctctgacgtgctgtacatcacacagcatgtagctgagacctgtcttcttctgcttaccactgtaaataaacaggcctttataaaaagcgattgcacatccactcaattattagcataggggagaactaagaagatgtttacttgcactttagttcatttcttttgtttgtagtgcacttacagtttgtcagttggtaatcgaagttgaaaaagctagaggtaatctctttttggagaggaataagaaaaattcagtatctataaagaaatacctcaataactgtgaaactccccttgccttgtcttagcaagaatttcattattattgcattattcctgggagataacatacctataattttaataccagaacttttacttgtgtcatcttttaaagaaactaacatgttgccaccgttgtcagatgagttgctgtacacctcagctctatacacaaaaatgtgtaactgtacccagttcatacattaagatccagaaagatctaacgaaaagtattgtttggcagcctgacttggtccagattcaaaggtaagttttaaaaagctctaagaggaaattgaggtatttgtgatgcataggaattccattgagaata

SEQ ID NO: 24732 - DNA, 2300 bp, Homo sapien
gatgttttcgttagtgttgctagatgctggagacattatgtcgagcaaaacagatgtggccctggtgttccagtttggagaagacacagccaagaaaagaggccagtgcaattcaatgtgatgtgtgctgcaatagggcagatacagcgtattaggggagcacaaagagaggcatctgatccagctctggggagtcaggaaagacttctccaggaaagcggggatccatctgagacctgcaaaatgagcaggcattcaccagaagaaacgagaagcgtgtttaaggtagaacaaagagggaagcagtcaatgtttctgaagcatcatggaccaggtgtgtggtggagtcatgggagaaggatagagtgggcattatttaagcagatgctggctcatatcggctttgaaaaccttaggaaggagtgtagactttatctcaaaggtaataactttgtgatatcacccagatgttgtgggggagtggtctagagggaagcaaggctggggataaagaggctagttaggaggctgtgacaatggaggcaaaatgtaatggggccctggatggaagttgcaaatgtggatggagagatgaataaggattcaaaaaatatttaagaggcacaatagacatgctttgatagttggttagaaatgcagtgtaatgtgtccaaggaatctaggatgacctcagacacatttgacttgagcagttgggcagccagatggtagagccatttggaaagacagtgactccagaaggaacaggtttagcacttgtgaactgaattggccattaggttaaaaggaggcttcagaattcacagaaggtcaagttgaaaggcccaagaaaaactgacttattaaagttacagaggtcaggtcagaggaggaaaagacaggaggttgagaagttcaatcgaaaaggcgttcagatgagaaaaggaggctacaaaaccatatgtacaataaaatacacatgcacatgatagaaacaaggaaaagatgctagagaaatccatatgaacacattagcaggaattattgcctcatagtaagatcactggtgatttgtaattccttctctttgcttagctgtatttgcaaaactaaaggttgcacaataaatgtgtgttctttttgtaataaaaacaaaaggtgtttttgaaaagtggttatgcaggtgagggaagaatacggaagagcttttcttttttttttttttttcaggcatagtctcgctcttttgcccaggctggggtgcagtggcaccatctcggctcactgcaacctctacctcctgggttcaagtgattctcctgcctcagcctccagagtagctgggattagaggcaggcaccaccatgcagggttaatttttgtatttttggtagagatggggttgccatgttggtcaggctggtcactggtcttgaactcctgacctcaggtggtctgcccactcagcctcccaaagtgctgggactacaggcatgagccaccccacctggtctaatactgaagggcttttaacttaaagtgaaaaacttaattggaaaggtttataaaagtaaagctcgtggacaactaacctgatgtactgtctcacaaacttggttgcatattgaaatcacctgcacagtttcaaaaatactgttcctggatcccacgtccacagcttctgatttaattgacaggaggtgtggtccgagcctggagatttttgtaatgctccccaggtgattccaatgttggcaaagatggaaaaccactaatgcagttaatgagaaggaagagggataactttttagactagcattctgagttatttaaaggagtgagaatcttgggggagaaggttctcagtgaggccataaagcggggtcaaaggttggcagtgagatggcaccccagggtcaggcatgaggtccatcccacaatatgctcttaaatgacaacctagtgaagtgagctgagctcaaccttagaaggacgctccaagaaactctgcaaaaaatggggacattttgcgcataaggaaatctgaggtcctgccagctttgccgtggtcaagagcacgtagcagctggttccatatttaaaggcaagcggctctcacatcctaaggtattacccagcaaaaggcagcctcaggaggcagcccactgaagaccttcaagtccacgaagacaatgtatggattgttcactaaaactgaggaatgattttcaaataatctgtcgccagagggccaatccaggcttcaggctccagtgtgtatggaggagctgccactgcag

SEQ ID NO: 24733 - DNA, 2300 bp, Homo sapien
tgaaccccagctcctagtccagggccctgcaggaaaggccactcacaaaataactgctagatgatatgaatgtttcctctttgctcccaaaaatgtgccaacctttgtcgcaacactttaccatacttttccctcaaaaaaaacttttattagtttttatttatttaaaaagtaatacagaatactgaaagaagatttaaaaatccacatgtaatactcccacctacagaatgccactcttaacattttggagtatttacattcatttatttacaaacagattttttgtcatttgttgaggcatattttgcatatggtaaaattcacccttttaaggtgatgtgtgtatgacgtatgatgaatgtaacaaccactacaatcaagatacaaattatttccatcaccctcaaaaagtcacctcctcacctttgtaattaagccactctccccaaccgctctccagcaatcactgatccaatttctgttcctagggtttcaactgttcaagaatgtcatgtacatggaattatataggaagtagctttttttagtctgggttcttccatttaacgtgttgcttttgagattcatccatgtttccctttttattgctgagttatattctatgatatagatacaccacaatctgtttacccattctacagttgaacttcggagttgtttctaacttttggcaatcctgatagagctgttataaacatttgcacatagggttttgtgtgtacatatgttttcatcactcttgggagaattcctagcaattggattgttagtcatatatagtaagtgtatgttgaattttataagaaactgtcaaactgacttccagaacacctttgcttttttgcgtttcccccagcaatgtatgagagtttcagttgctctgcgtcttcaccagcattttgtattttccttttttttcttgtcttgagccatcctaatacatatgtagtggtattttattgtggctttaatttgcatttccctaatgactaatgatgtcgagcatctttttgtgtgattatgtgttgtcaatatccttactttgtaatgttttatttgaatcttttgcccatttttaattgggttgtctgctttcttattattgagttgtaagaattctttatacattctaaatgtcggtacttcatcagaaatgcattttacagatattttctcccagtttgtagcttgtttttattttcttaacagggtttttcgaagagcagacaactgctcttcaagttgttttttaactgtactgaagaacaaagaaatttttataaatatctgccacatgctaaacttttattggcgctggaattacaataatggctaagcttaaagttgtatttttcctttttagcaaaattggcattgattggtttcttgtctactttttcactatcttatcgttaatatttctacatcattaaatattatttgaaaacatgattgtaaggtatactctcacagtgatttcttgattcatcttaactatccctctgtatttggagatgtttatcttgattcccatcaatattttaaaaagaaaagaagcatatgattcccatccttgcgcagaaatctctgtatacatttccaattattttcttagtataaatgcttataattgcaaaaactgggacagaggcacaggactttgctctatacctgtctctttagaaagactacagatgtcctgaagcaaagagcttgtcttggcccccttgtcatgccagaatatgacaaaagcctgttacattgcaggtgcactatacacacttgagggatcaacggttggagagaaaaagaattccactgaactccatcctctccctttcctcctgtggaaaaaaaagaaagaaaagaatatcctgtctcctgcagacatctaccttgccttcccagatgaagggaagaagaaagtcttcttctaagagaaaacttgccaaggagatgcaggtttcccagagagctggatgacaagccctgttgctgctcagcaatgcccttaaggggccctgccccctgcctttataaagccggtgcggtggtggggcagccacagctggcattcagcctccagagcaccagcactggcactggcactggcacacgctatggcaaatgaagtgcaagacctgctctcccctcggaaagggggacatcctcctgcaggtaggctgccacctgccctcagtcctgcaggctgttgctgctcccctcttccaccaatgccttccatggagcaccccgacagacggaagcttctctgt

SEQ ID NO: 24734 - DNA, 2300 bp, Homo sapien
aacactacaggaagaaggggagacagggcctttctgtgtgcacatttcagattgctagctgtatgcctgtttagaatgttaaatactcctaactaggcagtgatgaagttacttctttagtgactgtgacttctgaaactataaagacaaaactttttcaactaaaaataatttaaagatgatgtcagtaatgaacatatttatgtgattttctacttgctacttaaggagctttgagagtagagggaaaaaaattgcactgccttcaaagccctatttaactaagcaatttcatcaaaaatttggaaatacagctgagaagagccaaaaccagaaaaatgtggtacaaatgataaatttcatccattatacctttctcccattataaagaagtctggagcaggaaatcttaccagtctattttcttaggattgtttctcttatattttaatatttcagattagttagactgcttggagtttttgtcttttgtttgcatcattcttttatcattaaggttgctgtctggcttttttgtctgttgaaagatttcgtttcaagataaattaaataaaacattaccatatttttcagcaatgaaacatttcagatggagaaagaagtcaatagttttctggtttaagtttgtatttttattttcaatattctatcctgccttgtttcgggaatacttcaaggccgctgatgtgtttactgctcaaatatcaacacagcagtaatcaggcctttgaaactatgggtgaaaaatccagtccatttcagtctttttaatttatgaaaagagattgtgtggcattttgcttcctgtcccttttcataagaactttaaatatggacacccctcctgctggtgtctttatatagggaagctctgcgtgaggttgaagtttttatgaggaaacttgtttaaaacacaatcgtattttaaggcgggtttgccacagcaaggttaggggttaccaataaatcggtttacagcaacttctctattctctgctccagacacaccaatggggtgacccgtgcacaattcccgctggccacacaaggcagcggcagttctagttgatccttccttcgtcaactagatcaacgaaggctgtcttagagagcttcgggtattaagtgagcagagtcccttaggccaatttggctgcctgggattcctgggaggatcttggagaacccaggacacccgaatccctagtccctatcctggtttttgctctgctggagaataacaaaacattttgggaactcaggagtttaatttactgccaccaaccgacaaaataatagcatctttgtgtgttctctcccctccgtccctcccacctccttccgacagaagcacgacgctggccctctgtgaatgtagcgcagacagcacgggccagcccggagcggtcgcaggaggctccagacccgcggccccagggacgcccgggaaatcaccggccccagaacgtcccccattccttttgggaaataaaaagacgcagccggtgagatgccttcttagaccttccagctcatttagctgattctggccccagaaagtgtgtttgtgtttgtgtgtagttaagtgaggcagagaaaatccaagaaagccgcacaagccaccccaaagcgtccacggaaactccagctcggttaattgctcccatatgtcctcctcggctgtggtaaaaaagcagcgaggagggaaggccgggtcgctttattgattttgaagaggctgtaaaaaagactatggcccatctcattttggtcccagaggggcctaggcgcagccccgggggacccggtgcccagagggatggtagggtgcttcaggcccggacctggcgccgagaggcgggacaaggggacctcgcgcccaagccccgcggaaagttcgcgctccgcgctccagccggtccctggatccgccgcagcccggggcggggaggggcgcgggaggcgcggccggggcgggcgcgcgagaggaaggtgccttcgggaacacgcgcaagggcggggattcgcgctgccaatgaggccccggtgtgggccgagcaaggcggggggacgggccggagcggaggctttgctgtggcagctgctggagcggcggccgcctcgggagccggaggagaggcagccgcggagcgccgagctggcctcgccccgaggcccggccctgggtgtggggaaccgcgctgaggagctggaaactttcccggcaggtaactcccgcagcccggactccgccgcgggcctgcgagcgccccgggcat

SEQ ID NO: 24735 - DNA, 2300 bp, Homo sapien
tgggcccctgggactgtcagggctatggcccagggctaagaagaggggatagttgtagattcctgcctgcatgtcttctactaccccttctcttactgatgtaaaatgtttcctatctttgtggtcttgctaaaagccactttaaggcaaccaaggaacactagaatcaaggaagtgattttggaccaaaatgtaacagaataggcagtattttctttatttttgagacagggtttcaccctgtcgcccaggctagaatgcagtggtgtgatcttggctcactgcaacctttacctcctgggctcaagtgatcctcccacctcagcctcctgagtagcttggacttcaggcgcacatcactgcacccagctaactttgtttatttttatttatttattttttgagatggagtcttgctctgtcgcccaggctagagtgcagtggcgtgatctcagctcactgcagactccacctcctgggttcaagcgattctcctgcctcagcctcctgagtagctgggattacaggcgcccactaccgcgcctggctaatttttgtattttttttagttgagacggggtttcaccatcttggccaggctggtctcgaactcctgacctcatgatccacccgcctcggcctccaatgtgctgggattacaggcatgagccaccgcgcctggcctctttgttattatttttgtatagagaccaggtcttcactgtgttgcccaggcttgtctcaaactcctgggctcaagtgatccttctgtgttggcctaagtgcaagaattacaggtgtgagccaccgtgcctagccttttaattttttttaagcagttttgtttaggtataatacacatccatacagttcacccatttaaagcatacaatagactaattttaaatatattcatagagttgtacaaccatccctacaacctaattttagaacatttggtcactctagaaagaagtcacatatcccttaccattaccccacaggcctgcatagcctgcataacccccagcccctggcaaccatttatactttctgaaagatttggctattctgggcatgacatatgaatggaatcatgtagatcctttgtgactggcttctttcacttagcagaatgttttcaagcttcatccatgttgtagcatgaatcgatacttcattcctttctactgcccaataatccattgtgtgggcaaagaacattttgttgttgtcatttgacgtacctttagctagtacaaatggcgttactgtgagcattcgtgtacaagtttttgtgtgaacatacattcccataggagtagaactgcagggccatgtagtaactctgcacttaaccttttgaacgactgccaaactgttttccaaaacggctgcatcattgtatgtgagggttccatccagtcttacgaagaattccggattttctgataataagcaggggctgtgggaacaggaggtaggagataagcctgttggtctctcctatgtctgacccgcttgctggctgctgtgccccgcacagttactgtgcgtcaccagccagataagatgcctgtgttcttgtggctggtgcgcagactgtgttgctgttacaggccggctgtttgtaatccttgcctcctgactttagagataccaagctaccaaattgtctttgtcccatccttgtcctagttagaggaaaatcaaacccttcatcacaaagcagtccaggtttgaacatgtcaaaatcacccacttgaccagtgaagacagctgtagcgacttcacagcaagagagcagcttttgtttttgttagggtttacattctcaaatctgagcttactcttttcttctttggcaggccagactggacgttccctcgtctgtactgaaattttgtgtgtgtgtgtgtgtgtgtgtgtgtgtgtgtgtgtgtgtgtgtgtgcgcgcgcgcgcgtttaagggaggggaaggcactggctcttcctctaggcatatttgggtcctggtaaggacacacactgtacattccaaggctttgtttgcatctggaaaaaattagccacactcagatctttcccactacaggtcccgtcaggaagcccaagtatgtggaaagccccagagtgcctggagatgcagttataatgccattcagagaagtagccaagccaacagagcctgatgagcatggtaagaatttcagtgatttccttccccctctaccaaagattttatacaatgacacttcatttctgaatgaaacttgagtgtccttgcagtactgctttgc

SEQ ID NO: 24736 - DNA, 2300 bp, Homo sapien
tgggtatggccacttccctcactaagaaagtgcagttgagagaggttcagtacccaaaaggatctggatggtggttagcactgagaacaccctggattcccagacagtggcggaagatgagaagatggttgtagagggcactgatggtttaaagttatgatggcagtcgggagctggtcagtttgtggactgctccttagcatttgtgcccccatatgtggtccacaagggggtgagaagctgaatagaggcagtcagaagtgattcaagaacttccctttacctttctccatgcagtcagcctttcacgctatgtaatactgagggttccatgaatgtgctgctggggggagtattgttctccacttgcctaatggattcccagggcattctctcatctccaaataaagccatcatacagccgtcagatatttaaatctgtgaaatgaaaagtgaagtcttctctccagccctcatcccactggtattgggtaatgtacacccattattgatcagcgatttaatattaactacatgaatgaaaatagacttgctatttagagtggtctgtttgaatttgacttggaggtgcttttgtagtaactagcctaaaaccatctggctgttcagatctcagtatttagtgaacagctatgcaagtagacatgtatttccatttcacagcgtgtccatgtgagttcctaagcaactcatcactcccaagatggctcagtgacacttctcccaggcggtccttctgccagagtgagaagttcagtgagagagggctctgtgcattagggaagggagagattcagacagcttcattggattaaggaattcagactgaaggggaccttttaaggggatgatcactgggatgacattttagaagacagaataatatgaaaagacaggtgggaagcctttggaagaatacagttgcagtgccttaatggatataaacatgaagtaaataaaataacgtctgtccattcatcccaaccccgggtaagggtttagaacttgggtagcagcaaagtccaggttgtgcagttaagagaacagttgatcatgaatttgggtgtcccttttcctttttttttttttttttttttggagacagaatgttgctctgttgccaaggctggagtgcagtggcacaatctcggctcactgcaacctctgcctcccggattcaagtgattcccctgcctcagcctcccgagtagctgggattacaggcatctgccactacgcccagctaatttttgtatttttaatagagatggggtttcaccatgttggccaggctgctctcaaacttctgacctcagatgatccacccgcctcggcctcccaaagtgctgggattacaggcgtgagccaccgcacccggcttaggtgtcccttttcaactcaaccattaaagctggaatcgccactgctccccaacttatctgaaatgggttggatggtaagttgtttttggattaaaaaaaaaaaatgaaacacttgagatcctggagtatctgtttgcagacacagtgtggaggcagcagccactgtgctggggtgttgcggtccccctgctgcacataggacctacataggatcagggtcctcctgccagtcccaagtgagccacaggcatggccctgtttgttgtggaggtgaattctgtggagccaagctcctgcagctgctctctctgcctccacggcagctgccaaatgggagtcatttctggctctctacacagagtgtttcaggttgaaccagaagctagacattctggggcataatcacaatcgggagcagtgtggagattgtttcgaaagggaaggggggtgtggagtggagaaactgcggagatctgccccctcacccacttcttccctttccatctgcgtcctgttccctccctccagcccagctgccacctgagataaagtagctgccctgcctgggcccggggcagaggcggagggagggcggtgccatcctgttctgagggcctcaccccttgggtgtgcctctgtctgctgatctggtttggttcccgccctcctttcccaaacgcccagctaccttgagaatcaaaatgtgctttgaggtaggaagggacctcctgtagagcggctttggcatgaggtcgacccgccctggggtggctccttttccctgtgttggcttggggccactgccccttcatgtttggctcacatggtccagaagcatcagggctcttttaacccagaatagtcaagccttggtttccttacccctgcagttttcca

SEQ ID NO: 24737 - DNA, 2300 bp, Homo sapien
tgcccctgtagaactcctccacagtgtcccttgatgcagtgtgggtgtggggaggggccaagatcttgaccctcctgaccaggagaaggagctgctgtgactctacagccccggtctcacagccactgggtttatcatctgccttttgggatcagcaaaagggtttcctaaagaggtgccgctgctcttgagaacagaaacctagtgaagatggcactttttgatgttgagaatattaggatggcttggagctgctgtaagccagggtaggttttaggttttatgaatgctgtttgtttatattaaatacaaaaataaaaaaataacttgtgctgatttttatgctaatcaagatggctttgtggatgcagttaaaggtctgcaaaccacataagtgaaggaaggaataaatggaacaattatgctaacaaatgacccagtcttggggaatagatgctatgtatcttgttaccagcgaatgggcagagttgtgttcctgtttgagattgcagaaggagctgtgtgaagagggtgaggtgatgctgacggttctgcttccccctaggtggtggcctaccactactgccaggctgacaacacgtacacttgcctggtgcccgagtttgtgcacagcatcgcagctttgctctgccggtcccatcagctggccgcctacagagaccttctgataaaggagccccaactacagagcatgctgagcctccgatcctgtgtgcaggacccggtggcagctttcaagaggggagtgctggagccactcacaaacctgagaaatggtacttcgcagcagctacccacagccccatctcagtagtggtacagcagacacaggtggtccccagaaggcaggtggtcagccgggctggggtagaagtgaggtggagcatggagaggatgtcgaagcctccgtgcccatccactcctctttctcagaaccagccccatgaggtcgctcctacaccacccctatggtatagtgttaaaagaagcaccctgataagaatgaatgtgatgactgagcagttccaaagtagtcagcttgtaagtgtgggctgtttaggtgacttgcaccacagaagactgttgcgtattttgcactcctaagtatctgagggaataagtggattatttggaggaattttccagcatatatatttgtcagggcctctgctcagttgaattgaaaccttaaagtgacttctaaaggtttccattttaattgtttgtccccgacaaggtaatggacatcagtgacctgatgggcccttcagtttcccatcctctctgccctggactcctcaccttttgagcttgtttacttgcccacatggcacctctgctggaaggtgctagagggatagaaaacagatatgtcatcatttcttctctattgcctgggcagaaaatcagcactaataaatagaaaaccagattcaggctcgcagagaagagccctgttggaggagtcggtagcgtggagctctcacgctgtgttggttgtatggcttggccagggcagtttgccctgggctgggggcagcgagggggtcagtttcccttccctggaatccactggggagctctcatggggggacctagtgacctttccggattgggcctctgtatgtgttcattatctttgtgtagcccaccccaatgacagtggtttatgaagagctaactgtgttatatacacgagtgagattctgctaacatgtgtcatgcaatatgtttgttttgtgagaattggttttcttttggctctgtgctccagttttcattataaatttaatagaaaatatgcttctgtgaaaactgtttcttgtgccatatgtaaacctttttagtttctaacactaaactgggcactaaaatacactgggtgttgctgtcttagagaaatgtataatttcttaatttgaaaaaattattttatcctgtagagcagaaaattcctgaagaagaatacattattttgatagatggcttaaatgaagctgagtttcataaacctgattatggagatacgctttcttcatttattaccaaaattatttctaaatttcctgcctggttgaagttgattgtgactgtaagagcaaattttcaggtaacaaagaattctcaaatctttctccaagtccccattccaattttacagtgataaatgttaataacgtaaaactgttgtaaaccattcagctgcttgaattggaaactatgttaagaatttgaaaaactagtccagagagccagacttgggtgaaactctgaccttt

SEQ ID NO: 24738 - DNA, 2300 bp, Homo sapien
ctgaggcacgagaatcacttgaacctgggaggtagaggttgcaatgagccaagatcctgccactgcattccagcctgggcgacagagcaagactccatctcacaaacaaacaaaaaaacccacacacaaattagtgtagataaaaaaggtatccctcaagtttgacaagaaagtggagagacaaacacaactacatattgctgagagtgtaaactgtacaacctctctgaagagcagtatggtaatacttattaaaactgtctacacctttatgcccagtgattccatttccttttttttcttttgtgagacaaagtctcactctatcccccagactggaagtggaatggggagatctctgcccactgcaacctcagcctcctgggttcaagagattctcctgtctcagcctcctgagtagctgggattacaggtgcgtgccaccatgcctggctaatttttttctatttttagtagagatggggtttcaccacgttggccaggctggtcttgaactcctgacctcaggtgatccacccagcttggcctcccaaagtgctgggattacaggcgtgagccaccgcacctggcctccatttcaatttttatcctaagtacatattcataaatatggaaaaagatttatgtacataacgtggtaatatattgaggctaaaagaaaaagatttaggtacaaagatatttaatccagcattatctacactaagatcaaaattgttgaaaccatccagcaacagggaaaatgttaaataatttatggtatgtttatatgtagaccattatgtagaaaaaaaagctaatgaaattttagacatgggaacagctcatgacacaagtttgtttaaaaaggcagtttccaggactttttgtaaaattagtttttctgaaagactgagagaaaatgttatctctgagtgggtgatctctgaggggtgtaattattgactatttattttcctgttatatattctgtgtttcctacagagagctctattatttatacaatcaaaaacttgtttttagaaaaatactgttttggcaatactttggaatggaatttggtgttcaaagtctcaatcatgatgcactccgctaattttaaaaaattaacaagaacttcacaaaatcctaatttttaatcttccctttccccttaatctttttcattgcaaatagtttcccacggtctcaatttcatctttaaatgtgagcattttaggtcattactcttcaaatgtaacttcggtctccacaggctgatatatttttaatgtttcctcatggattaaaaataaaagctctctgtatctttgattttcatctgaacatagtcccacactatgttgtgcatttagttaacaagtggtaatttgctcaggaacttttttttttctggataatttttatctcaaaaagcactggcagggccactttgtagtcaatgacacgtggaaaccagtctaccgtgagccagtgggacgcactgggaaaggctgaagaaaaggcgcccggggttccagtgagctcaggatacccacccaacggcagggctggggcccggggcaggcagcctgcccgggagagacccctaggggaacccgaatgaggaggcgagggcagaagacgccaagtcacggaccgcccagggtggccgaaatagagaaggccaatctgggagaccggcctcggagtacacagtgcagggtggagaactggagaaagaggtaaaaactttcagcagggatggccgaacattccatgcaacgcccctttaaaacgacgtttcaggcgatcactaggccttgcgaccgcagctttagcaaaaacagaaagatttgcgacggaagtccctttccaagcctgaaatcgccttgaccctaggagccagaagctggggaggaactcgcagtccgggcggaagagcgcgcatgcgccgcctcaggggccggtcccgggggcggggcctgttccctccgccctgggtctccacaggctttcgcggggcggggcctactccctccgctctgggtcacagcgggcgttcggggggcggggcctgttccctccgctctgggtccccgcgggcgttcgggggcggggcctgttccctctgctctgggtctccgccggcgcccgccccgccagcctcacctgcgcggcacgtgacccgcaccgcccgtgggcaccttgaaggcggatcccgcgcgcccccgctcctgcaggtgagagcggccgcgcccacgggccggctcagcggcggtggcggcaggtggggaagc

SEQ ID NO: 24739 - DNA, 2300 bp, Homo sapien
tagaaatatttatgtcactttttttccaattaaaatttaaagtacttttttaggctctcattaacaggcaaaatgtttttaattcagattacctatttattgaaattttaaaatgttgatgacaactggtactgcaattaagtcattaaaatgttaatatgtgagcatatttgagaaataacaacagagatagctaattttaatactgaagctaatacttgcctaaatacagggaaacctaaagacctttagttgcattataactgggtttatgtacagggtcatggattctagttatgtggacctagttatttatctgcattcattagccatagatggtaccactttctccaaccatagagcccacagatgcatgctgtttgtttctaagctacaaaaaaagtgtgatttttaaatgtcatcatcattagaagaaattggtgcacatgcccctataagtatgtccatggtaaagtacttttgaaatgtttatattttatttaatttttgctccagttatataatccatgttttgttaatatggatatgtcagttgattgaatatgcaagttgattaaaattaatgtctcttttgcaaagatctaagttcataattgagttcaaccaaaatttattaatggttgcttacttgtatgaagatacttcaagacactatgcttagttccatgggggttacagaaatgcccccagagaatttagcatcccaaaggaagctactggtacaatacaagaggggaaaaaaggtagcagcttattttactttagaagatacgaaatcatggcttttaaaaaattaagctgtttttattttatttgtatttcattttattttcagcctttgccagagttgcctcgtattccaggacttgttctctctggaagtacattttcagactgtctcatggtggtgcagttcttacgaaactttggtaaagttttgggctttgatgtgaatattgatgttccaaacctgagtgttcttcaagagggattgctaaatataggggacagcatgggtgaagtacaagacttgcttgtgaggctcctctcagctgctgtatgtgatccaggtctaataacaggatacaaggtaaaaaaaaacaaaatataaaatgttttaaatttgtactgtcagtgcattggtagatagctttagcatattagcagaagattatatagattgatctaatttttccacataatgtctcacaaagttaactgtagatttgtgtcaggttacacttcatacaaagaaaacctggttataaagcttaaggaatgtagaccattctcaagttattcttttttcctctagctgtaggcaaagaccaaggtgatttaaggaaatccttaagcgatattcatcaacaacagaattcataattcataaggcaactagaacttgtatgtgccttctgatattataccttgttctctctcaatcactgtgaataactgaagctaatcaaggcacctacagaccagcacgttaagaccctgtgctgctcagtggatcctcaataagttcatgtttatcttaattccaaatacagtatacattccagggagctttgctctagataatattgtggagagagaacctcccagatgcacctgtttttcttctatctccctcagtgtttccctatttattatccccagccagtaaaacctataacactttaagggtagaaaacaatactgttttttaacctccccactctgtcattcctgataaaatatccagatgaaacttggggaaaggttggtgtcgcttttatagtcatggaaggcttgataggtaatttaaaacttctgctacccatgaatttgcatactcttctccctgcctgacttggaaccaaggatttgaagcggggaaagaaagaaacaaatacttgaatatttgtctgtcttctattgactatttttgtgtctctttcattaaaaaaaaagtgaataaagctcttgtcagtagtatctaaatcaaataatatgaggatttttaatcttattgtttttatggtataaatggttgtgagtaatactgataaaaatgccaaacttttataggctaaaacagctcttggagaacatttgctgaatgttggtgtgaatcgagacaatgtttccgagattttacagatatttatggaagcccactgtggacaaactgagcttactgaaagtctgaagaccaaagcttttcaggctcacactccagcacagaaagcttcagtcctggctttcctgatcaatgaactggcatgcagcaagag

SEQ ID NO: 24740 - DNA, 2300 bp, Homo sapien
gtttttgtttatagacataaattttatggcttaatagtttataatcttttccaagaaaattgtatttttctaaattgtttactcgggaatattactgtgcaaaggcacactaaagtagatcccacagaatgttgaatgtccatttccaccagcttagtatcttaaatctttgcttcaaagaagttcttgctcaggaagttattcattcagcaacctaaaattgttttttgagtacatatcaagcacagggttctgagcaatgtcttaggaagaccataaaggtgaataaatgagtgtttctaccctgaggaatttatcaaagatgttaagttatctccttagaggtataagtcatataggcatattctatgtatactaaaggtggtatggcataagagtacatatagtcaccaacttagaattgtttgacttggccgggcgcagtggctcacgcctgtaatcccagcactttgggaggccaaggcaggtggatcacgaggtcaagagatcgagactatcctggccaacatggtgcaaccccatctccactaaaaatacaaaaattacctaggcatggtggtgcatgcctgtagtcccagctacttgggaggctgaggcaggagaatcacttgaacccaggaggcagaggttgcagtgagccgagatcgcgccactgcactccagcctggtgacagagcaagactccatctcaaaaaataataataataataataataattctttgacttatgatctttcaacttcacaatggagcgaatgctatacacattcagtagaaattggtacaataatcccttgatgctgagcagcagcagtgagccacagctcctggtcagccgcatgataacaagggcagacaactgatactctacagtttactgtgttgataggttattttgctcaactttaggctaatgtaagtgttttcagtacatttaaggtagtttagactaagctatgatgtttggtaggttaggtgtattgtatctatttttgacttaatgatattttcaactttcgatgagtttatggggaagtcaccccatggcaagctgaggagcatctatataaagaggtaaaagagctcaaaggaaagaggcaaagaatgcttctggctgggaaatttggaaagcttcttggtttggatcttgaagaataaacagtattttgtcagcttgaaatttctaagaggaggctatttcatgcaaagaaaatggttttaagtttggattattgtgaaaatggaagcaacagtaaagaggggaggctagtcaaaaggcatataatttttaatggggaaaaactaaataaattttaataaattagagccaaaatgtagcaaccaactagtcatagctgttgctacttttacagcatttgtatatcatgatttaaatttatatatgatataatagctataatttgttttcagatattgaaagcaaataaaagcaatctttgttttgtggtacattttgttgtgttttttaacttatgtttcaacaggaacaatataaacaggcattcccatcacagttaaagaaacaagagtcatcgaagagcctgaagaaggttattgcagctttgtcaaatccaaaagcaacctctagttcaccagcacatccaaaacaaacattagaaaacaaccacccaaatccattcttgacaaatgcacttttaggtaatcaccaaccaaatggagttattcaaagtgtcattcaagaagctcctctagcacttactaccaaaactaaaatgcagagcaagattaatgaaaacattgctgctgcaagtagcacccctttttcctcacctgtaaatctgagtacaagtgggagaagaacccctggcaatcagacacctgtaatgccctctgcctctcccatcctgcatagtcaagggaaggaaaaagcagttagcaataatgtaaacccagtaaaaacacagcatcactcccatcctgcaaaatctttagtggaacaattcagaggaacagattcagacattcccagtagtaaagattctgaagattcaaatgaggatgaagaggaagatgatgaagaagaagatgaggaagatgatgaagatgatgaatctgatgacagccaatcaggttattttcattttaaaatttaaagtatttctctaaatgctatgtgaaccaaacattttaaagggtttcttaattcagacttaaaatcagcgtcatttactatgtttcacacaactttgtgcatttctataatgagctcataaaatacaggagtaattgatactgg

SEQ ID NO: 24741 - DNA, 2300 bp, Homo sapien
aaattcaggctttcatcattaactttaaggggagaggctttataaatctttaatattttaatgtgaaattacttgtttttgaaatctcctttgagaacttattttttagaacataaaaaggcctactgattttgctatatttatggttatctttaagtatagaagttttcttccataaatgtacttgagatatagtggattacaatagtcttatattattatttagactaactgatttatcagagccagatttatattgtatgtaatttgaggaaagtcttaacataggttgtagatgtaaacttaaattctaagggtttgaaacagatgagaaaagttatgggataagtcatcaaagagtgaaatacttcttttatattccaagttttcactttcattttttaaactatggactacctttgtcctttacaagtttgaactctacaaagctgccaagtgaagatccttagatactgacctaatgagaagagtgataagtgtacaagttctactgtttagaattaggaaaatgatcagaagtatgagtaattcagttttgttccaagatgaaacttgaaatttttttaaataaaacatagaaagccattgtgacgttaactggaaagttaatttatatatttttgtttggttggtttgtttggttttgaggtgcagaatggtggcgaacaactgatgctcatactcgtacaggagcaaccttctttccaccattactgggaattccaccactatttgctcccccagcccagaatcatgattcttcttcattccattcaaggacttcgggaaaaagtaatcgaaatggtcccgaaaaaggtatccacatttacataagtgaagtactataaatcttccattctaatattattttcataatgttcaggtttaatacctttttttgttttttgtttttgtttgtttgtttgttttaatagagacaaggtctcactcttttgcccaggctggagtacagttgtatgatcatagcttactgtagcctcgtcctcctgggctcaagcaatcctcctgcctcagcctcccaaggactacagtcatgtaccactatgcccagctacgtgtttaaattttatttttattttttgtagcaacagggtctctgtgtttccagcagtctcaaacttctggccaccttctggcctcaagcaatactcacacctcagcctccaaaagcgctgggatcacaagcgtaggccaccacacccggccttaataacagttttatagtgttatgctagaccttttcacattttcttgcttaattcttaaaataattctttgagattagaagtattttaattttacagccaaggtcaaataagttgttcaagaaaatactacttacatatggatgtggcctagtcaggattttagcccaattctactgttttttcctctgtatttcattacctccctatatgtaacccaatatagtgtgttacttcttttgtaattaagtattaacttcattaaaattaataacctagtacttttttaaatgatcactaatatttctgcaattaataacttgttagaatataatttgaaaattataacaacattttagatgatttactatctttcttttcactgaagtgttttacaaagttctctaatgtgttttacaattaaaacacaaagttttgcatttcattatctttctaaacattttgtttaattgaggtgaaattcacttaacataatattaaccatcttaaagtgaataatttactggtatttaatgcatttgcagtgttgtacaaccaccacctctatcttgttctgaaacatttttatcactgcaaaaggaaactttgtacccattaagcagttgcctcccattcccctctctctcagccctggaagcgatcagttttcactttgtccctgtaggtttacctgctctgaatatttcatgtagatggaatcatacaacatgaccttttctgtcttctttcacttatcatattttcaagttcatccaactgtacatatatctgtacttcatttttaaatgatgcaataatattccattgtataaacatgtttatttttattttcaaggtgtaaatgggtcaataaatggaagtaatacatcatctgtaattggtatcaacacatctgtactatccactactgcttcaagttccatgggacaaactaaaagtacaagctcaggtggaggaaatcgaaaatgtaatcaggaacaaagcaaaaaccagcctttggatgctagagttgacaaaatcaaagataaggta

SEQ ID NO: 24742 - DNA, 2300 bp, Homo sapien
acaatatttctggtaacctatcactggtcttaaagataatgacatttgggtagcttttttggcagtagcatactctgttttattttgactcatcttcagtgctaatgcagtccactctgataaaacagaagaaccaattcaacaaaaacaatgattagctgatttagaagagacacccaagtttatgccctttccttgtcctcttacctcacagtatccttgtgggccttccttgtaaagatactttgaggatcttccctgtgagatctagttactgctttgttgtagtggagcactatcctgaatcagaactttttccttatatagcctgatacaaaacatacttaatgcaatttatttaaatcttatttttaaaagtcattcagatcttcttgtttcagtaaagaatatagcattattttaataaagaatataggttttatatcagactttagagggtacactgaccgttttttaggactttcccttggttttcagggagcaagaaagcaaagagaagagatttggttgataactaaataataataagtatactatttttaacttacatttgtaaatttcaaacatactatgttaaaactaattaaattgcagtgcacagtcaggactgatataatataaacaagagataataaggaagctttattctaatattaacacagagcacaatactgttcacacagtaaattcttaagataacctagagtattctcttttcacagtagcaagacagggtaccttaattatttcctggaagtaaagggaagatttccaagtattagaaaagttttctgccaaattactacaaagtatgaaaaataagtcatgtttttatcatataacattccaacctggagttataacacttatctttaaaaatagaattaaaatgtcagactcatttgaattgaacattgtcttactcagagaaagctaaaaatgatttttatattggtaaccacttgtgaacacatttagaaatatctttgtaagtttattaagtacttatgttgtcttgtgcattgttttattagactagaatatattccctttttggtatcaagatactcttctcacctaagaagtatagtcatacactgcataatgacattttggtcaatgcctgaccacatatatgacagtagccccctaagattataatgccatatttttactgtacctttcttaggttgagatatgtctagatatacaaatatttaccactgtgttacaactgcctgaagtattcagttcagtaacatcctgaacaggtttgtagcctagtagcaataggctgtatcctatagcctaggtgtgtggtagactgtaccacctaggttgtgtaagtacactgtacaatgtttgcatgatgacagaatcacctaacaatgcatttcttagaatgcatccccatcattaaacaactcatgactgtgttagagaacagagcttcaactctggcatgttgaaactgggatggccttgcttagagtgtataataatttgagtattgacctggtgacagatcctggacttatttcagtggctttcaaccttagattaataggatgttttttatttcccttcttatgagtaaaatatattgaaaatatattaatgtatatatattaacagaaaattggcctcacttcctcaggtcagacaattttaattagtgaaaattatctacttaaaacattggttctcaaatctcaaattcaaaagttaatttatgccatttattttaatgatttttagcatgtcttcatgtttctagaaacattttatagggtttgaagagtagaaaatgcagcaggaaaagggtaaaataaaaatgtaataggtaaattattataaattttaactataaacactgaaatcagataagtctcatctgttttttatagtacaactttaagtgtgtttttttccctcccaggacatttattcagaacagctggggatcaaccgtttaacctgtccacagtgtcgagtgccttcccaatggtcagccacccagtctttggtctacattcagccagctcagggcattcagaatttggtggtttggggacacttggtacacccacagccttagccgcacatccccaactagcatcttttccaggtaaacatctgttacaaacagtgttcaagggaaggaggaaagcttgagaatgttcaagcaataatttgtctattgaacaaaaggaatagtctaatgcctggtatatttaaaactttggtgcaagaattggcttaatcctatttatcatgtg

SEQ ID NO: 24743 - DNA, 2300 bp, Homo sapien
cactacccgcgctttcccatcaccccctgccttgcttttttttttaagcttcccaaatgcttcttgcagtgacttaaaaacgtataccaagttgttatggcatattttctttaaatagatagtaattcttgaagagtttttatttaaactttcttttggatcctttgtagctcttgacataatgctggatgcagtaggaacttgataaatacttgttcactcattcattcagtagctaattagctattgggttccaggtactaaacttgtgctccagtgatcttccttcatggagttaaagctaacagcagcctctggtggtaaaggaaggcctctctaaggaggtggcgtttgttatgagacccgattgaagtgagaaaaccagtcctatgaagatatggagaacaattgctccaggcagagggaagagcaagtgtcaaggccctgaagtggaacaaatttgatatgtttggggattatcaaaagggtgattgtgactggaacatggtagaagcaggaaatgcagtcagggcaccaggtaacagagggcctaagaggtcatgataataagtattgtgggttttattctaagagctgctaaagccattgtacaattttgagtaagggaatgatgtgatctgattaacttgctttaagaacagaggtaggtacttgagaccgggagtttgagaccagcctgggcaacatggtgagaccccgtatctcaaaaaaaaaaaaaaaaaattaattagccaggtgtagtgacacacacctgtagtccccagctactcaggaggctgaggcagggaaaaaaaaaaaaaaagaatagaagtagggaggctataatggtaacataggagagccagtaatcatgaagtagtaaggtaaaattaaggatagagtgacgaagagtagttggtaggacagactaggtgaaaggtctgaggtaaaagagaaaccaggaaaaattcagttctttgtgcttagacaagtcatgtatcatttctaaattctgttttcctggagtctataataaggaatatctctttcctgcccctttgaaggattcgttatgaggacctgataaaataatacatgaaagtccattatgaaccttaaaatgccataaccatgtgttactttttgatactaaacatttaagggctcatctcaaattagaccttgttaataaagaaatttccaggctaggtccggtggctcatgcctgtaatcccagcactttgggaggtcaaagtaggtggatcacttgaggccaggagtttgagaacaggctggccaacatagcgaaacactgtctctacaaaaaatacaaaaagttagctgggtgtggtggtgcacacttgtagtcccatctgcacaggaggctgaggcacaaaaatcgcttgaacccaagaggcagaggttgcagtgagccacgatcgcgccactgcactccagcctgggtgagattgagactctgtctcgaaaaaacaacaaaaaattccaaaaattaagatttcacagggataaacttgaagccatttacagtttaggaaatagttttttcctgttctaaattcttcccagtgatattttcaatcttttgataattttgtcgctattcataaatattagcatgtggtaatgtctccagtattaagtagatgacattttggttctaatctgtactgataatcatagacagaaaagtatttataaataatacctaattgtcttcagtttgtgacgtatttaagacattgtttttctcttctgagtacgtaatttgaagacaaataaaacttgtaacccaaatgtcctacagcttgttttttaatatgttatgttcaccctagggtgttggtgattataaacaaaaacatgatctgccatactataataaataatgatctataaataaactccagtccttttatgcttatttttgtcatactgattatatggaccctgataccgtaggttaatttcaatatgacttacagcatgaagaaagacacaaattttaaacaaactttttagtttctgaaatttcttaagtatgcttcagctgattgctaattcttgttttcctattgcaggtttcccaacagtgatgtcacaagattgaccacattgatcacagtaagaccaaaatgatagttaagcttttaaggaagtttggttttctctgagaatgagaattgacttagaaaacatatataatttgaaattattatttcttttgctagccagttgaatgttaacattttaaatgaatcatatcttatacttctagctag

SEQ ID NO: 24744 - DNA, 2300 bp, Homo sapien
taagtatttcataaatgatgccagcagtattccaataaatgcatttccaagactgaagagtttagaagtattttttcattagtgtttgtaagagtaaatggtactacaattcggcactagtttaacatgtgagaacagtgaagctactattatctggattttaaaatatgtacccattcctgtttctctccaaccattataagaacacaatattaagttctcataaataactttgtatttttaaagcatacaatctgattttctaaaaaaaaaaaaaaaaaagactcttcatcatcgtaggcttaaaataattttaaattcaaccacttgtttcaaatacttgtaaaaattacttttttctatctgaaccatacgagtgtcttaatgttgtccaaattactgattatgcagcagagtgacaataatatgtacagtgtttacaataggtgtgagacatcaaatgtacttaactaccattttcttaaactgcttatcctctgttgcttgccatttataatctgccaaatcttctagtcctttgttgcatgtataatttagaaccatctgttctatgtgcttttaactatttaaacatttttcacctacctacaattcacataaatggcagacactcaactcagtcaagctttctatatagcatattacatgaagcaaattcctggataaatagataacaccaaagaagactgctacagaaataaaaacttaccatatagaacataaatttctgtgtgttacacaaaccttttcaatgtattcagaattgtttctattagctttttttaagttaattgtagtcagtgtttttccctcaacccagaagacaaagagaatgcaaattaaatacagacagtttcatgtccttgttagaagagatgtaaatatgctgactgaaaatgactacaggagacagaattccactttcccattcaatatacagtgcctcttatttatatactagtcagtgtatcattaagcttggtcatgtgaccaaaccaacttttgtgaggcgaaaaactatgttagacaagcaaattaaaacagtgctagtttttgtttatctgttcataatggctgacaaagagtttatagctagcgattataaaataacttttaaaatcaattctgcctcttaaatactcaataattgtttgacttaatatctgctactaaattttaaagtatccattatcttaaggtattttccatagtcatttcttttcaaaatgtaaataaataatagaaaaagaaaaccccagaacattttattagaaacggggagccagataatctaaaataaccatacataaatattaaccaagctaattttcaaaaaatccataagggagagtggagcaaataagaaagggaatatactgactacagataacagttgaaacctttaaattaaaaaaaaaagtacacaaaaaccagataaataacaaatgacgcacaagttttttaccattttttgcatataatcttccacctgttaccaaaacatacaatacgcagacttcgtatactgattttgagagcaaaacacaaaaataagccacacaacttatcagtaacctgtaagttacacaatcctataaaacaggagaaaaattaagcaaaaaatttactcttgggaaaatttctccgtaaagtttacatgacgtcactgggccccctgaacattccctaaactttgagacttatccagacacacttcctaatacttctttcctttcctcaaaaataaaaaagagagagacttgggaataaaattgcccaagatggcgaaacgcttgttgtttagagggcaggaaaaaaaatggaggatattgtaatatacacaaagggataaatttcaacaactcggccaaggactgcagctgcttccctctttataaggaagcaacagacaaaagataaatacagagggagaaagaaaagaagagaaaatctcccaaacaacagagccagctctgactcttcaaacacttccttccccttctcaaatcccaattctggggttcgtgaaactacttaaaggggagggagccgcgaaagagaacgggggctggggggaggggtagcgacaagaagattaaaagagggaagcagaggagttgggagctggcggtcgttcccggggaagaactgctaaaacatgagaccaaggcacagaccttactgtatgagaagcaatgctcctcaaaccttctgcgtgctgacatagaccttcccaggtatccagatcttttcccaatcccacctgccccacccccacc

SEQ ID NO: 24745 - DNA, 2300 bp, Homo sapien
tgaactttgagactttcttgtgttctggagggaaaaaacggtacctcaacgaacttctaaaaaaaaaaatacgtatcttcttggctaataaagtgttatcaagattaaggcttttaaaaaaattgtttttaggaatctataggatggggtgcgggagggaatggggcctattgtatctttagtttaacttgattggttgcaggatttgggaattggggttgggggagtggaagggtaaaaacaaagttggaagagattctgggggtagaccatagcatatgactgcatttgtagtttaaaggagcaaagggctaccagtcttactcataacttgatttttaaaaagtgttcagtgcctacaatttgctatgctttttttctaatctctcagaaacttgaaaaaaagctatcgagattaccttttacagtgtgtgcatataactttaaaacgactattttaacgtcttttatttaaattttattttaacttagtgcataaacattacagccagtttaacttgtccgtggaaaggcagtagaattttaccccgggaccgtcttgcatactgctttttttgagttttaacatccgcaaaatcttggcatattaatttagttgggttgtagaattctgagtttaggaacaaaaaaaatttaggtggagatggttgacctatgctccctactctgtagcttttgtttttttaaaaactaagttttaaatcccgttttctgtcctgtcttctttaaaagcaaaacaaaacattttaagtttcttaactttttcctgggacaaggaacggtgcaaactcaaagctacagtattcttggaaagaagaagcaaccccctcccttggctcctttaggagctgataggtcatttattattggaactgaaatggtataaacaattctctctctttttttcccttgttaacagcaactttcattgttagagagaggagagagagagaagccttgttggttgacgtcacttggttcatgaagccttcgcctagaagtgaagctgctgaacaaaccttgagaagaatcatctcctgcttcaatctgctgctggataggaactaatcagagagagagaggcggaagacggagaaggagggagtcgaaggctttcccgatcacaaatctcacctccactacaactctctttatacttttcttgcagaaataataatagaaataaggaggtggtggggtttccaaaaatcttaaccttcaaccatctggggaaaaggcaaaaatcccatctaccgcaactctcagttcgagagtaaaggtgagtttaaaatcctcgggcgtgaggggtgcgggtgaggatgtaaattcccagtgttacaaagccggtggaaacagcagcggagaaactgcgctcgggcaagcgggggactccggagttgctgcgtggaggcgctcgccccgccgccctctcgccctccgccgctgtttatcctcgccggtcggtgcggctctttgttgtggtggccggaaggctggggtggttctcggggtcccgagtggagtttgggggaggaggacacggagatgtgccgtcctgggtgggaggtggggggtgcggcctcaggagaacgtaaactttattcctagaagccggtgcgggacttcgctggagtagggccgtgggttgtgctcccggccgggcaggcgctgccgccgcgagtccgccgcctttgtgccggccgccctggcttcgcgtctccttcctcttccccttcggcttccagcgctcaggtcgccgccaacagttttgcttcttaaaaaacaacctctgtcagcgttgcgatggccgttcctaccccggaatatccgctgctcccccactccctgccggggtagtttctggatcaccccccacccccgtccgcctcctgctgcccttttttgcctccgccccctcttccctgtcggactgacgagctgcgtctgccacccccactccccggcttgggcctctagctctcccgtgtgtagctggaggctctgagtttactgaagatgagcgggggtgggggtggggcaggtgggattgggaaaagatctggatacctgggaaggtctatgtcagcacgcagaaggtttgaggagcattgcttctcatacagtaaggtctgtgccttggtctcatgttttagcagttcttccccgggaacgaccgccagctcccaactcctctgcttccctcttttaatcttcttgtcgctacccctccccccagcccccgttctctttcgcggctccctcccctttaagtagtttca

SEQ ID NO: 24746 - DNA, 2300 bp, Homo sapien
agggtttcactgtgttagccaggatggtctcgatctcctgacctcgtgatccacccaccttggcctcccaaagtgctgggattacaggcatgagccacggcgcccggctgcaaaatgtctgcagcatagcaaaatctcaataattatttatcactcatgataattacctgaatactaaaatcagagagagtacattaaaaagaaacacaacgaaccattcttaaataataaaaacatattcatcagtggtctttatttactagcaccaataaaaaactagaagctctgtttagcataggaaattggtgtcatactcactttataatatcatcagtgctgggtggggacaaagccataatctgccaaaatctgcaccatccttgccaggtttgggagttctgtagagtagttaccactgccaggtctgactgccatagctcaggaaaagggtgcagtcatttctcttagcataatcttgagaagatgtctaagagacctatgtaatattaagtcacagaaagaaacaatattattggtggtttagacatggaatgtaatagctaacaattacggaatgcttacttgtttcaggaactgacgtgttatctcatctaaacaatgctacagagcatgggtactgttattaaccccgttttacaggaaacctaggtttagcaaggttaaggaattgcttgagataacaaaggtagtaagaggcaggggtggaatttgaagccatatagtctggttcttcagggtgtatacatccgtgtatctataaccacaatgctgcaggggcactcgaacaggctggaaaagaattatttttctttaaagggcaaattaatttcctcaaaagtaatctctgttcactttatcccataccagatgcttattttcatttcatatcctaaaagttagattggcacttacatgccaacttaaaatacctttaagtctttaaaatttatagtattttagaatttatcatagtgaaacatgtacagtctgttagtccccaagacaataaaataaggatgatagtgactgatactccattcccttccgatgtaatgacaaacacgtagaaacactgtgtttcatttattggaattatttggatccaaaggattgcttttaataccttaacaaaataggtcattaaaaaaaatcaagtgcctttcagtattcttccaagtttcaataactgatcttttccattaaaaaacttttgattcattattccaaatcaacatatcatctaaatatttacacatagttagatgtagcttttccctaacctactcccttttatttattagtactcatttacatcttagtttgccacatttacagttctttgaaagtttcatctaatattcaccagaccattcacctcacaattttcctccctctttctaaataggtgaatttgtttactgcaaaatcgatggctacgctattaaaggttactatcacgattttaaaagacatgatcaccatcatttaccaagattcttaccacaaggaaatgatcacaaggttggacaaacaggctccaactcttaagggaaagggcttgcagttagatcacacagggcgggcagggaagcaagcggggaggggtaggtcggaaaaggcagtgcttgattcaattcaacattcactgcgccacttaccaagagccagaaaaagaaaaaaaaaaaaaaaaaaagccaaccagctgggcgttatttcgagcacggggccctgcaggtgggcctgtgggcggggacccggcgcccgggagggaaggggctggctcagagactatagacgggcggggaccgccccggcccgggcctccagcgcccggcgcccgcacactcgccagcccagctgccggcacgccggccagccagccgctgccgcttaccagtggcgcctcgctgactccccgggggcagctcttcaacggttcccgcagtcagagcaccaccccgcggtggggtacctccagcccgcccgcagctctcggtccccgccgcgccgccactctcgcgagaagccaggaagtccgcgaagtggggggaggaggagcagggaggggcacttaacggtggtggctggttctgcgccggatccgggagaggggcgggcgccattgtgcttcgctgccgactgcatttcctcagtcacgggcctagaactccaaggagaaaggcggcggtgcgtgttgctgcgagtgggacgcgcactggtcggtgccggctcaggagccggggtaatgagctgcggagctagttcttctccgtcttggg

SEQ ID NO: 24747 - DNA, 2300 bp, Homo sapien
tgactttgcagtttctttatcaaagtcctagtgagccttcacatcttagttcaggcaataaataaataaatcctgtaaaatttccaagattaagcacccctcccctatgctcccacagaaccactgtacagtcatattaagataataatagttgtttatacattagtctgatgactaaacagtgagttgtggagggcagatgccatgtcaagctcattcttgtaatgtgaagctctccataatttgtaatttgactacaacaaattacaaattatctaaaaaagttttaagatatttgacagattttgcattataaaattattttcctacaataaaatgtcaaaatgtagacgattcttgaacatagagcagataaaagagttgtgtaaggtgggtatggagcggactaaaaattggctacatgagagtcatggatgacttttgtgtccaagttcgttacctgacaccttcatgtagaacataacctgggcatcctcgtgctttatctgggaaaatagccctcttccaggtggcagaaaaaagaaatcatttgtacttgaataagtaggaattcttaattcaagacacctgacccagcactaaacttggaaaaaaaccaagactagtattatgtcccctagtgactgcttcacacaccacctcagcaaatttaatcctctctagaaattaactgccatgtttctgagacaatctcgtgaacttaaataactatggcaaaaatcaagactcaaacccaggtcttctgagtctggtgctactgcctcatgcaccagtcctgtctcccaaaatgctgtagagctgttaaataaaaatattatactgacctcatttctcaaacaaactttttgctacctcaagtaaaagatctagttacactacatgtgtgccttcttaataactgtatactattggatttttaaatcgaaaattcatctttaatcctacatcttggttctggacagaaaggtggagatttaaaataacatgtaatcagaaaaatagctaatcaatcctacaaaatgggggagaaaacctcgccaaatttcagttttcacacatttaactaatagtaacaaacaacattagtcgtgacgaatttattacccagatagactttcccaatatatttactttggtacttgagaaaaagtattaagtgcagcattttggggtgagggggtggacacacatcttcaatacgcagtttcaccaaaatgagggagtttcctactcccggcgccttctatatttttacttcttaggccaacaggtccatttttaatacaatcacctacttcgagttgcagaacccacaattcaccacaacacaaaaataactctcagggcgtcacgatattcaaaaactgacgttaccaataagacaatcttggccgaatctaaggggctaccgaagtcacttcgactcgaggccgggctggccgagccggagccctgcccgcctttgccccgcgctcaccggcgagctcacgcgcgacacccgcggcccgcagggctccgaagaccccccgccccacggcccaagaggaggccgccccgcgccaaaggagggctcaggcttcttcccgtcacccgccacacgtccctgaggaagacacacaatctgtcccctgcacccgccacaaactccaccacccgaccaaaggcccctggcaagggaggcctgcgctgtggccccttggccccggtggccccggaccaagcttctccacctcatcctgagaggaagcggcctccgcgtccccaggcctcttcgtttcctcccctcccccactcgcggcctggtcccgaactagcgcccaagacggagaagaactagctccgcagctcattaccccggctcctgagccggcaccgaccagtgcgcgtcccactcgcagcaacacgcaccgccgcctttctccttggagttctaggcccgtgactgaggaaatgcagtcggcagcgaagcacaatggcgcccgcccctctcccggatccggcgcagaaccagccaccaccgttaagtgcccctccctgctcctcctccccccacttcgcggacttcctggcttctcgcgagagtggcggcgcggcggggaccgagagctgcgggcgggctggaggtaccccaccgcggggtggtgctctgactgcgggaaccgttgaagagctgcccccggggagtcagcgaggcgccactggtaagcggcagcggctggctggccggcgtgccggcagctgggctggcgagtgtgcgggcgccgggcgctggaggcccg

SEQ ID NO: 24748 - DNA, 2300 bp, Homo sapien
tgacctcaggtgatccaaccgcctcagcctcccaaagtgttgagattacaggtatgagccactgcacacagccacactttgtatcattgtacatagccttaaactatcatactaagtaactgaagaaaaaggtgctaattgaagttgacaaatatagtaggcagaaatggagtttgatttacatagtaggaaataatgttttgtttttaaaggtttaggttattttaatttatcttactgggggaaatctttatttatgacaaatgaaaacattttatctgcttggctttggatggtagagctttagtagacagtatcaatagcttttaggttttggagtataaaagtacaggatagaaatagatttagttcctaacatttaccctttcataaagctccatatatcagcagagtagtaatttagctcttacacaggttaatgggtagtttctttgcaaaggaatcctgtagtatttctcatcccatttgaagatttaaaccaccagttaaggaatcctttgaaaagtgcagatgtcatagccctattctgattcatagttcctagccagtattttagcaaatataacacacgtaattctaaatattggctaggaactataggataagaaccacagctgttaacctgaaagaaaaaaaaattggaaaaatttttagctattagcaagatttttcataaaattacaagggtttaaaacagctttttaatttattgcacagagtaaaaaaaaatctccaaaacagtctccctaggatggatttgcttttaatcattttaagagtcatttacattgtattatttggcctgttcaaaatcgtctcaatttaaatactagatattattgtatcataccaaataatttctgatcaataaattcagctgttttaattttatcaaataaaattttcataagctcataatacatttcttttttatatatttgtaatgttgactttacacagcagtactggattttaccagtaggaatagaaagagaaatacatttatgttttttctataataatagtaaactctgtagttacaatataacagtattaagtttgaatccagtgcttcgttttggcattcaacataataaatgcaaataataatgctcaaattatttcatgtaattggttatcttcctttcaaaaatagatgttcaagacagagttccttcatattcacaaggagcaagaccaaaagaaaactcaatgagcactttacagttgaatacatcatccacaaaccaccaattgccttctgaacatcagaccatactaagttctagggactccagaaattctttaagatcaaatttttcttcaagagaatcagaatcttcccgaagcaatacgcagcctggattttcttacagttcaagtagagatgaagccccaatcataagcaattcagaaagggttgtttcatctcaaagaccatttcaagaatcttctgacaatgaaggtaggcggacaacgaggagattgctgtcacgcatagcttctagcatgtcatctacttttttttcacgaagatctagtcaggattccttgaatacaagatcattgaattctgaaaattcttacgtttctccaagaatcttgacagcttcacagtcccgtagtaatgtaccatcagcttctgaagttcccgataatagggcatctgaagcttctcagggatttcgatttcttaggcgaagatggggtttgtcatctcttagccacaatcatagctctgagtcagattcagaaaattttaaccaagaatctgaaggtagaaatacaggaccatggttatcttcctcacttagaaatagatgcacacctttgttctctagaaggaggcgagagggaagagatgaatcttcaaggatacctacctctgatacatcatctagatctcatatttttagaagagaatcaaatgaagtggttcaccttgaagcacagaatgatcctcttggagctgctgccaacagaccacaagcatctgcagcatcaagcagtgccacaacaggtggctctacatcagattcggctcaaggtggaagaaatacaggaatatcagggattcttcctggttccttattccggtttgcagtccctccagcacttgggagtaatttgaccgacaatgtcatgatcacagtagatattattccttcaggttggaattcagctgatggtaaaagtgataaaactaaaagtgcgccttcaagagatccagaaagattgcagaaaataaaagagaggtaaattcgaatacctgtcttaag

SEQ ID NO: 24749 - DNA, 2300 bp, Homo sapien
cctgactctgttctggacttctttgctttgtaaatgttggtatcatgtaattttatagccagattgttttaatgtttcataatgaacattttcccaaagcaaactgcttgttgcaaaacaaccgtatctttaagccagcattgtgggagagttctagattcctgccagagttaaacccaaggtagtcatatgtgtaattcaagtgctcataaaacagctggaaggaaaaaaaatttggatataaaataaattataggtggggcacagtggctctcacttgtaatcccagcacttcggaagcccaaggtgggagaattgctgagcccaggagttccagagcagcctgggcaacatagcaagaccttgtctctacaaaaaaattaaaaaattagccgggtgtagtgttgtgtacctgtaatcccagctactcaggaggcggaggcacaagaatcacttgagcctgggaggcggaggttgcagtgagccaaggtcatgccactgcactctagcctgggtgacagagtaagactctgtctcaaaaaaaaaaaaaaaaaaaagtctgtacggatacagggagcacactgcttccttttaaaggcaagaccgctatgttgaacattccacttctgctaaaccctaattatccagaagttataagactgcgaagcaatctagcttggtggccatgtgctctgtgctatataagaagctgaggtcagtactggggacaaccaatgctctctgccatattctgagcttagtaaacttgagagtgttgaattaatttagattaatgtagctgattggtaaattctgatctttgtggtagggcttgcttctacttgtttatattaaaaaggtaatgcagaacttaggcctggcgtggtggctcacacctgttattccagcagtttaagagaccaaggcgggtggatcgcttgtgcttaggagtttgagaccagcctgggcaacgtggcgaaaccttgtctctacaaaaaatacaaaagttagccgggcatggtggcacatacctgcagtcccagctacacggaacgctgaggtgggaggatcccttgagcccaggaggcagaggctgcagtgagctgagatcgcgccactgcactccagccaggacgacagtacaagatcttgtctcaaaaaaaaaaaaaaaaaaaaaaaaaaagcagaacttaaaacataaaattgctacatatttatatagatgaaatcactaagatttttacctatatacaaacctaacagaatatggacgcttactgctttgtacttctttattcactggaattaagtaaaattctctttccattttggccagtgaaatcaactcttgcagggttacttttgcttttaatactaaccaattaaattctagagcctaggcttaaaaatgcaaatctttataataaaaagagactaagatagaggtgaaggagatgtccctttagagcagtagaggaagagttatggttctatttcattgaactacctcaaataatctactttgatgaggtgttaaattaagaacattcataagaacatcaatcttgttttcctgtgcaatatgaaaacttgtgtgaatatttataggctagcaacttgtttttcttttctctgttcttggaggtataatttgaacaacagggccttgtaaaagtcttaagacttttgaaattgttaaatactgcaaagataaccttcaaagagaagtgtgtaatcctgattggctgtcttctagatagtttgttgccttggtgataacactaatttacatgtctgaattcctaaacaacctaaaaacttgtatctttgctctgtaaagtcagaagagaatcattggcacatttctcttttcccgtatgaataatggagagaaacaaattcctgttacactggttgatttcttattttaataaagatttaacaaaggaaattgcctttgtgtgtgtgtgaaaatttagtatctaatatccttatctttgggaattcatgtaattctttttctcaagttatttaacagtgttcttcttttttctacatagactgtccttcatctacttggattcagttccaagacagttgttacatttttctccaagaagccatcaaagtagaaagcatagaggatgtcagaaatcagtgtactgaccatggtaaaaggcttattcttttctgtttgttttttcacaaattagtgaacagtgttcattaatttctttaaaaattgattttgtcacatctgacttttaactgggtcctgagatttaatgtacaacttttat

SEQ ID NO: 24750 - DNA, 2300 bp, Homo sapien
ctctatgactctccttatagaccccttgggtcaaatttccttggtgtaaccactctggattatcagaagtgtggaaagggttagaaagagttggaaagggtcagattttatttttttaaaaatagactaatttttgagcagttttagatgtatacaaaaaatgtagcagaaggtacagagctcccatgtacctccttacacataccccagtttccccaattattaacatcttgcattagcaggtacatttgttacagtggatgagccaatattgacacattattaactaaagtccattgtccacactagggttcatcttcgttttgtgcattctatgggttttgacacatgtatagtgatacacatctaccattacagtatcctacagaataatttcatggctctaaaaatcctctgtgttccatctattcatcccctccttcttcccaccccaacccctggcaaccatttatctttttactgtctccatagttttgccttgtctaaaatgtcatatagttggaatcatatagtatgcagtcttttcagattggcttctttctcttagcaatacatatttaaagttcttccatgtctttttgtggcttgatagctcatttaattttggtactgagtaacatttcattgtttggatgtgccattgtttatccattcacttattgaaggacatcttgtttgcctctaggttctggcaattatgaataaagctgctatcaacattcatgtgcaggtttttgtgtgtatgtaagtttttaactcatttggataaataccaaggagttgtgattgctagatggtatggtaagagtacgtttagttttggaagaagcttccaaattgtcttccaaagtggctgtaccattttgcatttgcaccagcattgaatgagagttctttttgctccacatctttgccagcatgtggtcttgtcagtgtttttggattctggtatctaataggtatgtagtggtatttcatttttgttttcatatacaattcagcaatgacatatgatgttgagcatcttttcatctatttgccattatataacttctttgatgacgtgtgtattcagatcatctgaccattttttttaactgggtcatttgttttcacgttgttgagtttagacttgattttatagaactcttttgccaatgacatgaggcttaaacaagcacccttgcttgaccctggctagtgttgtccagaggccctcatgggtgaagtataattgcacagtttatgcatacattgtagcaaacatagcttaaagactcttcatccaggagctggtaacagagaaaagttgtctaagagacatagtccactgaaaggggtctttgaaaaggaggattctggccagtagatccaaagaagaaggctggcaaacgccaccttaaccaactgatccaagttaacatcagtgatgagacatcgacatcttgtccttctcgagcacgtacatcacttctggggaactctttcccaaaaaagcgcaacctgaatccaattagaaggaaatgtcagacaaaatgaaactgagggacattctacaaaacgactggccagtactttttaaatgtggtttgatcgtgaaagaaaaagaatgacagagaaccgtcctagattaaagggagactaaggagacacgacatgcaatgtatgatcctggattgaatcttggaacagaaaaggacccttagaggggcaattaatgaaatgtggtaagtgctgtagattagctaatcgcattatcccagtgcgagtgccctgtgtttgatcactgcactggcgttatatacaatgtcaatatttagagaagctggctgaagggttacggaaatctcttgtgctgtttttgcaacattttcgaaagtcctaaattatttcaattcaaatgaaaagtttaaaaaacaaaaattagaagttccagaaggccgcgcgccagccgctcctgcgggacgggacacccgggttctcctggtgggagcccccagtgccgttcacgttccgcccgggggggggattaaactcgcacgcgagaagcaccgcccccgctcccgccccgccccgctcctctccggccgcgcagccgctgccgcccacccgcacccgccgtcatgctccgggccgcgctgcccgcgctcctgctgccgttgctgggcctcgccgctgctgccgtcgcgggtaagcccttacgtagtccctcgccgggaccgtgcgcgaccgccttcgcccccttcccaacgcacgctcttcgtccccgcgcacccgag

SEQ ID NO: 24751 - DNA, 2300 bp, Homo sapien
tgtgcccagtgttgaggatgtgataatgaatacggcaagaccactgccctcaaggagctccaagctgggcaggatcagaaagaaaggcaggcagccacagaggcagaggggatcaggtcagtggcaggttctcctactcagaacttcccaccatctgtgccttagaataaattcaaggcccttcacaaaacagacacaactcacctttctgctgtcatttccactggggcccccaccacaaccactttgatctctctcacagacacaccccccgcagggcagctaccctggactctggactgtcttctgactctgcttgcattttctggcctctgccctgtcactggttttctcccaccagctgtgcctgctcaaattcctacccattctttaagacccagctaagatgttgccttccctcaacatttgtcagagtttccccattcattctgccctgtgtcactgagtgtgcctgtattagggttctctagagggacaggactaataggatacatgtatatatgaaagggagtttattaaggagtattgactcatatgatcacaaggtgaagtcccacaataggctgtctgcaagctgaggaacaaagaagccagtccgagttccaaaacctcagaagtagggaagccaacagtgcagccttcagtctgtggccgaaggccagagatcccctgacaaaccacttttataggtctaagagtccaaaagctgaagaacctggagtccgatgttcgagggtaggaagcatctagcacgggagaaaggtgaaggccaggagactcagccagtcaagtccttccaacttctgcctgcttttattctagccatgctggcagctgatgagatggtgcccacccagactgagggctggtccgcctctcccagtccactgttaatctccttggcaacaccctcacagacacacccaggaacaatactttgcattcgttcatatcaatcgagctgacaatattatccatcacagtgcctcagtctccccagtattcaggggagggcagagatgttgtctttttgtccttctgttccatggcgtgcccagatcctgtgatggcaggtgctcactatatctatggaactgaaaggccagaccctggggagaggacagagcaggtttgggagccaactgtgaaaccttggcagtgggagtcaggaagagcaacctaggtctttgcatcctcatgcaacaaggatggaggccacctcaagtacacattatgtgctcagcaaagacgagatttaaaagtataaaacattcacatttgagcaacttaggtcattaagaatttggcctctttataatgatagcagtgtccacaggaagagagtgagtgggacatgaaatttctggttctgcatgcagacttctacatttctaccagctaattattattatcattaaattattaagcaaagagcttactcgcaaaggtcaactttttataaagcataagtcatccttggaagtgtcgtttggtcattctagtaattcttgcttttaattctttaacaactatgggtagaactgcagtgtaccattattccacctttgtttgcactgtcaaaatacccaagacgttgccaaggacgactgaattcttaggcttggccgcagccacccacagggcaggtgctcacttcctcctccggggtagaagagatcatgggtccctttccagtccaggctggaatggagaagtcgtccctgaccacagtgcgccaggcagaggccaaggttctaaactgatagaacccacccaccagggcggtgccaagtcccagtaagggccgcatctccccagcttggctgatgaagaggcggggaccgaaccctccagtgcaggagcctgtctggtgcctggctctcccaccgatccgcacgtacctcttcctcgcgggtcctaccccacgcaggtatctagcgcccagccctgttcatttcccacacctggcccgctccgccccggggccgaggagacgcacgtctgattggccgagggcggcgggggcggggccggggcgcccccagaggcctagacagaggtgcgggcggggcaggccgcgctcagcaggcggggcgggagccgcgtgcgcccgaggacccggccggaaggcttgcgccagctcaggatgaggacaggctgggcgacccctcgccgcccggcggggctcctcatgctgctcttctggttcttcgatctcgcggagccctctggccgcgcaggtaaccgcgggcacgccagccccgcagtccgctgggtgc

SEQ ID NO: 24752 - DNA, 2300 bp, Homo sapien
agctgcagtgtttcaggaagagattttttttaaaaaaagaaaaagtagctcttttctgagtgttctaatggttgaatagaaaatacggggttggtaggccaggaagctgtcaacacctctcttcattatactaattgctctgaagatgaaataaggtttgtttctcccttcttatcctactcacagacctagctctgctacttcagaatagcatctgctatgggtcaagggaggcattttcccccctcattatacagagactaaaacaggaccatagcacgtgaataactcaccctggtccacagccagtgagaggtagcccaatgtcccagcaactgtcctcattcgtcagggtgccccagtggctgcctttatttcagccaggcatgcctcactctctcccatacaagcagttctcactccaacctttgtataattttttttttcacaatttcttcccatcctagaacagcctcttcctcccaatacccaccatactatctgagcatagttaggcctctatgcccactccagcctagtctctctcccctttactctcactgccctggacctcaccagagattagcatcagtgtcctgttttatgacctaattatgtcatgtgcattgcacttgcctgctgcaatacatgccagcctgctcgggcagggccaaatcttctatcataatactacggggatattcccatagcaatgtagttctgaggccataggagagatggatacatagtttgtggctgaagtctgtgtaatctactaggcttaaagcatctcttttctgcatgttttcaagcaaggatgctgaattctacatgtaatgatatgttataaactctacacacattggaacctctcacatcctctcaacccacctcttattccagccccctctgcagcctgtttcccccggctgtcccccaccccccaaccctctgagaaacaacctgacagcgcctcaccttttgccatgctatgcacccagggcttctaagagacaaggtatgggaccatgactgaaactcaccactgctgtagaacagtgcagaggagttaataaccctaggatctcccttaccaacagggaaggataaagtccatggataaacgcttgccccttttgtcctcgacagacagttctgaggctctctgaggttcctgcaggactgagcaccttttgttaaggccatggccaaggcaaccactttcccttcttccccatttggctctgaccttcaatcttgctccctgctaggcatttccttccaggctctgctttctgcccctcccctccccctctcttatgttttaatgactaatgtcaaggtcccgctgaggaaaggtcttatatgagcctgttctcagaatattaaacgcttccagtgttctgctggttatttgaaggaggacagttagaacgactacattctagccagggctgtcctacttgctagagagtaacttttgctggattaggaagtaacctagagcaaagcacttcgactttctgggcagggtttctcagctgtaaaaatgggataatagggaccccggctactttgcggggcttgggggatcaaaggagttggaaagaggaggttatttcaaaaccgaaggagctgaatagaagaatctccgggttactctggggcaaggaaggtggagaccacggcgtggcccctcaggtgtctccagtgctccacaagtcaaaggagtccaggaccctcccaaagcgcctgcgtcgcggagcagctgggttcactctaggctgcccgctgcaaatccgcggtgtttaccagaatccaggtggtttgcaaacccggatgtcaggctccttgtcccggagattctcaaatcgctcacccacaactcctcttcggcctcccccagaaaggagagagcagggctgcaagctagaggagcggagagtgtgacccgagcagcctcactccgcctgtccccaccccaaaggcaggaatttctgggatgggcagatggcccacccctcctcctcctccttccccaagccgcagtgggtggggcgaggaaaacctccgcgactttcccgcatcccagcccagagccccgagtgtcggttcactgtggagacagcggtggcggagtgggtctccagggctctgggctggcaaggcccccggagggggtggggcgcggaggaggctacggatccgcttccgcgcggcggggccgggtgcttgggacgcggctctgggctcccgggataaggggctcccgggacaaggggctcccggagagcccagtg

SEQ ID NO: 24753 - DNA, 2300 bp, Homo sapien
tatctctgttcttgacagagacatgcattcctctcttgccccattcaccttccaatcttgccgcatacattttcacttcctcagcagccagtgtggttcttctaaaatgtaaattaaatagtattatttctctactttcaactttccagtgatacacaaggtatagaataaaattcaaggtcaagactacatatgatctgacctctgccctcaaatctgattaccctctctctctcccttcttgtattccacttgcccttgaaaacacctgccattgggctgtctcaggccttcatagttagctgtgttgtcaaagtcatctagggctctctcagatgccagttggtcagggaaaccctccctgactattctaaagaaaatcacacactcccttgcccctctttccttttacccagacttatgattcatagccctgggcactgcctgattttagaagtctatctccctgcactgccctccagcctagaatatatgctgcatggatcaaaaacttggttgtgttcactgatgtagcctctgcttcaaaaataatatttgacagaaagtaaatgcccaagaagtacttgttgaatgaatgaataatgaatgaataatagttaatactggatttttaaaatgacaataacagagacacaaacaatttgtggctcgatctttcttcttcaagttaaatcaactaattttatataaattttctctcaaaatgcatatcttccaattcttcaataattctggattgttaccgcaaaattcttgccatgtttttccagcttcttggatatgatggagttcaaaattgaacataacataggcttctgagaaaagcctaggtagtctataattagtttctctctttctttggttttttttttttaattattttattttagtttttatttttgtgggtatatagtcggtgtatatatttatgggatacatgagatgttttggtacaggcatgcaatgtgtaataaacacctcatggaaagtggggtatccatcccctcaagcatttctcctttgtgttacaaacaacccatttatagtcttttagttatttttaaatgtagaattaaattattattgaccatagtccgtttccctctgtttacaggtttcacatgcttacccaggaatgctccttgaaaagataatctcctcagacataagcctggccacagaaaagtctctctaaggtcagcagtttctagagtgacgaagtgagaattcgattcttatctgttcacagactctacaaatctcaaaacaccttcctgaagaacaccctgggggaaaaatacaaaaaacctcatggatttagccatagatcatatatattttgaattgtcactctttcactcaacaaataaatatctcctatgtgccaaatcatgagctagaggttggaacagcacattgcatagagaacttggtccctagcctgagggattcagaatcttgggcaccatcatttctgttttcatcattgttgtcatcagtgtcttttgagacattcttattttgatctcctttgatttttatatattatgattatttccaatataattttaaaataagaattttatacttatggaaaaatatatttcatctaatttgaaaaaataaggaaacagtgctttgctttccctagccttccttctcatttactgtaagataataatttttctttttcagggttcgtttcaattttttgcaaaggatttagcaatgaaacactaaaatctcaggcattttcattaagctcattttttactttcctcatatatagcctatatgctttatttaatctttattctttacattaaattaaaattatttttaaaatgactatatttctattgctgttgtgacttttcattgatcaatatttcactaaagatattaactttctctaggatgcagagagactcatagaacttacaccaaaatttctactgaatgaatttccccaccttcttggtgattgtacacctgccttccttataaggagaacaaggaagtaaatcatgttgaagttgcttttaaacacagcttttctgctttacctgtccaggtagcctctgttttcatttcagtcttaatgaaaactttctaacttatatctcaagtttcttttcaaagcagtgtaagtagtatttaaaatgttatacttcaagaaagaaagactttaacgatattcagcgttggtcttgtaacgctgaaggtaattcattttttaatcggtctgcacagcaagaactgaaacgaatggggattga

SEQ ID NO: 24754 - DNA, 2300 bp, Homo sapien
ctgttggattcagtcaggcctaagtagcagagctgaggttttttcactaacatgtctcatccattctgctttgtttgttgtaggaggcaagtggtcaacagcaggtggctgtcgagacgtctaatgaccattctccatatacctttcaacctaataagtaactgtgaggtatgagggaaaggtcttcataactggggggctcaaatcaagcacaatctatagggctttttttaaaatcagaatggtgattgggataactcggattttatcatactgctttaatcgtggccaaggcatctagtcttgttgaaatattaaaatcagtgattttatgaatttaagattaatcattttgtctaaagagaatgctttatactgaagccaaatgtatactctccccactaaaaagaaaaaaataaaaatctgtaacatcagagaacaccaagaaccaaaattgttctataatacaagtatcctatatcatattactttaatactcagaaactggaggacctatagcataagatgttgctcaatctagcattacaagtttagcaacatcttgattatgaatttagataaatgtcaatatccttagattgaaagattatattcccaactctcacttgaaccacaaatttcaaaacttttcactttaccatgcagactgtaataaaatagctgtgtagaacttagaataccctggtttctgcattgccctggtgatatagaataccttggtttctggattgccctggtgataacatgtatttttgatttcataaagtcactctttagagacccaaatgaatttggctctaaattagaaaagaaagtattttgcaagtcctggatgtgacaggcattgaaagtaaccatcagttccagagtctgcatttatcagtctaccatcagtgatgagcataacctttttcaaacacatatctctttaaaacaagaaacagattacaaagctctgtagtgtttcacaccaaatctacaaaagcatttgtcttttatttttctcttccagatgtacagaaaggtgttcttacatgaagaagggtgtgaaggctgaacaatcatggatttttctgatcaattgtgctttaggaaattattgacagttttgcacaggttcttgaaaacgttatttataatgaaatcaactaaaactatttttgctataagttctataaggtgcataaaacccttaaattcatctagtagctgttcccccgaacaggtttattttagtaaaaaaaaaaaaacaaaaaacaaaaacaaaagatttttatcaaatgttatgatgcaaaaaaagaaaaagaaaaaaaaaaagaaaagaaaacttcaattttctgggtatgcacaaagaccatgaagacttatccaagtgcatgaccggatttttgtggttttgttcattttgtgtttaatttgtgttttttttttccagctgtatgaaatgggctttctgaagtttaaatagtccgacttcacccatggtgttctgtgcttgcagtgcgagtgttgctgtaattcagtgttgccgtcagtgtctcttttcttagctttctgtctttctttcaacgtagtgtgaagtgtcttatccttttctatgaattccaatttgccttaactcttttgatgctgtagctgtttcagtaaaagttagttcaaactaatgatgtagaatgctttgaccaaatgagctggtctattatgccttgtaaaacagcagcatagggcttttaaaaggtagtcaataaaagttgctgaaattttggcttttttaaatatgtagtaggtgtttttaatgatttttcacataatgtgtaaggtagtgaaatgcaagaagggaaaaatgttttgtgtgaaacacattttctgactggggaacttttattagggtaaattgtttgtaaggctgtacgccaacagtttcctctgatagtttgactgatttaggatatctgctgtatgatgcaatgtaaagtcttttttgccttttttcaggaaaaaaaaaaagctaacttgatgtactagatttagtgtaggtagtgttggggttggggatgggggtgggggaggggagtcactgaatgttttgtccttcctttatactaatgatagtgctttagaatgagaattatgcctgaaatctggcaaaccgaaaaatgttgctattgcaacaaagtggcaaaagctaaaagtaaggatttatcttcaaacataagctgagataacgaatagaagcaaaacgattggctactagctctctctctctctctctattaggt

SEQ ID NO: 24755 - DNA, 2300 bp, Homo sapien
tctaaaattaatgtcctagatatgaaagagaaattgaatttggttttttgtattaaataagcacatactttaagggttagcttctaataagatgtgctggaattaatcgtcattcatctgtaattctaaagcacctagttcataccttgattgttaacacttttcactatttgagttgttgctgtgtttatctcccttgcatagatagtaaatttcttgagggtggggcccagtctgtttcgcctttttctctttgttgcctgatactcaacaattacttcttgagtgggcaaatagaaattgtttctaaataatcatttcatcctgttcagagtgaccagtttgccaagaattctaactgccttaatctttttaatcattgatagtattgtttccttgttttctttctgtagatttttaacatgattaaaaagagttctaaagaaataggtaagctttacaatgaaaatcaatatttctttcaaaatcctcccttttctaggtgcaaagtccttcgtggatgcaacctcaaccatatattctacagcaccctgtaagttttttatcttaatgactttgtgttttacaagtaagttatgtgtatattctctctaggttaaaaccatttgccaagggtggtataggatttgggaaattttaaacatggaatatgagaatgtacaatttcattataaaacttcttctcatccttataaaacaacttggtagaagatattaagttacattttctataagaacttaaaatatatcatatttgaggcagggcaccattttcttattcataccagctctttagagatcattcaaatgagaggctacatttttaatagtacttgggataaaaccgctctcattttttacattctgtttaatgcagatataaagttcaaaaccgagatgaagattttcatcagtgttacttggcctttctatggagattataaatactaaagtggtagcacattatttggtaaataacaaatgtgatttcttaatgacgtgagcattcatatatattacatttttttaaattgaatgagttatacttattatatagtgtatttcatgtgtttttcaaagacacataagatctagtttgtggaagaagggtttgaaaatttaaaaatacatatggagaacaaagttacaataaggctaaggatgtccaacacaatgaccctgcatgctcacatgagaaaatcacaaatttggctctaagctttctagtaactgatgcaaaatgggaatcctggtaagcaatacagttcacaatatgtgtaaaataaaaacagatttggttgcttagaaaaagaactgtattcttggccttatgttcagacagcaatttgtcttcggataccttttaaagtggatactgcgatgtaagaccatgtatatgaaatagcaatccagggataacaggttctgaatgagaaattgctgagatgacctttaagaagcagataaaacatgtttaggtgatgaaataggagaggcgcgctctgatatatgtatacgttttgtgtgatatatacacatacatatagatctatacatgtgcacatacatagacacatcttcaaacccacacttacctgtacatgtgtacataatatacatgcactgatccacacatgcccatagcaatctgtgtccctgatactccatgctaccctattttggaatgcttggaaatcagcttgctttgaatttgaggacttcctattacagatggtgccaatgaatgagaaaaaggagcaggaaactgctccaccatcttctaggcttctgagtcatttccgtgttaccacttgctttttgatgatgcatgttaaaaaaaaaatttctaacagaatgtattaatgacaaacattatctctgacacacatctatatctttttttctttttggcaacatttgagaaaaagactgcacgtatctgagcttaacatctttgaggagacattaggaatgtaagcagaaggttgctatctgaggattcattacctttccccacccagctttaaactgcctgatttacatcagaattaaagttcctgtacacctaactctgtcctagattgtctatctaattatcaataaataacagttgtatttaagggatgccaggtacagtgataacaaaacatacattagtagttacagagcgtgtcagaatacttgcattctcagataatgaggtgattgcaaaagtccaaaaataaagagttcattgaattttggtttatacaatcaatgtaaccatttaaaaaaatgat

SEQ ID NO: 24756 - DNA, 2300 bp, Homo sapien
tacagcctcgaactcctgggcttcaaaaggatcttcccacctcagcctccccagcagctgggactacaggtgcacaccaccacacctggctaaaaatagaatttttaaatcatgcctttctagatgaatgtttatatttctttctctttcccataggctggaatgacacttacttacgacccaactacagctgctatacagaacgggtatgtcgttaaaataaatccataatggcttgagggaaaatgtgaaggtggaaaatatcagacatttgttccatgaattattctatttaaaggattacttaataaaggcttttgtgtttgttctagattttatccttcaccatacagtattgctacaaaccgaatgatcactcaaacttctattacaccctatattgcatctcctgtatctgcctaccaggtttgtacctttaggattcgtcagcagtataaccacttgcggaccatgaatctctgctacatttttatgtgtcttaaaattttgagcgtttatgaaatttgagtcaaatattatgcagcttggatacccaatttagtatgagctgctttgtatttggcagagcaatttatgtataggagaatgtaaagcaaaggaaaatgtttgtcagtggtcagtccttggaatcatagcattttggattggaatgaacccaaacacttccttcaccaaggggccctgcttttggacaccatgtgtcccaaaaattgaaacttaagataattgccgttagatataatacagaataggtgtgtacccttgcttttgtttattcttcagcaggaactgataaaagaacaagtataaacatggtaatacataaagatgtgtctctagtaggtagcattaagtgagcaatgcagctgacatttgaggtaaaaatataaaagcaaaaaggtgacttcctgtttaggttaagtgaggaggctttaccttaaaataaattcccaacttagcaacaaaaactcttgaaatgtcttgtatttcaagatttgatttgattttaatgcaaaggtagctcctgtccgccatgaacccagtagtgtacatgcatttctcctcctgtgtcagaaaacctctaacaggattacttcctggacccagataggaaccttataatggagttcagttgcagacatgtgggagcagagttcccttttgttgaccatcaggatcctgtgtgactaaatttttgtgtattcttgattttaaaacaattgaattagatgttgtagtcctaatttctggggttagaggactacaatatgtaatctaatagttgtgttattttaacttctataagcctcagtttcctcatctttaaaatggggataataatagtttctatctcataggcttgagagaattatgaaaaccaaatgagactgtataaagagcccagccaaggacctcacatatcattatcactcagttaatgttagctatgattattatcattaatatgcatgattaggtggctgataataagagtatattagttatacgtttaaataatgaattggccaacataagcaatgtcatataactaattctgcctaaaaacataaaaatggttttgaataacagaagtgattagatacgctaaaactgaggattggcattatcattcacagtctcctatgcttctaggctcttacagcctcctttccctgagttgtcactcgttttcttttcttttttctctctgggttcttatgttacttattctggtgcttcattctgctgggcgtagtattgactaatttaatgcctctttagttgttttggatttaggattcctatcctttctttgactgtataagactcagtgagatctgctctagtgcacttccctaattaacaattcatgtgtctgctatgaaaaggtagtctttcttaactgtctgaacttggaaacctctgtcatttatatgtcactgaaaataggggcaagtgtaagttattctcaggcaaatgaaaggttgtaagtattaatttgaatttatgttgctatagatattacagctattaacacatttctccaacacctctttttccctcttataatataaaaccagtgtgcatttggccacagaaccattttgtacaataaaaattaggagatctgtgtcagtaatagatttgatatagctaactagaaataacatattatttcagaggccttatttcctctcctgggcattctgtatttctctaagatacatatggaatttcattgcattgcctgacactcggtgccatagcctcaaagactg

SEQ ID NO: 24757 - DNA, 2300 bp, Homo sapien
accaaagtgctgggattacaggcgtgagccaccgtgcccggccagagtctttttaacattcttttagtattcttagtatatcttagtatttagtattagaattcttttagttttctaatttaaatttcatcatcacttaaaaacttttcttatccccataaaactattgcagagtgtatccaatcaaattttagcattctggattgcacagcatccaaaatatcatgaccttagagtacagccatagaaaaattaatctattctcttcttttgtggtttacattgtggtttcctaagagaccactcttgacaactgaggttgtacagggaattttttccatagatgcacagacgacaggtctgagctgctggggtgttgagcagtaagttctcagagaaaggcacctatgacttgaacattctgatgaatgttttctattttatacttgtgcttgataacttgcagtaaagggtcctagtgagaggagacagcaaaagggaagtcaaaacagttgtcttatgcatggagtagcagaaaatagttccaccagatacaccaattttcaatgaatgctcattatactgtgtttgatacttaatcactttaaaggacagatttttacgtaaattttgtctggcaagttcttactcgtccattgtgcacctagcactgtgcccagaataagttactttgcttttttttttttttaatgaaaagaatcaggaattacatgtgtgttttatacggttatttataataggtgaggctttccagttatctggctggagaatgttggaagagcctgagtatggaagaggttcactaagtcaccagcaggatatctaggatgaatattttttccagttccttgctgctagaaaagcctttgaatggccacagctttgccagaagacttcatttccataggggacactgttttccttagggaagccagaaggcatacgccttcactttttagacaagttaggatttttcattatcatggcagatgagcctttccaggaaggtattaagagaccagaaaccaaggaagaactctgtagtatttactgcagcgatagtattctgtaaaagtcaccgtggaacaggccaatgtgaaggatggcaagcccgtcccagtggcttatccagagaccgcaggctctgtcagtccgggctgctgtggaggccttctgcactgcacaggttcggggcttcatacgtccacggaaaggtggtcgagaaaagggacggcttgagcagccgtaggtcatttacatcgggaaacaaagggaagtccctcctccctttgtctcttttttgccgagtttctgtgtcctaagaaaacacatttgtgtcgcatctaataattaacataaggaaggattacactgttccaggttttagggagaaaggtttaccaaaccggtggccttaaatgattttcgctccttgatattatcatcttgaaggaaagctggtaaactctggcttagggataaaacaaaactttaccgatcgtatttgggtgaggggctggggagtggagagctgtttcctctgctaaaattttagcgtgtgaatcgggggatggagatttgcagaggtttgacgggagggtcgtgtgttcgttgaagtaggggtgattgtccacaccttttcttgaagagtggcgcggggggcctagttcgaaaggtgaagaagagagggaagaccgaggtgccagagtggtccccgaagcgacgaccttaaaaggggcttcgagccggggtgcaaagctgccgctggtgcttaggaaagaaccgagggggaaaaagaacagaggaggggggttggctactccgaggaatgtgcggcatgcggggagccagacccaaccattgcaccagagcgggggcgccggctgctccccgggccgcccggccccggctccggccccgatcccgggagggagagcgcgggggccgggcgggcgatggggcggcaggcgccgcgcccagcgggcgggcggggaggcgcgggtgggcctgggcgcggcgcgaggcggtgcgctgccgcctccccgcccccggccggcgcgctctcagggcggtggttgaggccgcggtaggtggggacgcggcggcgctgctcctccgctgccgccgggagagtcggcgacgccgccagctccgcgcgcgaactcccgtccatggcacgcagggcggcggctgcccgagctgctcgagtctcgcccgctgccgcgccgtacttttaggcgagtgcggaggtcgaaggcggaggggaagtcagcgcggag

SEQ ID NO: 24758 - DNA, 2300 bp, Homo sapien
ttaccatgataacttgcagtctctctggactgttttcttactttctatgtgttagaacatatttgtttcaaaggtcgaggaactttttcagatgaacctcaccaggatctgtccctgtaatcactcttacaactaagcacttatgaataatctataattgagtgtgtatgttatatacagggtctcatagttatgtttttttttcttacgttgcattctttgtgtttgagtgacttcattacattttagattttgttgagggtagacaatctatcttatctctttgtaatgctttacttaagaacacagtacctagttaagtttggaacttttgaaccccggtggacattgtttttttaaaacatatatgccttatattctctccttttatgtcattcaccattatagaacatacattttgttggcttttagatatccttctctagtcttagagtcttttaattttttttttttttttttttttttttgagacggggtctcactctgtcacccagactggggtgcagcggcgtgatctcggctcactgcaagctccgcctcctgggttcacgccattctcctgcctcagcctcctgagtagctgggactacaggcgcccgccactatgcccggctaattttttgtatttttagtagagacggggtttcaccgtgttagcctggatggtctcgagacctcgtgatccgcccgcctcagcctaccaaagtgctgggattacaggcgtgagccaccgtgcccggccagagtctttttaacattcttttagtattcttagtatatcttagtatttagtattagaattcttttagttttctaatttaaatttcatcatcacttaaaaacttttcttatccccataaaactattgcagagtgtatccaatcaaattttagcattctggattgcacagcatccaaaatatcatgaccttagagtacagccatagaaaaattaatctattctcttcttttgtggtttacattgtggtttcctaagagaccactcttgacaactgaggttgtacagggaattttttccatagatgcacagacgacaggtctgagctgctggggtgttgagcagtaagttctcagagaaaggcacctatgacttgaacattctgatgaatgttttctattttatacttgtgcttgataacttgcagtaaagggtcctagtgagaggagacagcaaaagggaagtcaaaacagttgtcttatgcatggagtagcagaaaatagttccaccagatacaccaattttcaatgaatgctcattatactgtgtttgatacttaatcactttaaaggacagatttttacgtaaattttgtctggcaagttcttactcgtccattgtgcacctagcactgtgcccagaataagttactttgcttttttttttttttaatgaaaagaatcaggaattacatgtgtgttttatacggttatttataataggtgaggctttccagttatctggctggagaatgttggaagagcctgagtatggaagaggttcactaagtcaccagcaggatatctaggatgaatattttttccagttccttgctgctagaaaagcctttgaatggccacagctttgccagaagacttcatttccataggggacactgttttccttagggaagccagaaggcatacgccttcactttttagacaagttaggatttttcattatcatggcagatgagcctttccaggaaggtattaagagaccagaaaccaaggaagaactctgtagtatttactgcagcgatagtattctgtaaaagtcaccgtggaacaggccaatgtgaaggatggcaagcccgtcccagtggcttatccagagaccgcaggctctgtcagtccgggctgctgtggaggccttctgcactgcacaggttcggggcttcatacgtccacggaaaggtggtcgagaaaagggacggcttgagcagccgtaggtcatttacatcgggaaacaaagggaagtccctcctccctttgtctcttttttgccgagtttctgtgtcctaagaaaacacatttgtgtcgcatctaataattaacataaggaaggattacactgttccaggttttagggagaaaggtttaccaaaccggtggccttaaatgattttcgctccttgatattatcatcttgaaggaaagctggtaaactctggcttagggataaaacaaaactttaccgatcgtatttgggtgaggggctggggagtggagagctgtttcctctgctaaaattttagcgtg

SEQ ID NO: 24759 - DNA, 2300 bp, Homo sapien
tcttacactgttgttccccttatttaaccaatctttcctatttcagggtcaaaaaggtattcttctatattgtcttctaacagctttatacttttgtttttcacatccaggtcatgattcacctcaattttccaccctcctcccttggtatgtgtgaggcagggctcccatttcattttttccatatgattgccagttgacccagaatcatttattgaaaagttcattctttctccactgcgctataataccaactcagtcataaatcaagtgtctatacaagtgtaggtctgcttttgggctctctaaaacaggctgaatttccatcatccagaaaaaacagtaagtagaacagtctaagtttggtagtttcccttattacctcaaacctagaacttctgcgattgttctcgatttacttctcttccttctgtcactcttccaaaccatcattcctagtcttcctaaagcacaatttagttcatgtcagttccctgtttaaaaacattaaaaggccccacattgaaacaatatgggaaatattttaggctcccctagtctgacagtgacccattccacttttcaggtctgcatgcacctcaacagtgcctacaatatagcagacatagtaaatattagcttccttataggcttttacataggtaaatgagagggacatgatttgcctcctggcagagccaaaatgttctcacctatacttatatttattttgtttttgtcaaacatgtaagatctagaaatttgtctaaaccatagaacgattataagggtttcaggtccttattttgtcattgttttaaagtatcttactaaacctattttaaaatgttatcatataaaaataataactgtttaacaaaataatgcattccagttgagtttaatttaccttgtgctattaacaaaagactcttcaaaaaccaaaatgacaaagtaaacaaggtctatttaataacaaacacagttttttattacattttattagatgtgccggaaccctaatttgaggatgcttgcttacctatgctatccgtatgtacattttggtattagctctctttttgagctggaatataaaagtcttctgcaggcagcttcggggaccaattaattccattaaattatatctagttatgtagtgaactgaaccactgctggtctgaggctgtctagagctgtgacaattaggagatggagagaggcagaaagagagattgattttatatgtcactgaagcacactgcaacaatatgccagcgtgactttcaaaatggccttaaaatattccaaactcagggagtttccttgctcctgagtgggagttgacagactgtctggcagcattagaaagaggcagagaaaagctgatgtctatattgtgtcctctaataacattctgcctctttgcggcatccccctcttagaaggatccgtctatatgttgtgaggggtgtgtgtgtgtgtgtgtgtgtgtgtgtatgtatgtatgtgctttgcctccccttgtgcaaggggcatgatttcacgtctcacatctgggaaaaccaaaccgaaggacgctaaccctcccaaggtcacctagattagtcttgtggccccgggtcgggggtgggtgggaggaacagaacccaggtgtccagactccagctttgttgggcattaaatcattttccttcccttgtgaaaaaaaattactgggcggtgggaagtgaacgattaatcagatttcctcttttcccttatttcccctcccccttacgaagataaaaactcgggaaagcaaaagaggtgcccgccctgcagttcttaagctgggtccccccgcattccccctccacccccactcccactcccatttccccacccccgacacaaagcgatctggactcacagggcttccgcccgtccaaccgcgagcctgggaggtgaggagtggttaaaactcagccctcacctccagcgggtcccgggctcggcggcgcccaggccccgcccccgcccgcccttcccccacggcctcggaacgccagcccctctcctctctccacatcgggcgcacccaccccagatgccgcctggcaccaagcgcagccgccgctgccgcactttccacttgtattgatcacctctcagccccgcgcagccggctcgcccgagcggaccgcggccagcgcgccagcccttggcagccccggagcagtcgggctccgggaggaaactccttgggagcgccctgtccggggtgccctctgcgctctgcagtgtctttctttctgcct

SEQ ID NO: 24760 - DNA, 2300 bp, Homo sapien
ttccaggattcttcttagggaggcctttcgaccagacctgccctgagaatcctgctgcccccgggcagtgatgtccgcattctttgactagtaactcccctcagccattcttctctccctgaataggaacctgagttttgcctcccaccctctaacttgggcttggagctgctcatcccactcctgccctggtcattataccctaacccttgccaatcctggcttagtaccagtttgcttcctcctctgaaggaatttctgcatttttgtcagccctagtcacttgatttacgactccaagagaaggaaaaaggtggggagtagggaaataggaaaaggaactactagagacgacaaaaattaaaacttccatctgcctcacatattttgcctagtctagaactggttagtggcataggttttaaatttcatgtactcagaatttcttcaaaaagcttctctaactgtagcttctctgttttggctgtaggaccctctctcaaacaatgccccaccagattgaggccagcataccctggagtagccagttctgcaggatcctgggtgtcagccaagctcaaatgccaaagtaaatagaggagggagggggcacaggatgaagagaccaaagaaaggggcatttcccagtctagacaggagcgctgctttttttaaaagctgtgtttttaaaactctgctcattcaaaactgtaaattcttaagaagtaagttttcctttcactagtggctatctcacttttttgttggtttgttttgctatatttacagcacgggataggttggttttatttttccattgcacacaatagcatttaatatttagcatttcatcagtaagatagttataaaacccatagttccaaaagaaatgtaatgcttcattgtatgttagatgagtacgtagaagcctttaatcataagtttattcagcattttagatacttttgaaattattttttatagaataatttcatcataagtagcaatatctcagatttatttaacatataatttaagagagggcagtgtttcaaagtggaaaacaaactagactaagaatcagaagttctaaattctagaccttttaataactgttgaagtttaggtaaagcctcagacttctcatctgtaaaatgcaggagctgaaaaaggagactgcttaattcagtttttatccagctcagtaactttatatgccaagagtgtagtgcagtaaaaaaaagaaatgcacttggattcaaaagactcacattttaatctaagcgctgcttctaactttacttgtgacattgagcatttaccttctcctgtttccctcatctgtaataaaaaggaaatggaacagatgttgtctaaggacatttccagctctaaaattttatatcaaagaaaaatgtctgtggtgcacatgctgtcttccgtttgcatgtaaaatgtgatgttttgctctaagcaacctaagagaaatacatgtatttgtaaagcatttcccgagtttgctggaacacacttttatcccacgaacagtgaaccttaagttctcaaggcagaaaagctgtcttaagagccttgtttgcttcacctctcttctgagtacctaagctcaggctctgcaattgagcttaaaccttattactacaaagcttcttccaagtgacttctgtaggccataaagacaactataatcaaatttggtttttacctcctgtttataaacatgcttcttaggtcaaaaagcgacttcttaaaggttaaaaagccacttatcaaataaactgaacttttaaattttcttacataaaatgcttaatccaaaagtatttttgtgtttacaattcctggggtttttgttgttgttgttgttgttaaaatgccttaactattcacataaagtatcttgcttcaaaaggaagtcagagctacagtcacgagtggtttacagaatattttctgatagtctttgcttcatttcagtatcgtgccatgattggctgttgctagctacaaataaggaagtcttcaagttgggggatttctcagtggaagttcccacttcaacataagggagagctctggacagtttgagcagcattgttagagcctgtggaaaacactttacaactgtgtaactgtcttcatctttacagaggaatagtctacaaaggaagacttgtaacctggagaagaggtaatctaatttcaatagttcctactgattcttaacctaggaaaggggcctggatgtcttaaactgaagtgttgcagatgtgttaccctct

SEQ ID NO: 24761 - DNA, 2300 bp, Homo sapien
cctttgtaaaacatactgtatgtgaattcttaaaaaatcatcattataggaaaaggaaaatgtttgatgccattttagcattgattacaaaataattctaccagcatttatgcatatttcacatacaggggaattatgcagccacttctcttcaagactacaacatcatggaagtggaaagagaaaaatacgcatttaagaaatgtgtatatctagctatttccttattcaaagtttttagcacctccatatttcaaaatgcctatgcattcagctttagactctgagtatattactaaattccactatttcaatcagaaatcttcaaatcagcttatttaatttgctcaagcagtgctgaataaactggacttcatcaaaattaagaatttctgctttgcaatagatattgtcaagagagtaaaaagacaagccacagacaaggagaaaattttttgcaaaagacatatctgataaaggacttatcaaaaatacaaagaacacttaaaactcaacatttggaaaacaacctgattaaaaaatgggccaaaggcctttacctccccaaagaagttaaccagatggtaaataaatagccatatgaaaagatcctccacgtcatatgtcatcagggaaatgcaaattaaaacaacaataaaatatgacacacatctattagaatggccaaaatccagaacacttacaacaccaaatgctggcaaggatttggagcaacaggaactcttattcattcctggtgggaatgcaaaatggtagccactttggaagacaatttggcaattgcttacaaaactaaacattctcttaccttatgatccagcaatcatactacttggtatttatccaaaggagatgaaaacttatgtccgcacaaaaaaacctgcacacagatatttataacagctttttttcatcacactggggtgagggatgttgataatggggaagggctatgcttgtgtcggggcagaaagtatatggaaaatctctggacattcctttccattttgctgtgaatctaaaactgccctcaaaaaaagtttaaataatttttttaaagcagtactgtattgtgatgtttaactcaattacttattacaagaaaactattcaactggtcaaaacgttatatataagaagtttctgtttgttaaaaacattgtttcaaatatatttaggctttgacttttaaaagtatacagcaacattcaagataactagacagaatgcactgcaacttggcaggtttttaaatccttggacttactggcctaaggaaagatgtgtaaacatccatgattcagaaatacagggagaaattggggcagccagacctcatcctcttgccctaaagggaaaagatatctttcttgcggtatctaagatatgaatcttagataatattcatgcatggctaggaattggaataatgggaaagtcttaattcatgggaaattttctaataaagttccacctccatttccagccattcctctttaacaaatacatttagtgaaaaatactaccagttggggagaaaccaaatgggtatgtgtatatgtagtgtttctcagagtgtggactttaaccacgtttaattacataaatttacgaggatctgttgaaaatgcaggttcctgggcttcactccagttgctctgaaatgaaagctgtaggagtcggttggtgaaactacattttgtttctcaggtgattcttgtgtactctaactcatatatagggtgatgttatttatttactggttatttatttaccggttatttatcgtttggcaaaaaaatccagcaaagactcacaagtgacctttacacttgacataggattctcttccgctgctgacgctttttttttctaagaggcggggacttggctgggcagggctgggggagggcgctaggcggggcgggcaggggcggggcagaagagccctgggctgggtggggcagggcggaagggccctggccttgttgggtggaggtgaagagttaatggctccgcgcgcaggcactgccctctgaactggaacaaaatgcaacttccggttggagtcactcggccaggcgccggcgacctgaggggagagggaacgcagctgaaagcgtgaactgtgtgagtaagaaactttgtgaattggtgtgtccgaatccgtcaagcacgacgtcggagaatttgtatgcgtgagcgagagggacgcgctgacagtaggggcgccgcagggagagaagccgaggagcagcggagacaaccaatttgcagtt

SEQ ID NO: 24762 - DNA, 2300 bp, Homo sapien
cttatacaacattaactcagtatggatcaaagactttaatataaattataaactacttaaaaagaaacaattgaaaatcttcatgaccctggattaggcaacagttccttagatatgacagcaatagtacaaacaacaaaagaaaaaataggtaaattggactgtattaaaattaaagacattgtgtgtcagaggacactatcaagaagtgaaaaggcatctacagaatgggagaaaatacttacaaatcatatattggataagagtctagtttctagaatatataaagaacttttaaaatttaacaataaaaagagaaataacccatttattacaagtggacacaggatttgaatggataaattgccagagttacacagatggccaataagctcatggaaagatgctcgtcattagggaactgcaaatcaaaaccttgatagggtatcctttcacacccactaggatggctgtaattttttaagtggactataagaagtattggtgtggatgtggagaaattggaacccttatacaatgctagtggaaatgtagaatggtacagcttctgtggaaactggcagttcctcaaaaagttaaagatagaattaccatatgactcagcagttccacttctaggtatatatctgaaaatattgaaaacgtgttcacacaaaaatgtatacacaaatgtgcacagtagctttattcataacagccaaaaggtggaaacaactcaaatgtccattaactgaggaataaacaacatgttgcatatcttacaatggaatattatttagccataaaaaggagtcaagtactgttacatgctacatcatggatgaacctcagaaatatctttctgaaagaagccagacacaaaaaccatgtattgtattattccatttatatgcagtgtcaaaaatagacaaattcgtagagacaaaaaaaaaaaaagattaatgcttaccaggagatgggggaagaggaggattgggactaacttaataggtatggactgttttagggagggtgattaaaatgttccagaattatcttgatggtgatgcttgcacaacataatgaatattctaaaaaataccaaagtgtacactttaaaatagtggattttatactatatgaattgtatctcaattgaaaatgtgaaaatttaaaaagtgtgcctgaagatataacaaaagatgttatgacagattagagactgaaattttaaagaattttcacaaacatgaaataactcggtacccaatataactgatagagaactttgtctagtctgtgacttttagagaattaagagaaaggtcctgtgttgtgatttttacagttggacaggaagaatcagagtcattagttagccttctgctcagagccaaggaatgtcgttaagagatgttatgcagactgaggttataaaaccaaattacctccactgagcaaatcacctgtattcagaaacagcagggaagttggaaaactagtcggtagtgggggtaggactgaagggatgtgatttttcttttttaacgtacaatgcaacagtggctctccctagattttgtgctaaaataagaacattttcacacattttaattgctctgtggtaacaacagtgcgaactccatccacaaacatttattatctatttaattttgctctaatttcagtgtagcaagaattcacctcataagtgggagtaagagtccatttaataaaatgaaatcccttcccacattgctgatcctattgtacatttccataataaagaatttaaaatggccttttatattttctcatttttaggttaagtttatagattagtattctcaaagtagcatcttcctgaaccggaaccccacttgctccttgaacattagaataagaatattttaaaattgtggaacttaaggtttcatacaatttctagtcaggattttagatgagacttatgtttatagtacttggtggtataatgtttgtggtaaaccttatagaactatctttaagatgcatttttaaaatgaggtttatgtaacttagtaattatctaaattgatctcattattttgcagacctgtcatttactccatcctttatagtgatgctacaggacgaagaggaatggataaaaacattggcgagcaactcaataaagcgtatgaagccttccggcaggcatgcatggatagagattctgcagtaaaagaattacagcaaaaggtgtgtggttctggttttgaaagttattctttatcttggtacatggaattttagagcct

SEQ ID NO: 24763 - DNA, 2300 bp, Homo sapien
tccaagcactttgggaggccgaggcaggcagatcacctgaggtcaggagttcgaaaccagcctggccaacatggtgaaaccccatctccactaaaaatacaaaaattagctgggcgtggtggtgcatgcttgtagtctcaactactctggaggccgaggcaggagaatcgcttgaacctgggaggcagaggttgcagtgagccgagatcgcaccactgcactccagcctaggggacagagccagactccatcttaatcaatcaatctatcaatcaatcaatgttgtcagtttatcaccactctaacaagggccccagtccatttctgcttggaaaagaggcaccttaacccactgggtgttgagcatctctctggcctgctccaatgagggaagagcaagtcatggaacatatttttgtagacacaaactaacatgagagaagataaaaaatgatttgtacctctagagtatggagttaaaccataccataactgccaaaccacagtgctaagttttttaacagtctgaattctaggttagagtttgtctgggggaaacaaaatagctaaccagcacgaactggaagtgagcttatgtattttctaaaactattgatctggaactaaaacattatctaaaccaaccaaatacttcatttggttccagacctggccttcactgtctggagatggctgtgcagctcagaaggaagtctcggccttatattatcttcccctgagagtattggtgaatcaactctgaaaacagcactcattagacaaatagtttctccatttgcagctgttaaatagctctacccgccagtgataaaggggcatcctgtgtgggtgtactcagacctcttcaagcaactggcttaaaaggaaggctagctcactggggatccaaagtatcagtaagggtgataaagcttgcttgaaaaagctctctctaactggggctggggaagcaatgcaagcagcaggctttctccagaaagcagctttctaactcctcaccctctcacacacacttcaatatacaaagacccactgttttgttgcgtttttcctgaggttttacctttggcactgcaaaagccttttctttcagcatctgcaagaccctattggatgagatctatttctaggttaaagcctttgatacatttcaaagcagactttgcctttaaagttctcaactcaactcttttttttttttcaaaatatactaaataccaatgggtaacgtggctctatagtcaaggtttagaaaaaatatatgcactaatgccgacatgggaaccactgtaactgacattccacttgcagacatgctagggtacgctctaccggctagggagggagggtttctgtgggccagacccagtcagccaaccttaggaaaggaacccggctccatttcctagtgaagtggcaacaatgactgtcatttcctcctcaaatataatgtaaggacatttccaagtcgcttcagtcatttcttcctcctccaccctaccatgtgcttacaaaagtatgctgtaggagaaactcaatttctttttccaggcaaggttccattaaacatgtccccaataacctgattacatcagacaatgagccttccttcttatatgatttcttcagcagaatgttttttagttagaattgccagatttagccaataaaaatacaggatgcccagttaaattttttgaatttcaggtagataacaattttttactctaagaatgccccatgcaatatttggcaaccctatttttaacatcacatagactatataaatatgaagctgaatcttagcagattctctcctagtttggggctggggaagtggttaggtgtggagctaatatttactctttttccgcccgtaattttctttcttccgttctccttccgcaaggaacgtcttggggcttctcgaacatctctcagcatttactgtacgcccccctcccctcgcttttgctgataaaatggttggtgttgtgtttaaagtgtttataaagtctcctccgtgataacgcgagcgtttaagagagagaattctaggcacacctcttcctcccctccagagtgccccggcgtctttctagcctccgcctccaggcgggtgaggaggtgacacctgagaattcctccctctcacccctgaccctgccggaaagcgaaactgagatgcgggcattgggccctgggaagcgtggggaaggggaaaggagaaagccaggtgggtttttaggtcccttccagtgccacactgcggggcgttg

SEQ ID NO: 24764 - DNA, 2300 bp, Homo sapien
gtccagcatgtaggcttcctcgggtgagtttctattgattaatttttatcctgtgtatgagccatacattcttgtttctttgcatgtatcttaactattttgaaaactgaacattttaaataatataatgtgcaacactggaaatcagattctacccgctccccaagcttcactgttatttctgtttgttgtagcagttgttgatttagtgacttttctgaactcattctttttttttttttttagagatagggtctgagttggtgactcaagggatcctctggccttagtttaccgagtagctgggactacacgtgtgccaccgcacctagcttatgaatgaattctttaaagtctgcattgtttattgtgtgtgaccactcaggtttctgctcagttagcttagtggtcaactaatgattagagagacaggttttcttaaacaccttcaaccaaaaaatctcccagtctttcctgaggggtttagtacttacgttgggacaagccttcaacaatcagccaagcactttacattaggttggtaccaaagtaatttcgttgaaatgacaaaaccgcaattttttgcaccaaccaaccaaataattctgccttagccttcacttcttgcttctgtagtgcctcaaggtcacccagaggttagagctcagggccttctcaggcctatcttgagtgttcacataaccctagacatatgcacaccctaagcaccttctacagtctcaggaatatgttagcgtttttcaaagccctatggacatcttattccccagctaaatactttagtatggctggagcaaaaggtgctccaaacaaagtttaagggttttttttttttttgacctttataatgaatgttatggggagccactagtggaattttaaataaagaaggagcatgactacatatagcacaaaaatttttaccagtgaggtggagaatggattaaaaggaatcagaccgaaggcggaaagatcaaagagcattctaaaaaagtagcctggggaacatggtgaaatcctgtctctactaaaaaaataaaataaataaaaacataaataaaaattaactgggcatggtggcaagcgcctgtagccctagctacctaggaggctgaagtgggagggttgcctgagcccggggacgggatgttgcagtgagcccagatggcgccactgcactccagcctgcgtgacaaagcaagaccctaactcaaaaatgcattaataaataaatacatataaaataaaataaaataaaaaagaagtgaggaaggtctgagttaaggccaaagtggggagtatttagaaggggaagtggtggattggaaaagctgttatggagattacacatttcatggtttctacagtggggagagatgaaaaagaggcaagtgttcatactcttaagtttctgattaggaaaattatttggaggacggggctactcaccccctcctcccataaaaaatgaatagagaggcataggtttgggggggaagcataaagatgtggatccaaatattacctatgagtaaaataatctttgtgtttttaaaggtattaatatcttaaagcaattgtgctactcaaatcacagtttggatccaggcgctgtaatctttcctcaccctctgtccagtagattcatcaccattctcgatttaggaatgctttaaagatgcttgttatttggaacatatttgagaaagtgacaggaacgtggcaaacaagctgccttaaacagagactgtacctagacctagagtgtaatatcaacttgtcaagtatatcttctgcaactttgctttttgaaagcctagcacaaagtagatcatgagtaaaatgtgattgccgataattacatggagaaatgtgaataaatgactctttaaaccctgtaaactaaactcggcttaaaataggtggtttgaacatttgggaaaccttagttttccctgaaatccaatccttgcaaagcaataatgacaagaggtggataaagcggacttacagaaaagggcgtcttaccggtcccctctaatcacaccatcccccctcttttaaaaaaattttcttctcagataaccaagttaaatctagctcaaatgaaccttttagtttttgaggagggcaataatagtagtgaacaccaaaacgaaaggggatctgggcttcaaaatactaacagttctatttcctagccagtcgtctcccgggctggatgtgccgccgtcccagatctcagcggcggccgcagagcgcagaggtagggagagaaa

SEQ ID NO: 24765 - DNA, 2300 bp, Homo sapien
ttggcataaaaagcaaatatataagcacttacataaattacttaatgttatgtttatgttcttaatagctcagtttagctgttaacctgccttcttggtaacaaaagctctgcctttactcttatccagacaacttgtttacttaacccccagccttactcgagggtcgcaagggaatccttgtccaggtatgataggaatatcctgttgctccttgggaactgtctttgtttgcttttgaagtggtagggaaatctgagtctcaacacttaattataggtagctgtatagcataggtagttgtagcagcacccacatttcccaaacatgtattttctagaacagtatcagtggagaagctaggaaggaatcagagaaactgaaatcatctgtggagggttttcctaattttttttggcatactgtccttacccctggagccatgggagaaaatgggagaattagtgtccttggagccaaaggaagggaatggaggagttttgtatcttcaaaagccttataggtgattttgacaggcagcttattttccaatgtaagataaaatttgtaccacaaatagctgtaaacttctaagcaagtaggataatttttctaaactaaacccccatatacctccaagtacatcttcagattcttatggctcagggatctcatttaaagtataatggttctattgacgaaacaacagtcattttatagccatcattttttttcttttacttttcacaattttgtgaatcatccaaagggaaaaaacttcttatttaatgatggtcctcaattgaagaaaatttgtagggtaggactttaagaaaaaccgtcttaaaatataaacttgaaaacttaggaacatctaagaataagtactcagaattgtaagtccaatttgagaaacattgaactaaggtgtttagtttcatgatcactgatatagaatccaaccccaatttgctggtgtgattgcacactagataattttttttttttttttttttttggagtctcactctgtcacccaggctggagtgtagtggcgtgacctcagctcactgcaacctccgtctcccggggtccaagtgattcttctgcctcagcctcccaagtagctgagattacaggcgtctgccaccacacccagctaatttttgtgtttttagtagcgacaggctttcaccattttaaccaggctggtctcgaattcctgacctcaactgattcaccctccttggcctcccaaagtgctgggattacaggcatgagccactgtgcccggcctagataaatcttttatttgagaataaaagattttcatggcttttcatcctgacaataaggaagttttaagtttttaaattatagatggaataccagaatttgaaggaaactttgagattacctaatacaagccccttaattcatagatctctaaactgaggatcagaaagattgacacaaggtcactcaataaatggggcatttatctcgttatcttggcatttgaaagctaggctatatgaaaaattagagatacttataaatttcattaattcattcattcatcagatatttattgagctattattagatattgttctagaatttagaccctagtgatcttgaaatgaatagggcaaagtccctgccttcttgatttccctttagtgggagagaaatgcagtaaacaagtaaacaaaaatttcaggtctttgtaagcattatacaagtaatacagcaggttaagggaagaaagattttgtttaaggtagtgtagtgtgactattttaggtatattgttgttagggaagacatctatctgtaaggaagagaggaaggtaagttatgcaaagatgagaatagccttctaggtagaaggacagcaaatgcaaaggccttggtgttggagtactccttaagttatattaatacaaatataggagcattctaattggagttcatttgaattaataaagttaaatccattaagtcgaaatgtttttttttttttgaagttttttttctctagacaatgaagggggtatcctcaaggcagaaaaagaattactttttcttttattttttagatgttgctaaatttgcataagaagagttggatggaaggtttgacacttcaggactacagtgaacattgtaaacacaatgaatcagtggtaaaagagatgttggaattagccaagaattacaataaggtaaaagttacttctgccatttcttctttataatctttggaatatgtatgattagatgccaagcattgtgta

SEQ ID NO: 24766 - DNA, 2300 bp, Homo sapien
ccttgagagcaagaagagtttgaaaaattccttttatgctagaaattttgctggaattaacatatgaagtgtagattaacttctttattgagatgttttaaggattcagtaaattaatatttgtaaaatcatgcctatattgatgtttaattagtgatggtagtagaaaaactagttttaatgtcttcatataacacataatattgtttatatagtcaatactttaaaaatcatgaaagaagtaaaatacatatttttgaaatccactagcagttatgcattgattgcttaatagtgaaaaattagtatatgccattttagcagtttgtgctgtcttatgtaaaaattgccataatggtgatattaaaaagatatttaaatgggatcatggcatgttatagtgcgaacaaagttaacatgttaatgtgggaaaaagaaaccaaagaaatagtgaaagaagtatgatgtggaataagagagatacagggtggcaaaagcaaaggctaagggaatagaagagaagacagatgttggagtagctctaagtatgttcagaaagttaaaaacaacaacaacaaaaacaacaaaaaatccattggaattgacctcctggagatccttaagagtgttagtgaagtgccaaagatcccatcagtgtttgtaaaagggtaaataaagtgatggaatttgagatacagattttccatataagaaacttgaccattagcagaaaaaagagaatgaggttaatgggtttagtaaaagcctctgtaagataggggatacattggaggggattatgatcacataacagaccaaattccaaggatttcttagagctgtgcagaccgtgcatgatgggatagccatctgggggtctttgttgataaactgttaaaaacgtttctagtgtgaatagccacaaacattttcagtgcttttttgttggttgagtaaaccgaagagcacgaatgcaaaagcaaaatttgacgccaaatcacagaagttgccataaacacagaagttccctagtgaggacactgcctgtgcctgaatttcatttgtttctgctgcaatcatttcttacgtttttcctggtaactagccagattagaactgtgaatgaagacaaactggtcttgcccagatggtagatgagatacaggtaacttgggtagatagagaaaatatttaggcatttgatttggaatatcttagaattgaagagatatgcttactcttttgtcatgggggtttgcaaccttagtatatgcctaaatctacagctgctcctcatttcccagatggcatctatggctgggagtactttttaccatctgtacttctcaaagagtttgtgaactctctcttttaattattgggaatggaaaaactaattggtaaagtgggtaaattatgtaaaagatttttaaaatttgaattagcgctttttatacctaacttttcaaataagatcagtacttcaagtcctttttgaccttcatctttcattgtctatctaccatctttgttgtttgcaatattccgcaatactccctaataactgttttgtacatggattggtattttgagccaaattccaaaatttttgcctccttccaatactgtagtaagtactgttgttggcatgtacccagaacaactaacactgaatgggtatggagtacaaacttatgtgaattgttccattcatctaagtgcttttaagtcaataaagtttagtgtcacaatttgtgaaagtaatttagaaaaacatactcttaatatgttttgtcaatgtttccatttatgtaaaacattgaatagtgggagaagcaatttcccagttaggaaatacttttataactgaaaataatagagtgacatctgactctgaaaatgagcatattctctgtctagatttggcatgttattaactttttcttctttcgggcttatgagtcataaatgcatttcctaatgatgtgttgtaaataagtatcctttgataatcagtagatacaatacctattcactatcttttctctttaggcaggttctactggggaaaattctctagatagtttgtccatttataaaattagacacttgccatctttgctcattttcaagttctctgtttacaaaactattaagaaggtgtgaaatgcagccaaacttcccagtttatggggaatgtctgatgattacatttcctacatgttcattgttcgcacatgaagaaatttggcagctgtgagattataaagttcagagtatccaaatctaaccctcactgg

SEQ ID NO: 24767 - DNA, 2300 bp, Homo sapien
cactgagaacggaggaaagtactgtcttccgaagcaccggagggagaggcactcagggacagagaagttgaagatggagaaagaaggaaacaaaagtagccaaaagtagtcaagaggtcaaaagcctctcatgagggcaaatggcagtagaaggtcaagggcagaaaaacaagtgtcaaatggcatcccctactcccctcccccgcaccccaacgattcaacagctaagactgcttgtttatgaagcttcctggccaggagctgaggtttgctttcgaaaggaaaaatgggtctggctctctttttatcccagaaaattgtctcggctttagtctgggacatctggtcaacaacctgccctgcccaggccgccagcgcagggccttgcccgcggcgcgttgatggaggccgcagctggtgccctctgcagccaaggcgctcagcccgcctggaggggcgcagtctcggctcagcgctgaccgctcggcccaccgaggcgcagctctgaaaatgcaccacagtggcgaagcggcgagtctggataacccgtctccgcccatgctcaggacccacccaatgtccccaggcgctgctctcactccgggagctgccccggcccgggtaggacagacgcgctcgctcgaagccagaggctcccccggctgaggtgcccaggccgctcctccagcccgggaagagcgtgtgcccctggggtctgcgccagacgcagctcaccccttgctccttcagtctcccgggcggagcccgccctcgggccggccagctctcggggccgagcggagctctgggcggcgctcctcctgctcattcccgcgcggctcggcgtccgggaggaaagccgcgggagggcaggtcagcgagcgccgggccgcgggaggcagctttgggcagataaaaagcctctgccgctcttggccctctggctcaggccgagggctgggctcctctgtagagccggtgctgggagacttcctccctacacctcggggtctcttcgggcctcgtgctatttatttgtgccaacatctttttaaattggtttttttctattcctctttagattctttttccttttaaaaattattggcatggatgctttttctcccctccagattatataaacattaaacacacacacgtacacacacacacacgttttcagtagcgattactgtgttgacaccacttccactctgtctccccagatcagcgcttctgacgagcccatttgcacggggactcggccctctcttttcctggcgaggcttttgaacctgtcgccaagccagtacctcagagagaaggaaatgcagagggacgagaaggatgcatggcgcctgcccccagttagatgttcttcagataatctgcaaccaagtgcgctgataaaatatttaataaagagccggtaaacatcactgcaaatacattaaggcatttcagcccgacagcttatgattatttcaaaacttaaaaaggagatcatagattgtcactgtttctgtactcaaccaagaaaccgaaccttcctgaggtgggtggattggtgggtgagttgctgcttttcgccccctctcctccccccttctgcttgtcgctgtggctctcagcagcagggatttatttatttatgtttgcagtttaaaaggtgggggtgggggcgccgaggacatgtaggatctgctcacaaagcaccagctcaggtgttgtgtgcttttgtattagctggaaaagacagactctggaacttttacagggcgagaagaggccaccggctcgcgctttgtatactttgcacttgaaatcgttacattcaactgaatatttggctcattcagatccgaaaagtctcctagcatcgtcgaattccctcctccgcccctccgctctaaaggggggaagggggggaaggtaggaaatgtttagtaaattccacatctttgaatcttcctaaagcagtggtcacagagcttaaaggtgacacaacagtgctcacgtaaaccaacacacattccccaccccccaagccaacaataaaatcatccccttcaatttgccatgatcgtcgctaccaggagccaggtgattatcctaattaatgtctatctaattaaattactgtcagcagctaaccaatggcaggagccgtttcatcggctgcacaagcagcaagatcaaaagtgagccttttctgattgctgcatagtgtcaattggccaatctcttctcccagggaaaaaaaaaagtaaatcaaacctttgagaagcatttgctggttg

SEQ ID NO: 24768 - DNA, 2300 bp, Homo sapien
aactttactgtagtggaaagatctccagactggcagaaatataaaatttacctgggagtatttttcaaaaagtatatcctcacctacttcttctcctcacccccaccaaggacatatcagaatctccaaggcaggtaatatgtagttgagaaaaagttgttcatgcaatttgtatttcctgttcccatctgtttctcttcactttctgaatttgaaaatcaatggagaagttgagctgtaaaattctatgattttgttagtaaaaattccactacctactgatggttttcttcctaggagttattagttttatacatatcttcttcattgggacttatttagtatgtggatgtattctgtcaggtcattggcattaattttcgtatattctattagataggtagcagattaaatgaggatcattttctccactttgttgtgctaggctagtatttgacatcttggatcagagaactttagatacataggctttcttgatctttagaagtagactgtctgctgttgcaaccctggctgagtcctattatattggcagaaatagtagctctgtcatatcgtaagcactcaagcaatggttgttccagaaaagtacctttgtagtttaataatatacattttaagaaaatattgataaaaagtaattttaaatacaattttacttttattttggcttttggaattaagggccagactttttcttagttatatttaaattaactttgaagaaatgtcagtggaacaacataggcttctcaatgggatagaaacaatctttctaaagtgaagttattatttttattataacaaattgtttgtgattgttgattatggtcatttgaatgagaaggtagcttttattcatcagtctgtggtagaaaatcaaattgaccccaatatcagtaaattcccagtcagatatcttgttatttaaacccttggtatcaactcagtatgctatgcagaaagtagccacttaaatatattaatcattagggttttaaaataaatgttttcttataaaaataataaaagcttgttgtaaagaattgtattgagaaggaaagcagataaaagttatcgataattctacctgcaatgagcattatggaaaattttggtgtattgcttaaaataatttaatattcattcctgcttattaaaggttttagaatctggtaaaattattcttatttaagacaaactatgttaataatttttagtcaccctcttttaatccctgaaagttctttattactcttcatttgtaacctccatacacttagtctggagttcagtgatatatgggcttcattacttaaaatactctagatctataatcagttttaggaaatatgtgtagtcacttgatgatcctcaccaactacttcttcctacaaaagagcatgtcttttcttctgtggattatttaaataatcccctacccctattttgttgagacttttaggcaaagggatatatgcttgggctattcttgtcagattcattgtcttttcaaagtgctttagtatcctgatcattcctactatcaaaatattttctttctgtcatttttgttgggaaatcatagaaaaacatatactttatttttaataatgtgtgacttacctaagtttttcacttttaaaatactgcaaatatctgtccaatccttactgagtcaacagtgacttaaatgcttgattttgttgtcgttggtggtgaatagttcagcctcactaagacatgctaatattaaagtcatcttatctgttttaaaagcccccaggtactcagagcggaacacctagtaaaccttatttacatcatcttgcttgaattatgtctcctatagggttctgagaatgaagcgagtacctcaaagtgtcaaaatcagactgatctggttggaggccaacttggactagtctatatgaaaagtgagcatcttaggtgagatttttaatgcccattagacttgtagcattgcttgctgtattttatactagtagccaggtgtgggcagtgatacagggcttgggggatctctcttaccggcccagggatccaaggcattcagtgcaaaacctggccagcagcccgagtgagtaggagccatgtgactctggtgagttggagtgtgcaattgcctcctgcttcagagctacctgatccgaatactaagcagagcgagtgccgggctgagtgtaagacactgaagacactgcagagcaaggtgcttattccagaggcgttacaaaacatggagattaaagaccagg

SEQ ID NO: 24769 - DNA, 2300 bp, Homo sapien
agagtgaagggcagcactgagccccctgtggcaccattccccgtagtccgtgttaaatggcctctcttcacagcatcagttcacagggtccagtaacaccattgactcatcttcctcagcagttggaagagggaggaggagagttagtttcagcctctggagttgggggtgagtgaggatactgatgtatcacaagcaactagtgggcaagggggaaaagatgactgagttcaaaagcaatgcctggattggaaataaaagatggaaaattgcattaattcataatcatgtggtaatgccccatcggactctgcattcttaatcttttacctctactgacagagaggctttgcttttcagctgctgtgaacaagctgaagaggccttatcctcttatctgcaagagtggaagtaatcacagggggccctaaaggcaaatgtttacctgtgtattttatcgtgaaagtgccaagggtccagacctcacctctcttgtcccactttatctccagtacctagaagggaggctggcacattgtaaccactcaaacatctgtggatgactggaataaatgggaggatgtaggaatgaatgaacgaatgaataatcctttagggaacaatagagagctgggggagggagaagccatacctgatcttttattcttctccaaaacccttgaaaagactatgagaggccgcatagagtagccattaagaccttgaactcttaatttaggatctacaacttcctagctgaatggcttggccaagttatttattctctgtgtacagtcttccttcctgtaaaacaaacacagtaaatgcttagagcagcacctgggaaaaagtcaagttccacataagtgttactgtcattatttttgtcatcttgatgagtgtgtaagcctgcaagacaatcgggaaattccctagggagggtgaatccagatactcagcttccaagggccattcaagagggaacaatcaccttttctctttgcctttcatactgctttagacccctcactgcttcctaacataactttcactggcaagagacggagtcctgggtttcagttccagttgcctgcggtgggctgtgtgagtttgccaaagtcccctgccctctctgggtctcggttccctcgcctgtccacgtgaggttggaggagctgaacgccgacgtcatttttagctaagagggagcagggtccccgagtcgccggcccagggtctgcgcatccgaggccgcgcgccctttcccctcccccacggctcctccgggccccgcactctgcgccccggctgccgcccagcgccctacaccgccctcagggggccctcgcgggctccccccggccgggatgccagtgccccgcgccacgcgcgcctgctcccgcgccgcctgccctgcagcctgcccgcggcgcctttatacccagcgggctcggcgctcactaatgtttaactcggggccgaaacttgccagcggcgagtgactccaccgcccggagcagcggtgcaggacgcgcgtctccgccgcccgcggtgacttctgcctgcgctccttctctgaacgctcacttccgaggagacgccgacgatgaaggtgagtgccgcgccacgtacgtccccggggcgagctgtggggacctcttcgccaaactccccaaatggcccaaaagctggcgaaaccggaccagggactccccttaggcggaagccccaaggccaccctctgacaggtgaagggacgtcccagagctctcgcttagctttcggaccctggcttctgctaggaccctggcgtcgagctttgaatgtcccggagagccactcacagaacgcacgcccgaacccgggcaggggtagagaaaccaacgctaatgtgctctgaaggcacaagttcaagggcacccgccttagagaactccaactggcgcactccagacgccacccccacccccagcccgcggtctccctcttctaacgcactcccacctgcaaatcctgctgcctctggagcagccccgaccctcctacggaaactggggccacacgcttccctctaattggacttgatctgctcggcttgcagacaccgtggaaggttcttctgggactgctgggtgctgctgcgcttgtcaccatcatcaccgtgcccgtggttctgctgaacaaaggcagtaagtttgaaacatttgaaaaagataggacagttggagctcaggtcaggctccgtcttaccacgctaagggaaacgagggattttgcgtggggttggaccagtgccccga

SEQ ID NO: 24770 - DNA, 2300 bp, Homo sapien
tataaagatttaggccaatcataagctaacagcagtttcaggtagaggtgcatgcctaatgttaattagtgtagattccatttactgcattcttttgatcactgaaataaaagctatataagattcaaaaaaattgattaactctgtaaagaccctatattcaaataatgtcacactctgaagtcctaaaggttgggattctaatatatcttttggagggacacaattcaatccataacatcaagtaactgcacaacctagctaccctaataaactgagtgttgcctaatctaccacatgataaaattgggcatttgcaggagcatgctattattaagcgaaaattgtatctatatgataaaggagataagcccaccaggtccacaaggcacaagaaactcagactagcagaaaacttagactctatgatgcctgctcccattgactcaatgtctctccctcagtgcacacctatagcttcacaaggagtttcctacaactaggcaacagatgagggaaaggagtcaatgttatgcaaagtaagctggcactagcaataagtagatggctgctgcatcagagtccctcccagggatgtcctgaaacacagcagaaagggaaatcttactgacaaacagaactttgagcagaacatctgcttttctattttgcaagaaaaaagagatggcccaatgtaagatctacactgactcatcagtggtggctaatgtgttggccagctgctaccttaaggatttggaaaaaacaagattgaaagactggtgacacagaggtcaaggtgggggaggcatgtgagagagtctcttgaaatgggcacagggtgtgaagatatttgcgtctcatggagtgccctccagagaacaaattgacctgtcccgtagatgtcagccagcctcctgccagcttccttggggcttgctgaatgtacaatgagtgccatggtgctggcatggagatgaagcacaggcttaactctccagacttccttcaccgaggctgatgtggcttaccaatgctgagtgagcaaaatgctgagagtgaagggcagcactgagccccctgtggcaccattccccgtagtccgtgttaaatggcctctcttcacagcatcagttcacagggtccagtaacaccattgactcatcttcctcagcagttggaagagggaggaggagagttagtttcagcctctggagttgggggtgagtgaggatactgatgtatcacaagcaactagtgggcaagggggaaaagatgactgagttcaaaagcaatgcctggattggaaataaaagatggaaaattgcattaattcataatcatgtggtaatgccccatcggactctgcattcttaatcttttacctctactgacagagaggctttgcttttcagctgctgtgaacaagctgaagaggccttatcctcttatctgcaagagtggaagtaatcacagggggccctaaaggcaaatgtttacctgtgtattttatcgtgaaagtgccaagggtccagacctcacctctcttgtcccactttatctccagtacctagaagggaggctggcacattgtaaccactcaaacatctgtggatgactggaataaatgggaggatgtaggaatgaatgaacgaatgaataatcctttagggaacaatagagagctgggggagggagaagccatacctgatcttttattcttctccaaaacccttgaaaagactatgagaggccgcatagagtagccattaagaccttgaactcttaatttaggatctacaacttcctagctgaatggcttggccaagttatttattctctgtgtacagtcttccttcctgtaaaacaaacacagtaaatgcttagagcagcacctgggaaaaagtcaagttccacataagtgttactgtcattatttttgtcatcttgatgagtgtgtaagcctgcaagacaatcgggaaattccctagggagggtgaatccagatactcagcttccaagggccattcaagagggaacaatcaccttttctctttgcctttcatactgctttagacccctcactgcttcctaacataactttcactggcaagagacggagtcctgggtttcagttccagttgcctgcggtgggctgtgtgagtttgccaaagtcccctgccctctctgggtctcggttccctcgcctgtccacgtgaggttggaggagctgaacgccgacgtcatttttagctaagagggagcagggtccccgagtcgccggcccagggtctgcgcat

SEQ ID NO: 24771 - DNA, 2300 bp, Homo sapien
aaatttccttataattaaaatgctaagaaaataactcactttctagtttgttatttcttgtttttctcagtttcattttccactggactgactgggtcaataaacattgagttggtatttgtacaaacacagtagagccaaatgtcataactggctgaaatttttcctttcttcagagagtcccacttctttgatgatctaggcaatgtgttacaggaaggtccagtgcagagcgaagtctcagcaattattaccatttcttgttgttcagacttcttgctgcaggagcctcagtgtttgcacaatcacactgcacaacttccagggagatttctgcacatctgacgcatcacctaaaataaagaacattctatgccactcaatatcaaagtctctttagatgttagctcaggccctgagatgcgctctgtcatgttggagagggcaccccttccactctgaacttgtaccatcttgccccaaccattgagaaatgtggcaaccataagcaaaccttagaactcccacaaacaattcccatcaacacaaatctcattccgagggaaaatttttgtagaaattacaaacaccaacttgagacttctataaaaacgacatgaaacacattggaaatggtaggcctacgtaggttactgccaaatttctaattcacaaagtggtgtgctcttctcagggttgttacggaggcctggccacttgctgtgtacaatgggagattcctggagaggctctttctcactttaactttttttctaactaatctaattctgatttcagctttcaacatttcagtacttagattattcactttaaacgggcaacccatgggctcttttctctgttctcccagaaactgtgggagctgagtggctttccataatatgcgctacttggtctcaccctgaagcagagaagactttgccttgtacaacttcaaaaggccctttgataagttatgtttggcttcttacttaaatatagagcaatccagcttattatcacttccagtttgtttttaaaataaattctttctttatcacaccctcaaatccatctaaagaatgtttaagttctgtttaaacaattaagaaaagccacccaaggtattagctgcaacaagggtgagacttgtggtgtgatgcaatgtcttacagtgtcccctctgctccagagtcttgtcccttagtcttaaaattcagaatattcagttatctggccacctatggggtcttactgcatgcatgagccagatcatgacaggctaattctgaatggtcaaacccagcaggctcctcggtgaaacaatgggccaacctgaatcatttgcaatgaatgaagaactagatcaaactccagagcaactgctgctaatagggatactctgtcatccacagaatatttattgttattaagcctcatattagcgttccttcatgtgtagtttgagaagtgctgatttagacaaaatggattgaaacaacattgttagtctccactttaaagattcagctgagtgtcagctgctccagggagccttgtctgaccctagagcagtttatctctatgacaccactattgtgcaatgcagtgctgtggttacatgtctctgttcccccactgcattgctttctcctgttctccttgaatacactaatcacaagtttggctttgaagagttcatgaatggatgcatgaatgaatgaatgaatgaatgaatgaatgaatgaatgaaagaaagagtgaatgcagtgtcagatgtgtaatattggaaaagcactggccacaatggtagctgtagaactccagaacttctcctgagtaatagttatagtattatcccttttgcaaggttgttgaggagtaaaacaatgagataatctgtattattttatttagcaaatgtataattgagtgtctacttggagcaaaatactgtaaaaatattccaaagtgctttaaaaatgatactgtttctctttattttataatagaatttggttggccaatttctctaactgtacatacactactaggcagggtggctttccattgttctctaacatcctgtttttagattttcttgctaggaattcacatttcctcataactcacttttattactactttgtaatactatagcagtatgaacggtcctgtagggagcctgaactgtgagtattttgataacctttctttatggtcatgcttggtttaatttggacatgattcaggaaaaagaaaagagaaaaaaaaaacagaaaaaacaacactgcagattt

SEQ ID NO: 24772 - DNA, 2300 bp, Homo sapien
cttatacatcctgagaatgcttacccttatggtactgggagccccaagaatcagtgtcagtgggctggagataaagtcacaggaaattttctgaaacaacttgggatagtcacttctagaataatggaagcaagtagagtggagggaaagaaaaatgtttggtagttaaatattgggagaggataattactgaaaggccagtgctatgttgaagattttatatatatgatctgcagatcttccttcttagggctgctccacaaacaagtagagtctgaaaaggaaagagagagacagagacagagagacagaaagaaacatctgctcaaatagacaaatagacaatgggaaaagtagaactgaatctgccaaaacgattaaaaatatagcgaatagttgtgtgaagattgtagccagagagaaagacaatgtaatcatacattaaatcaatccactctttcaagctattaccgtatttataagtattactctctagaccgacctaaggcttgacacctttctctgctctttcaccccctctgctggtagagtgccaagaagcaggtctcagatcaagacaccagcagtaccaatgaggagataaagtgaggcagatattttatgcagctgtgcttctcaaattttaatatgaacacagatttccttaggattttgttaaaatacagattctgataggcacgagattctgcatttctagcaagctcccagatgatgctggtccttagaccacactttgcaaagcaaggctttctagcacccaataatcaccagcacaaaaacccctcaatgatgtcttccagtctgacttgaaagtgatctctgtggccttcaagtagctctacattcaaacgttggtctcatgcacaaattgaacagttaagttcatttggaatatttctccagttgcctcaatgatttacctccatacaagtcatcagtgacatcatgcggttggttatattagaatattggaatctagttaggaaatgttgtgatgagtttgcaatatggaataaaatttttattttagaaaagacatttaccaacccctctcattttacaaataaggaggcagagacacaaagagaatgcgtgacttgaccaaggtcacacagctggtcaataacagcaaaactaaaatcaaattatgccaacactacttcttatgctgtctttccagattatttaccatttttctatttctctacagtgaccagaatcatttctgctaaatgtcacagatcattaaagcctgtgtgtccagtcacaaaactcaggaaacgtgaaaatatgcatctcatctcaacagttttcctcatatctcattcttttgtaacttagtaccccactctcttatcagtaaaattagattttaaatatatattagaaggaaaaaaataccagataatttcctgttagcatcagctatcttggatgtttaatcttcattttgctccatcctttctgcctgaattccatttattaaaacagaacacataggggtttaatcaatatccttaaattttccacaaacataacataaataaactccacgttgtgaggaagagaggatttttaatacatatgtgttgaatgaatgatcattatttagataaatgaatgactgaagtgattgttatattcaggtaaattcatcatggctaggtagcaaaccaaagacttgtaagaacctcaaatgaggacatgcacaaaacagggatggccatgggctacgtaatttcaaggtcttttgtcttcaacgtcaaaattcactttagagaacttaagtgattttcatgcgtgattgaaagtagaaggtggatttccaagctgctctctccattcccaaccaaaaaaaaaaaaaaaagatacaagagtgcataaaaagtttccaggtctctaaggtctctcacccaatataagcatagaatgcagatgagcaaagtgagtgggagagggaagtcatttgtaacaaaaactcattatttacagatgagaaatttatattgtcagcgtaatatctgtgaggctaaacagagctggagagtatataaaagcagtgcgccttggtgcagaagtacagagcttaggacacagagcacatcaaaagttcccaaagagggcttgctctctcttcacctgctctgttctacagcacactaccagaaggtaagatgattataaaattgtaaatcctgtttggcggacagtgaagtatttttaagggatcaaaatattataaattaaaatgttgttctttcatcttagactttattact

SEQ ID NO: 24773 - DNA, 2300 bp, Homo sapien
tcgcacccaacaaaattttttggagtcaattggtcaataagctccaaatcccacattactctccattatcgagttcaagaaatggggaataaacccttttatcttcccctttcattttctggctcacataaaacaaagcccactagccctggttttagtcccttgataaatattcactatgtgcccaccacagtgcctaagaagtatcagtttatggcagtggttgttaaccgggcgattttgctccttgggacatttgacaacgtctggaggcatttttaattgtcacgctgggggagtgctactggcatctagtgggtagaggccagggatgctgttaaacatcctgtgatacataggacagccccctataacaaagaattatccatcccaaactgtcaatagtgtcagagttgcaaaaccctgatatgcaatgaaaactcaacacaattattctgacaattgaagagcagcgagggttttgcttaaattattagaataacagcctcatttctgggcttcgctttgttaatataggcctagccaggtggtgttgaataagcattagttcatgatttaatcttagttcctttctctcccagtgactaattataagtaatttgaattgctatgtgtgatcaacgatgtaaaagtaggacaaatgcacctctaatgagactatattagactctgaacttacagtttccccgaaagaggttgccctaagtatagggatacagaggaaggggcatgggttgctgagacaagtgtcctgagtttgagtcccagctctgctgcttactgactccatagccactataagtttactctgagcctcagtttcctcattgtgaaatgcagcaataatttcctcaccaagacaccgtgaggattgcacaaagtaatagcaaagtcatatactcaacaaatatttattctattcctattgtgtgtcaggccatattttcagtgctgggctacattcattgacaggacagacaaaaatatctacccttatggagttgggaatggttggagagaaagacaataaacaagataaataagtaaaatatagagagtgttaaatgacgttaagcgctatggaaaaagacaaaacaagaaagaggaatggtgcaagttggtacaattttaaatcagaatggcaaagaaggctcatttgagatgacatttgactttgaagaggagaggaagtgaggcatgccagtgtctgtggaaagagcattccaggcagaaggtcacagcatttgcaaacgtcctgaggccagatcatgcttggagagttcaaagaacgtcaagagagccagtgagcaaggggaagagaaaggaaggggagaagtgaggtgggagaatggagacagattgtgtgagaccataaaggccattgcaataaccctgaccacataaatgttagctagttattattattgcctataggtaaaatgttccagtgtgcattatgcctcaaataagagtgtttcgtaaaccctccttcaaaatcctgtgcccttctaagaatgtttttaaagatatccctcatttaaacaaaatggcaaggcgtctaagtgcaaaggacaaaattccagaattctcatggccaatctgctctgtgggttcttttcttgcaacagccacccactctgcctgggagccccactcatggagggggggcaggaaaaagtcaactcgggttttcttttttccccctcttcatttctacaataggaatagcttttccaagctgcccgagaatttaaagtacaccttcttttgttgtgctgctgatacagtcgcttttgctcttacaaattcccagagaaaatttatattcattctgaaaacaggaaagctttatttaaatacaacactatcacccaatgactgaatagatacagattaataattcctaagatttttagcagaaatattcaaaaaccttttcatgatatacaaaggcttttattttaatgtcaagtctcactttatttccttctctggggcataggaaaggagaagcaggacccagtatttttacttgcagtaaacacactttgccaataaaaccataaatgataataatttttttctaaaggtctctggcttactctgctctcatttgaacttgaaattcagaaggaaggaaagccttcccatttcagcaggagttgctgcaaacctgctaatcaaaataagtcatttttttaaattataagtgaaagtttaaaccagacagagaattttcacttgcaataaggattttcaaacccaaatgtatcttctgt

SEQ ID NO: 24774 - DNA, 2300 bp, Homo sapien
tgacaaaagtattttcattttgattccaaaattaaaaaaagctaataaagatattacaatattttaaaaatccaaattttatgagagttcttgtctggatgaaaattagaatacattcacattatctcaaacgaatgaacatgtgtgactttataaaaacaatacctccctaaaccatgaattcagatggaaaaactcgacatctttatttctgcagtcagtctcatttttcttaaaacagttcaaactagtaagaattttccagaagttacagcttgactcacccaaccttccaaggaaaaaacaaaaaaacttaaacagacattgtttcactctcatcatttcccacccttactaatagtggcaacttaagtgtatcttaaagcactccaacctcttcatagagcctattaaatgagtatcttgtggacacccacacacagtcatagaatcctaagtggtgctcagaccagtcacatgtcagtgcattcttaattgctagagctaacatgctctcagcatggtcttttaattacaccctaataatttattatagtttctctctacaatgtaaagtcttggaaatcacccactaaaaagtgcctgtgtactctggggctttggcaggctagggcagaacttctgagaacacggtgtgttccagagaagacaatcaatctgagaggacttacacagaaacagttcattcaggacctggctgctggcttttatctgagatctgaggatttcacaatcacttggagatacctacaagtgtatagcacaccttggatattactcttaatgattacttcattttgtaaagaggtgactccaccaacagcaaaggagagggcccagccccagccaccaggaatacagttctctgccagtaagtgcctaatgactcattttcctcaacagaattttcataaggctggaattcagggagggatgtctggagaatgtctgaaaggaagttcacaagccactgtcctgctctttgctggagaaagtgtcccgtggtagccagagaagttgactaaggcaaacagcaacatgttttggtaacatttccccattacctttcatgtacaatccaagaaaggttgccatgaagtgttttaatcaggttgggaacattataaacttcgaaaaaagaaaaccattagtggaaaaattaaggacacagtagatttaacaactgtgtttacgtggaaccacaaaatctatccaagtgaattgcattaaaacagacagaacactccaagaaactgttgtatgtgtattttttttaattcagtcaaccattttactaatctgtcaagatgaccaatttctttggaattatgtagatttagccaaaatgaaattatacataagatttacttttcttttcagatgcttttttatttatttttaaatctttataattactagatgttctcctctctcagaagatattctgagaggaaagcaaaaataccactcttgtaaagccatttccattcttccaaaggtctgctggtaaattattcttactgatctttccatctttctagcctgtgcatacacacctaacccatactaaatttcaccagatggcattttatttctttaaagtaaagcagccgtgggtttagacagttgaatttttaaacttctgtatttactgaaagtgcatatggtgctatatggacaaagaaattgtgctgaaagaaaaacatttctgtctgcaatacctcataatcttccagaggaaaaaaaagtgcagttatatggcacatttctcacaaaatcttatgtggcttcaatgttcttcctctgttaaaaagtagatatatgtttaatgtacagacctgcaagtttcattattttaaattcatcttttagtggcaaataaaaatgttatgcaaaacccaatgacttgctaaagtgatccttcagtgaattctagaagaaaatgcaacataaacctgaactggtaaaaaagaaaaaataaaaacctctgtatgtcaacgtaagcagatgttggtgtagttacaaggatgagaaggctataaaacttcccttgagtcactcacagttcatttgagggccaagaacgcccccaaaatctgtttctaattttacagaaatcttttgaaacttggcacggtattcaaaagtccgtggaaagaaaaaaaccttgtcctggcttcagcttccaactacaaagacagacttggtccttttcaacggttttcacagatccagtgacccacgctctgaagacagaattagctaactttcaaaaacat

SEQ ID NO: 24775 - DNA, 2300 bp, Homo sapien
tacactgctgggcttccattgcataaatcttcctaggatatgaccttcaagatggccttatattttttctcctaatccagaaggtattttgagtgactagtaatgtgtagcattgaggtgtcaacccagctaccttcagcagatgttataacatacagaatcagctgagaaggacccgaagtttccacttcttttgccaggtctactttcgggtttgttctttctcagccaccacagctattccagcagctcatttcttcacttcacatctgttctcctagtcaatgccctaactcctcacttgtggttccctgattcttccggtcctgtgggcctgttgcttctggtctaatccaaaacaaacaacaggaataaatcacttcaacagtacaacttgtagggatcctgtaaactgttatactacatgtaaaatactctgcttgatgtttgcagccctttataacctggcactgctctacaaatttaaaaatgtatttcttattcaaccttagcttcagtttatcttttcactgactcatggcttactagattcaaattccttcaaattccccttttttgagtcgtcagttgcttcttctcttaactgtcactttgtgtgtgtttctaggtgagcattattacattgtgttgtaataatttgtcttgctttgtttagtcttggtctgtatgatcagctagacagagttcctcagagttgtcaaccatatgttaaatatctttgtgtcccagacataaatgcccacacctaacaagggtataatcagtgcttattgacagatgaatgaaaggagtgatgggaacgttgttatgcctgattcactgataatgtaaacacctcttttcatgctggatgccaaacaggcctttgatcaacactcttttggcttcgactaactttctctcttttaaaaaatcttcacatttttttaaggtactgctagttgaacagctcttccgcaaggagttccaaccatttttgaagaaatggtatcgtgttattggattaagtggtgatacccaactgaaaatatcatttccagaagttgtcaagtcctgtgatattattatcagtacagctcaaatccttgaaaactccctcttaaacttggaaaatggagaagatgctggtgttcaattgtcaggtcagtttaagtgtttatttttttaaaaaaattaatagtaatattgatgataacaaaggctgtatttgttaattttttaaatgttcgtggcttaaattgtcttttattgcttatggttttattaaaatccttctacttcctggaggaaacaaaaaaagtaagtttttaattagaccactttattctgcataagaataccattattaaggcaagcactcgctggactttccatttattctgacaagttcctttatttgctattgaatgttgttagatctgcttccctttcccatagaataaaaatacaaatcttgtcttttatggggtataggatgagaaggtaggagaaagaatggaaaaaaataaaaataatttataataactaaatgcaatgttaaaacaaggcaaaattttccctctttaaatagtgtgtttttcacttgatgtaataaaaataaaattcaccaacctaaaattaaatattttattaaagaacaaaagtaaaatcctgagatttgttttgtaataagccagggtgtgaattccacatctaacgctttttagctctgtaaactttctgaatcttatctattaaagaaggagaatgtctaacagggagtttcatgattagtatatacgaacgtctgtgtgtacaggtgctagtatagttagatttccctcctaaaaactgaaagtggactgctcttgtgtcgtgcccaagagaaggcatccccaaggcagctcaattactggtctaaagctattttctcactgtagtgtgctgatatggagaaatgaactctttgaattttcttttaagacttttccctcattatcattgatgaatgtcatcacaccaacaaagaagcagtgtataataacatcatgaggcattatttgatgcagaagttgaaaaacaatagactcaagaaagaaaacaaaccagtgattccccttcctcagatactgggactaacagcttcacctggtgttggaggggccacgaagcaagccaaagctgaagaacacattttaaaagtaagtcataattttatgtataaccaatgaaagcaaagctaaaacaaatgccaggacttcttggtcttattaaataagattgagttcaagtgctgtgat

SEQ ID NO: 24776 - DNA, 2300 bp, Homo sapien
tacctgcaagcccaaggtttcatttacttcaactttcagtgtatttaacattatgccagctgctatggtcaactcaaatacaactcccaggagagatgtcatcaagagcccaccagttgtgagtagtgtactagttactatgtaaatatatcccttcttcaagcagcttacaatccttcaggggtagaaaaagccttgctacataagataattagagaataaaataagacatgttaccataaagtgctcatttggatattttgtatgcccctagtaaacactcaccaagactctgtacttctattatcctgttcaaagcactatcaggttttcctggcctacacagactttattgaatgtactttgctaacagattatttttcctaaatatgtctctttgataacctaaatgatctctccatcctttatataattctggaccatgagattctagttatggtgcgtatgtgcctaccacccacagtcacatgtggctacagaatgccttcagaatgagtagtaaccttaaggactcacatttatgtggcttctgtaccaaaatgaagctgccatttttcagtgtgaatatgttttttttctctcatgacatagacaaatgttgatgtttactacaagttggtacattagttgctaattaagttcctagctgctccagccaaaacttgctgtattgaatccaagaaaagaatggcagctatatcaaaaataagttgttgggggatttttttgttttgttttattaaaggaaagttgtatattaaagaatatagggaacttacaagctgggatctaggaaactttaagtcttggcttccttctaagctgagttggtggttcaagtccatccacatctgttaccaggtcctggtcaaagctgcataaataccagcaatctaaatatgaggcagtaaagttaactgtttattgttactcactttttcgaacccacctccaaattcccagggaaacaagttagtgtttgggaacccacaggaggtcaggtttattttaggaaggacttcctcctgtcttctccacatctctgcaaagatgtcttctgagcttcatctctcacctgtccctcgcagtctcaccaccctcagccaggcctgcctacattcaccagccgagggtaactccctgttcacgtccgggtctgtggcagtttctgttcacttcccctttggaaagtcccaaatcacatgcttttatgccctgcacattttggcctacaaaggaccttattgttaaggcagaacctgctgggaaaacaaaatatccgccggaggagctttgctagagcgttggtcttggtgtcagagagaattcgctttccttttctgtttcccgcggtgtccttaaccaaaggcctcctctcttcacccgccccgaccaaaaggtggcgtctccctgaggaaactccctccccgccaggcagattacgtttacaaagtcctgagaagagaatcgaaacagaaaccaaagtcaggcaaactctgtaagaactgcctgacagaaagctggactcaaagctcctacccgagtgtgcagcaggatcgccccggtccgggaccccaggcgcacaccgcagagtccaaagtgccgcgcctgccggccgcacctgcctgccgcggccccgcgcgccgccccgctgcccacctgcccgcctgcccacctgcccaggtgcgagtgcagccccgcgcgccggcctgagagccctgtggacaacctcgtcattgtcaggcacagagcggtagaccctgcttctctaagtgggcagcggacagcggcacgcacatttcacctgtcccgcagacaacagcaccatctgcttgggagaaccctctcccttctctgagaaagaaagatgtcgaatgggtattccacagacgagaatttccgctatctcatctcgtgcttcagggccagggtgaaaatgtacatccaggtggagcctgtgctggactacctgacctttctgcctgcagaggtgaaggagcagattcagaggacagtcgccacctccgggaacatgcaggcagttgaactgctgctgagcaccttggagaagggagtctggcaccttggttggactcgggaattcgtggaggccctccggagaaccggcagccctctggccgcccgctacatgaaccctgagctcacggacttgccctctccatcgtttgagaacgctcatgatgaatatctccaactgctgaacctccttcagcccactctggtggacaagcttctagttagagacgtcttggataagt

SEQ ID NO: 24777 - DNA, 2300 bp, Homo sapien
actccataaaagtaggagctttgttaattttattaactgcacctagatcagtgctggtcatgtaatagatacttaataaacatattttaaatgactagatgatacaatgaatgatataatttgaatgccaaatatttaaatatctttggtttaaatgtttattatttgagaacaggtcaaataccaaacatttgatcctttctcttccagagcaacaattaagtggtatgaagaaaataacattaactggttccccatattcagtcagcaaccccttctcattcccccatgtttgaaaccaagaaacagaaggataagtgccaggaaaaagaatgttttttggtttgttagtttgtgctttaacatgttgaataaaacccactggcagctgggggataggagtatgtttttgcaacagccttaaaagatattttcatagacccaatacttaaaattaataatttgagtgcttttgtagaaacatctaattggattatcctctatctgggtacaaggtcatctcccaaaattaagtgaaaaaggagtagggttctgtgaagaaacagaaaagaacagtataaatcaggcctacctgcaagcccaaggtttcatttacttcaactttcagtgtatttaacattatgccagctgctatggtcaactcaaatacaactcccaggagagatgtcatcaagagcccaccagttgtgagtagtgtactagttactatgtaaatatatcccttcttcaagcagcttacaatccttcaggggtagaaaaagccttgctacataagataattagagaataaaataagacatgttaccataaagtgctcatttggatattttgtatgcccctagtaaacactcaccaagactctgtacttctattatcctgttcaaagcactatcaggttttcctggcctacacagactttattgaatgtactttgctaacagattatttttcctaaatatgtctctttgataacctaaatgatctctccatcctttatataattctggaccatgagattctagttatggtgcgtatgtgcctaccacccacagtcacatgtggctacagaatgccttcagaatgagtagtaaccttaaggactcacatttatgtggcttctgtaccaaaatgaagctgccatttttcagtgtgaatatgttttttttctctcatgacatagacaaatgttgatgtttactacaagttggtacattagttgctaattaagttcctagctgctccagccaaaacttgctgtattgaatccaagaaaagaatggcagctatatcaaaaataagttgttgggggatttttttgttttgttttattaaaggaaagttgtatattaaagaatatagggaacttacaagctgggatctaggaaactttaagtcttggcttccttctaagctgagttggtggttcaagtccatccacatctgttaccaggtcctggtcaaagctgcataaataccagcaatctaaatatgaggcagtaaagttaactgtttattgttactcactttttcgaacccacctccaaattcccagggaaacaagttagtgtttgggaacccacaggaggtcaggtttattttaggaaggacttcctcctgtcttctccacatctctgcaaagatgtcttctgagcttcatctctcacctgtccctcgcagtctcaccaccctcagccaggcctgcctacattcaccagccgagggtaactccctgttcacgtccgggtctgtggcagtttctgttcacttcccctttggaaagtcccaaatcacatgcttttatgccctgcacattttggcctacaaaggaccttattgttaaggcagaacctgctgggaaaacaaaatatccgccggaggagctttgctagagcgttggtcttggtgtcagagagaattcgctttccttttctgtttcccgcggtgtccttaaccaaaggcctcctctcttcacccgccccgaccaaaaggtggcgtctccctgaggaaactccctccccgccaggcagattacgtttacaaagtcctgagaagagaatcgaaacagaaaccaaagtcaggcaaactctgtaagaactgcctgacagaaagctggactcaaagctcctacccgagtgtgcagcaggatcgccccggtccgggaccccaggcgcacaccgcagagtccaaagtgccgcgcctgccggccgcacctgcctgccgcggccccgcgcgccgccccgctgcccacctgcccgcctgcccacctgcccaggtgcgag

SEQ ID NO: 24778 - DNA, 2300 bp, Homo sapien
tagacatgacattttcataaaatgctattgttcatacagtattaacttgactcatggaggcaaattaacattactgttatttaaaaaaaactctatggccttatttgaatttttatactagaatatttaaaatttgaaacactagttttagagagagagatgctgtgttgttcaaagtcctcctctgcatcttcatggtaggaactttctttggtagccctttctctaagttaagagatatattggcaggaactatgaaggatctgatattttaccctagttataagcaaacaagtagagtgccacagtttcatggaagttggcagaatgtgtgagattcctgagtctgagacaaataactttattactcaaagcacaacaggcaccatgagcttcatacttccatagattcccctcgttctgaagtcccacaaggcgaagaggagctgccagatgggtgttgtacatgcactgtgtttgttatgcaactggaagaactccaagcttaggaaagtcctaagaaggctgctagcaaacgtacccaaactttgccctggcaggaaatactatctttgcaattaaatgtgcagaaaggcaagaaacccatggggccttaactcccaactgcacaaatgcagctgcatcaataaggctattttgatgaaaacaagatgcacaaaaattttgaccacagaatcagactaacattgtaaatgtaaacactcaatccttcctaagcagttctttgaatatgtagttaatccgttggaataaaattttgcaatggtttgttctttctagcgctttatcatttgataccttcataagccatgcatttttcccttttgccacgtaggttttacccttcccctctatttatttatgccaataatttaaccttagtggcttaagtatttcttacagcattgaaggaacttacagacactttcccaagagtagctaggacatcggcaatcttcctttctctctgctgtttcctctgagaattgtttcacaaggtccaacatcctcttctgtagcatagctgaacaacagatactcagctctgcaaggctgatttcctttgtgaatagttaacatttttttgatagccttatttttaagaaacatgttagcccttctcttgttcttcagagataactcaaaataatatcatttggttttttcatttgttcataagccaaagctacagctgccttgtccttttaaagtcagagctacaaaattcatttgagttccagagataaatcagacttgtccattgctattacttaataagccaaagtaattgaacatttaacaagagtttgcccaaaggctgagtcagattatatacaggacaccgtctatattatcagtgtataaacagcaaataagtttttagtgtatgttcacgtcctgtgcaatatttgggacatacttacactaaaaaagtttatttggaaatcaactttaactagatatcctgtttatttgccaacatgccacaattcaggtcaccatttatctaccaaacagaatcaataacctgttcgtccaatgtggcctcaagtgggttttggcgcagaagcactcctcctggaccacaggtgtggtcctggttgcaaagttttgatgtgacatcaacactacacaaaagtaaatgtaactgcaaaattttgaaattcacagatgggtctttgaagtccagctcaaaagcgtggagggctggttaaaataagtcacagacttgccggtttggggtttctagaaagaaaagtaacttgaggagttgaaggcttgtagaagacctttccacagagagtgggaattccgttgcagcagccaaggcttcttcgggatttagaaggagagcgcgcgagaacctgagggagccagtaagagtcgagcagggactggagggctcccgatggggtgtagccaatcagggcagagatgggtggggctaggctgcgggaaggggcggactgcagctgagttggctccaaagtgtgggactcagccaatcggaaccgtgcagggcggggctggcctgcggaagggggcgggttcggaggagtgaactgtgcggttagtgcgcctttcagcctcacctgcagctgcgcctccttgcacctgcgcctgtgctttttctcccagcactgcggacgcgactcgagggtgacgctcgctccgctcgtcccgctcgtcatggcctacccgggatacggaggaggggtgagtcccagccgcttggtcgtgtccctcttcctcgcggggtgtggcgcccccgggggcgg

SEQ ID NO: 24779 - DNA, 2300 bp, Homo sapien
cgcacactagcgtgtctcagagtggtaggatttcagtgacagtaataagaaaaaggttgttgtgtgtttgggaagatgttactttctgaaaatttaaatacctctattgaaatagagacaaaataaaggaaaagatgtgacatgactacacaagaagcatagcttcaaacaaagggaggtattaaattacaaagattaagtaaaagaaaaggagggaaatacacagtagaaaatatggattataaaaaggcattatgatacattgggctccatacattctgaaaacttagagacttcttttatatagaattaagtggtggatcatttctcagtacaaatacctagtttcagagccaggaactctacacaagaaaagtgagcagctttctctcagaagacctaatttttcataaacttattctctgtagaagacctggaactagccacaattagatgacttatgtcccctgaaatgaagcaaatacagaagaaagtgttattttgataaatcttactatcaaattttgataagtactgaataaatgagccaattaattgctacataatagatataaacacaaaataaaagatgaaattgaacactttctcactgaagtcttctgtaaaaagtttgcagtctaaaaaatggaaataatacggagtgaaagagaaaattgtgcattccctaccaagcataaggggccacatttaaaggagccaatagtaatggaaaagtgtgttctcttcttttcagctgtaatacttgatgatgtagaatatatgtgaaaaatggaggagaaacaaattatgcattcttgtttacgtgattaatgcccgagtttactgtcatcgagtataagaggttttcacttttactgttttaaataaattatttttgtttcattttaaattattgaaaactatatttgaatttcatatgtcttctatagcatgaatctagtatcatactctgattcacacacagatacatgcacacttttgaattctctaaacatttcttgaagggattgggggaacctaaattaaacaaaaattggtacttaaattggattcccttcttttacattccatgtcaccgcattcccttgagtctttccacctctgtaacagctatttcagtaccatttgttgttcctcttactctactcttaaaagctgtttgtttctcccctgggagctgcttttaatattcattccttcctagtcatctctatatacgctgcttaggcaaactcattgtttacttacagcgtaaagaccctctcaaaaatcagtatctccagctcatatctttctttaggcttacttacaacctcatatatcccactagacatctcctttagaagattttagtatttctgggcgatttagcatttcaagctaagaactgcctttccatcttcagctaccatccatttcatcccaccaaaaactcttccttttcatacattatgaatagtcattatccaaagctcccaagccagaacctcggcatgatactaaacttctccttctctctaatcctctattctcccaaccaaaggctagccaagtctatgaaacacatctcttaactatctctctcatatagcccactataattgtcctattcagaccctcaacacatctttcttggactgatataatagtctcacaattagtattcctgctttaagcttcttttcttcaggattacatgttatattgccgtacatcacatcataatagtccactgtctatatcttttacaatggtcctctattgcctaaaatataagactccaaagccctatgcatggataatacaatccgcctatcatgatatagcttctgatacttcttcagcctaatttcccatcacatcccatattttagtgcgggttccttgaagctaccattcactttattccacctaatttgtatcatgtggtgtcccctctactaaaatgcttttcttcttctagcatacctattccaaaggactcttcatctgtggagcattcttaactcacccacatgggtcctgtgagatcataatacctcatacctttctctactaccacgttggtcacatctgtttgcttagtaaacaagtaacatgaatgaagaaggccaggagtaaaaatatagagagaagtgaagactggaaaactggagaacatctttatcttatttgaagtggcccataacccttcagctctacttcatggcagggacattttattttcttccatatagacctaatattttgcaaatagtaagtatctaatacatgttcgt

SEQ ID NO: 24780 - DNA, 2300 bp, Homo sapien
ccttccaaagatgttctaagcacattacacacacacacacacacacacacacacacacacacacacataaacacacatcatttttatttctacacaaagagtagaatgctctgtacattgttcttttctggctttaaaaaaatttaacaatttatctttgagattattccatataagtttataaagagtttatgaagagcatcctttctctctgtctcaatctctcactcataatggcagcatattttcccataatatgaatgtaaaataatttatttaacccatatcatattcatgggcataaatggtatttctaatattttgctgcaatgaataaccatgtacatactcttgtcattcctagtatgtttaattgtacatgtaggacacctttctagaagtgaatttactcagttaaagagtatggcacatttaaaaaaataaaaaaataagcagtatatacatttgaaaattttaaagttatatcggaatttcccttcatagaaattttaccaatttacatttccacaaacaataaatgaaagcttggtcctcacatccttatcaacaccaaatataatcacacatatttttcctgaacttgagaggtggaaagaggtttttcagtgctctcatcatctttctcccatagttttactgctattggagtttcattgtttatatttaactcatctatttggaattaattatgatgtaaattttaaagtatacatccgttttttcccccagattctgctaaaatggtacccacatcattaataattaactcaccttttccccacagatacagaaggctgtttttattatatactataactgcataaataagtgggccgttttctcagttttatcatatcccactgacctgtatattcatgggtgaatacttcatagtctttttaatgaaagtattaaaacacttttaataaccaataggacaattacccatgtcttagtttttaattcaggattttaaattaatatgaacaaattttaccagggttagccccagttagaaagcatcattcaagttattgttgaatcacaaggctatttataaagtcctatgctgtaaattgaaaaactcaaatagtatcctacaacattttaatctgcctgtgatgcttttgaaattaaacaatttcatcacaagcaaagaaaatatttaagagaaatatgaaataaattgatttgtgttagcaagatagtcagccatgttttgggttagcagagtagttagtagatagtatctacaacaaaatatgtcccacgttttaaattactgacttaaaacaaatttaagttcctaaatgattgacttaaagactaatttggcagtacaagcaattagtaaattgaaggctgactatcaaaggacataaaaaagtaagtgaaagatgttattgattaatcaaaacacaactttggagaaaggcctcaaattgtaatcgttttggacagattttctgaagctgggtttttttttataaattgtgcctttatgttttaccacatggagggaaaaaacccaacagcatcgatcatctagcatcatccatttacctctgaagtcaaaagtgccctatcttccatccaattcaacaccaactctggaatcagcaaaatccacagacttaattaagcaatgccacatttggatcatgaacatggatataggatagagaaaaactgacaacggagaggtaaaagagatatcattacttcatcaagtcatgaatgagagaggccagtaggatttttttaaaggaggatgaaggaaggtttgggaaacaaggaacaaagagcttcataagtgttgtcaggttctgcagccttttcataggatttagccaggagcaagtcttccagctcttggaaagtgtgaatgcaggctgtagtgtttactctggttccccatgtcgaatcgccaagtatcatttctgtccaagggcagtctgtgctggcgcaggaaaggaaaggaaggaggggtgaagaggagaggttggctagtgttaaagggagagcttttccacagggttctatggttgctatagtaacagcttcttttgtttgtacatattcagaacagctgcttctttttggttgctggtggcagggatattatggaggtaacagaggcaaagaagcaccactctgacatggaaaataatttccgttgtcagattattcttgtttaacttggtttaactttatagtagggttaaatgtggcatttgaaggttggtgagtaacaacatcttttaaaacatggtgaattc

SEQ ID NO: 24781 - DNA, 2300 bp, Homo sapien
tatattaaagtcaaacatgatctacacaccaccatcacagtattagaatattctgaatttgattatgttcttatttactgtgagtttaatattttcatgttgttagtttgcttttgttttaacttgaagaagtcactttagcatttttataaggcaactatagtgattaactccctcagtctttgtttgggaaagtatctctcatttttgaggaaacctttgctaggtacagtattctcagttgacagttttggatttttttttttttttttttttttttaaccagtacctgactatatcatcccatcatcttctggcatcaaggtttctgctgagaaatcttctgatagtcttattgtggtttccttgtatgttataggttgcttttctattgctaatttataatcctctgtttgtctttgacttttgagaatttgactgtaatatgtctcagtgacgatctctttatgtttgatctatttggggtaatttacattttatgaatgtagatattcatctccttctccatatttagagttttctgtcattatttcttttaagaatccctctgcctatttcttttttttagtttgtttcttcttggacttaaataatacataattggttcacttgatggtctcccatagccctgcaggctttcttccctctttttctttatttctttttatttttgtttctccaattaggtcatttcaaatgacctgtctttgagtttgctaattctttcttctgctttatcaagtctcctactgaagctctttaaagaattttaaatcttatctattgtgttcttcagctccagaatttttgattggttcttttatatggttcctgtctctttgttgaacttttaattttgttttttattgttctcctgatttttatttcaggtagtggtgttctcttgtagcttattgaacttcttcaaaatgattacagatggttctcaacttatgatggggttatgtcctggtaaaactatcataagtcaaaactgcatttaatatctcaatcaattgtaaagtaaaaaagtcataagtcaaccatcataaatcagagactgtttgtatttttaattattgccacacagttcatggattttcatttctttaggataggctatggatgctttatttttttttctttgttggtgtcatgattccatgattataagcaatccttttggtctccccttggtatcttatcatttgaagaattagggtcctcctctactctttacatattgtatttggcaaagaaagcacttcaccagtcagcctttccaaagagtctaggtagataggctgaagtatctgcagataaccttgctgctggagtccttaggtggctggcctggtgccaaggtcagcaagcacgtgggcctggagccttggttcactggagtaggcctggaactagggtcattgtgggtggtcctggagcctgtgagtctgtgggtctgtggatgccagcctgacaccagggtctactgagatggacctggaaactgagtatatagcatctgaactgatgttatctgggccttgagtctgagtcagtgggggccgggctggtcctgggccaggcctgctgccttgatccatgggaaagacttgatcatgagtctgtggaactagccaggcactgcagtctactgcggtagtgctggcacctgaatacagagggatgggcctgatgtctgtgattatgtgtgtggacctgggtccaagatccatgagtagcagcctcaagcctgaattcgtggatgccagcctggtgctcagggccacagaggctggcctggcaccgggttggtcctggatcctggggctataggagccagcctagagcctggagccactgagtctggtgttgcactggagtgggcctagagcctgggttcatggtgccagcctagaacctgggtctgcaggagccagcttgacactaaggtgagtctggagcctgagtctggggagtgagcttgagttctgggtctgtgggcactgacctgggatctgaatccatggaggatatcctacacatggatcctaaatccacatgtgccagcctggagactgggactgcccaggccagcttgaaactagggcaggcctactgcttgggtctgcagggcctagcctggcaccagggttaactggagaaggcctgatactggggttcactatgaactcattgctcgatccattcttctccccacatgctaaaggtatcattctccatgttgtgctgcatggttttcggggaaggttgatgca

SEQ ID NO: 24782 - DNA, 2300 bp, Homo sapien
gattcagaaccatggatagctccacacgttcagcacctgggagagaaactcttgtcgtctcccaagcacagctgcagctagcgaacagtatgacagaatgatctacttatatattttttcagaagaaaataaaaccatacactagcgatgtatggctttttatattcccacagaggcaaccgtaaagactcagggaagctcaagctactagaagagcctagaggttttcattggctgcttacttttaaagtaaaccttattagccataaaattcaacattcctaggaacgtcttccgtttgattcattttcattactctgatattaaagaggaagaattacttcggttcttgattttgtttagatttggggggttgtggttttggaacataaaagttgttatgcttacttcctggttattgcaacccacctgattcaccttcctaaactaaccctgcttctcagcccttctcagttctactctcattatttcacttcagatttgaagctgtaactgagaaaataagaacccagctgactcaaggcacaggcatagcaggctaatgagctgcaagaacccccccaaattctatcatgcaactgcatgtgttgacaggaatctctggacctttatctccagcaggaaatgagagattcatctgtgttctgcttgagtagattgaaatcttagcaaattccatttagagaaaggggcgtggagaggggctattaggttcaagggggtgggtggggggaagataacaaaaatgaagggaaaagaaccaagaaaaactagaaaaacagcttcaaaaacacgctttcctggcacagcttgtcacatttattttcctaagtctccaggaggactatttgaacagaagtgtctgtataccctgagattcccacgctggcagcctttgagaagcgagaaggaagaggactctattccgccccttgaacccttttctatcctatatgagatggctccttagagatggtggaggagagcagaatgtggctagtgtgttccggagatgagtggcatcggaggtcacagccaaggctggtaactcttagccccacccaccttttgttccttccccctggcgctcagcctcacctatttcaaactctttccttcttttgtactagtcgctcgcaatctttggccttctcatctttggccgtctcatcttcctcgcagcctacggcacctggagaccaaatcaacccccaatcttgcaaccctccagggactcaggcagaaactgggcatgctcagcggcacgggcagctttcagtctttcccgaggcgcggctcagcgctgggcagggacctgcgtgccaattcagttcgggcttcggcacccacctccgctgaacccagggatccgagctgcaccctgaggctaaatctgcacccttaggtggttcattgtcaatcttcaacctgctgagcgccaacagagcttacaaatattcctcattaagaaactgttttcccacctgtgttttccttgcagctaagggtgctttagctactgcggcgtgaggagctcagggacggagccctgtggccggtggccgtagagatcaccttcccagagtagctgtttgtcactgagttttggagatttcttggctggcttccgctaaagcacgcttgagtaatccgagctgtggcggcgcccaagctaccaagataaagagagcgtgtgtgtgtgtgtgtgtgtgtgtgtgtgtgtgtgtgtgtgtgtgtgtgtgtgtgttagggggagagggcggggatagaaacgtcaaccccgccgacccccagcctccttttctctctctccttccagcaaaaccggcacaagtcttccatcccccctcagccattccttactgctctgggcaaccgccaggttaagcccatttgcactgggaaattggcgctgtttgggagaagagaaacagatcgattgcccttgtgactccccgcccccttcccaccccacccccacagctccctccctctttccctcccccgccacctcccctcaccccgcctccttcccgttccccacccccaaaccctctcacccgcggcagtccggtgcgaggccccctccggaaggtgaggggaatggattggactccggtggggaaagcgggtgtctagaagtggtgctaatgggaagagaattctggtttcaaaagaggatgctctgccacaaagagcggctcgcgcgctggcctgggctctagccgaggagagatcccgggagaactccagagctccgggggagcgctcctcggaag

SEQ ID NO: 24783 - DNA, 2300 bp, Homo sapien
gaggtttcagtgttctctgttacatcagaataaagttcttctgttttatttcgaagactccttttttaaaaaattcacagaaaggtcaaatccattccaaatagaaatctcattgcttagaaatatttcttaggatctcgaatcactctttttttgtcttttaaattctgtcatctgcctagatttaactgaaataatttttatttctcagtgtgttagctaaaggcatccattcaaaggtaagaacatcataaaaggtgaatggaattaatttcaaagtatatatttggcatttttaaagagctgcatttcagcatctggagagctgcaatttaggctatcaaatctacaacagagaagctgggggaaatgtgaacacccttatgaggagggtcagtcctcagcaagtgcattttcggttccaaccttcaaaggtaacattttcagcttgatgggctcctggtggaatatataatttgcctctttcattcttagcttcgttgaaatatagaagactggatgtctaccaggccaaagtataaactcaccatttatctattaaagtcatatttaatgaaaacgaagagaaattatgacccaattcactctctttctcattacaattcctaaagaactttgccgggcacattatctcgtagacatcatgatcaaatgttattgtttgctttattatctcagttggatggttggctagtctagaatgaaataggttgaaggcaatactctcagcctagaagtctgaatgaggttcccattcaaatgatcctgattgtttgcgggtggggcggggtgattagtaaaccaactgagcttacactgcatagtaagcgtctggatgccgcacatttacatctaacaagagaccccagaaaacgtgtgtgtgtttcttaaaccttatgttccgaacaaaaggctatctcagcaacagacaatcagcactgcattgctccctgggatgcgagcaacacactcaactgcacatttcattcttcctcggctcccagcaccacaaagcccctactctcttcccactcctgggtccccagattactccatagaggggggttgggaaggcagaagcctaacgtctatgcctgcgcaccagccgccgacaccagggccccccgggcgctgctttctccagcccgagccgcctgggggaggtagggaggggagccagggagcgcgagaggggaccgcacacctagacacttaggattttatttattcacagggaggcgggggaggggaactgggcgaacgcgaattttctccccgaagttgcctcttctaagcagatcaagtcgttttctggctggtgctgggggccccggggagggtgccggtgaggtccaggctctcgagaccagatcccgtcccgtgcgcagagggggtggggaagggcggacgggccgcagctgtcgagagggccgggaaccggcagggaagagcccgcgggccggggagcagcgcggctctgtcccgggccctccaacgcaggccggggagcgcaggggccggctggtcacgcgtgggaaagaaagcccccttccccctacggcgctgctcccctttccccaggctgggccgccagagagtgcgtgcagggagagctgcgagtccccgcgcgcgtaatcatgacctcggggccccctccgggccgcgtgagcgcatcggcgaggctgggcggccgccgcggccccggccgtgtaacatgacccgagcggccggccggccggcgcggcgcggccattgagccctccctgcccatgaatctctggcgcgtctctagctcgctcgccggctcgcctcccgcctccctttctccccctccagctccgcgggctccgtgcgcctctccctctccctcctggtcctcccgctgcccgtctctctccactgcccgcctctcgccactgcctcccgtcttctctccctcacggcagcctccgtctctttctccctctctcctttgaaaactgatctttggctcttagtgtgaaagtgatttgaatttggctctgcggcgctctgcgcctgcgcccagcctctggcatgctggctccttccaagcagctgttttgggtttgaaattccaacatggcagaggctgcagtccgtcttcccttcaaaaacttggaatgatttcaaatcataggcaccttcacttaaccctagcttccattcatcagcaaacacatcggatcgatgctacgctaacctatcgggttctctctccgcgcgttcaggtaagaggagcttcgtagttttctaccatc

SEQ ID NO: 24784 - DNA, 2300 bp, Homo sapien
cctttcccaggggagttacacaggattcactcaattacattagcaacaagatatgacaacatgtgtgaaatgctgtctatcagaggatataattaaagactccgtgtccagaatttttgctgagggttggtcatataggcaccctctgcccagcatgtgccaaaataccagattcccagatggaaatcaggtattcaacttaaagcacattgtttgtacaaacagtttaggtacaatgagttattcttatcaggaaatggtggaaacacccccaaatccaagttctggaatgccagctgggccaacctcgtaaggaggacttcctaaggatagcaatctcaggcctgctatgttcttttctgcatactttcttattaccaggagcagatactgaaagacagtagagagtaattctgttctgctatcccttttccaacattaagcagttgtataaatagaaagaaaaaaatgagagaaaactatataccttctcttcaacagtgtttatttctgactttttctaatacccttcacacactgtagatgatctcactcatgcccatgactttagttagcatctctatgttgattgatccataaaccgtcatcccaatcacttctccttgatgagttctagaccaagatattcaatgtgcattgaaaatgtctacacgcatatccaaaagggtacctcgcacccaattatcccccagtttttattactctgatttaaaaacaaaaacaatttttaaaatttacattctatatagcaatatcaccagttacacaatctagaaatcatatttaaaaatctaagaaaatctacattcccaaaagttcttagaacaaatgaatgagttcagcaaggtctcagtatacaagtacataacagttaatcatgttcctatatatcagcaatgaacatttggaatttgaaggaaaaactataccatatgtagtagcaacaaaaaaagtaagcacttatatataaacataaccaaatacatgcataatctgtatgctaaaaactacaaaacacagatggaaaaaaataatgaatatctaaatacatggagaaattgtcaggcctctgagcccaagccaagccattgcatcccctctgacttgcacgtataacacccagatggcctgaagtaactgaagatccgcaaaagaagtaaaaatagccttaactgatgacattccaccattgtgatttgctcctgccccaccctaactgatcaacgtactttgtaatctcccccaccattaagaaggttctttgtaattctccccacccttgagaatgtactttgtgagatccatgcctgcccacaaaacattgctcttaacttcaccgcctaacccaaaacctataagaactaatgataataatccatctcccttcgctgattctctttttggacgcagcctgcctgcacccaggtgcaataaacagccatgttgctcacacaaagcctgtttggtggtctcttcacatggacgcacatgaaatttgctgccgtgactcggatcgggggacctcccttgggagatcaatcccccatcctcctgctctttgctccatgagaaagatccacctacgacctcaggtcctcagaccaaccagcccaagaaacatctcaccaatttcaaatctggtaagcggcctctttttactctcttctccaacctccctcactatccctcaacctctttctcctttcaatcaacacttcaatctctcccttctcttaattttaattcctttcattttctggtagagacaaaggagacacgttttatctgtggacccaaaactccggtgccggtcacggactgggaaggcagccttcccttggtgtttaatcacttgcagggacgcctctctgattattcacccacatttcaaaggtgtcagaccatgcagggatgcctgccttggtccttcacccttagcggtaagtcccacttttctggggaaggggcaagtaccccaaacccttctctccttgtctctaccccttctctgcttttctggggaaggggcaagtacccctcaactccttctccttcacccttagtggcaagtcccgcttttctgggggagcggcaagtacccctcaaccccttctccttcacccttagtggcaagtcccacttttctagggggcaagaacccccaatcccttatttccacaccccgacctcttatctctgtgccccaatcccttatttccgcaccccaacctcttatctctgtgtcacaatcccttatttctgtgccccaaccctttctc

SEQ ID NO: 24785 - DNA, 2300 bp, Homo sapien
tgtctttaacacctactttgttttcttttgttgtctactgtgttatttccagcgtttaccattgtacttagcgggaatgaacaaggagatattatcttggctaaaccgagagtgccctcttttttcatcacacaccacttgttagaaacagcctcccaccaagaatttggccacttgttttattcttacgtccttttcttttatatatatgtaaagtcttcatatggatcagatggagactctctttttctctttggataaattctaattacatatagaattatagaatatctgagacttagaaaatgggagattttctcacatgtaatgtcctagttacatgttgtctcttttccttcccttcaattagaactctgcaaggtcctctctaacatattttggtcccttatctgcccctccataggatggggaaatgttaaggtgacccccgccctacctcttgtccagagttaaatgcctactaaagaccttcagaagcacagaggcaactacctaacactgcaggtaccagggacaatatatctttgaagaaaacagacttattagtaggcagctggcttttcaatgcagattaataaaaggtggccaaacagcatgtttcttgtgaaagtgttggtttgaggttattatatattctccaaaatgaatttgactaggaattaagctcctttgccttctttttaaagctattgtaggcttagagttgatttgaaataaatttcattaggtcccattaatgtcaatcaaaccttaaattaaaaaataatttttagaagttgggaaataattggataagaagtcaacacagagaattttaaatgaatgtgggtttgcattcatgttaaaagcaaaatcttgaaaacagtgactcctttagacctcctctgattttttttttttttttttttttttttttttttttgcctaattaccaaatatacccattgtgctagaattgcttttaagggaatgactatttttctttagtagaaaaacagctctgctggaatgtttaaatagaatttatccttcaggtaagatttgattccatggtgtctatttaatctcttttatataaaacctaacttttaagttcattatggctctatgaaatggacagaattgcagaatctaggggaaaaaaggctgtttattccattgttttatttttcttttcttttttttttttttttttaacaaagtagcttaaacctaaaggaggttagcttccaaattcagatgtggaaacctccaggacaagtttggttttggcagttggcattcttactgtttttcaaactaataatccagttataatccagaccggttttccaattctgtcctgccagctcaatccatatgatgctgcctcctgaaagtgaagacactgaaattcttatcttctaccacttatattgtaccttgaaagctttcatttgaaatcagcttgattcctcactattttggtttccaggaatttgaagtaaaaaattaataatggcattaatagttttgatataaggatgctatattgtcaataattttcaacataggcccatgtttatggatttaccagagggaaagtaaatcattagtcattcatcagagaggtacaataaattttgcacagtgttgcttaggatgtgtgtgaagtttttggaatctttgtaccagaaagcacatcgcccttcccaagtgagtttttttttttttatcatgaggcagtgtactactccagatagttgtggtacaatttggtgctaagaataatgagtagatatgtcagctcctgaagtctgtactggtgagctggaccttaagttgtaggtctaagtaaaagacttcaattgtctttttaaatgtattgttgcagggcactaaaagttcatctttcaaaattttggttgctttacttgtttgctttaattgtttttatatttatattgtataattgatgaaagtgttgattttcatagattatcagagtagtaaaagtggtgggaatgtgttttatttatttattctgcagtatggcatgcagctgtaccagaattatatgcatccatatcaaggtagaagtggctgcagttcacagagcatatcacctatggtaaggaccaaatttttgagcctgtgttttattttacattcacattatattaatttaaattacactacataacagtatcttataataatttatgttattttctgttggtaaagtaactctttggcaccattctagtataatgttacattgaattttttatttttggatt

SEQ ID NO: 24786 - DNA, 2300 bp, Homo sapien
ttgtctgcaactacatacctcatttgttttttgctggaataacctcagtatatctgtatgcttttaaattaaattcacttaaactcaggcatagaatctgtaattcagagaactggatgtgagtgagggctttgtctggcacatgtgtcaataaatgttagttatcaccatgattagtattattattttcttcctgagaaagagaatcaccattttgtcctagcttagccaaagtattgtataaactgcagtgtccccaacctttttggcaccagggaccggcttcatggaagaaaatttttccacggatggggtgggggtgatggtttcgggatgaaactgttgcacctcagatcatcaggcatttgttagattctcataaggagcaacctagatccctggcaggcatagttcaccaatagggttcgctctcttatgagaatctaatgcccagctgatctgacaggggacagagctcttgcggtaatgctggttcaccagccgctcacctcctgctgtgcggcctggtttctcacagtccatggactggtatggtgtggtccagggcccaggggttggggacccctggtataaaagatcccagagatcacacccgctgtgacccaggtcacttctgggccttaattttgacattaggaaaataaagaacttggattccctgaactgtgactcaaggattttctgtcttcacggagtgccccaggtttcctcacaggttgggaattagtgacccctgggttctccagtggtcggtgcctcggtgggagagaatgcactgagatgggggaggggagctgctgctttcttctggaggcagtgtttacctttccctgggcagaggttgttgaaattaagaaaacctggtaaagcagatgccagggacagatattacctaatttggtcaaagaacaaagaccctgtgaaacatttggaaatcctcaacggtgcatagggacgggcacacttactggaagagcagaaacaggatcacccagcatttcagagtagggttgctgcatctcagagggtgagcataataatgtcattactatttcgaacagtctgggtttttgagaaggaagcttctgggttggaatattgactccaccagctactagtgctatgttactagtgcaaggtactcgatggctttgagccccagtttccttttgtgtaaaatgagataaacatctaatttatggagctgttgagaggatggaataggtagcgtaaggcaacctggaattcattaatgtaagcttctctcattaccataaaactaatagtctttctaattccagacaccttcaggtttactcatgctttactgagaattctcaaaatctcagtagttttctataatgattggactccttgctccctatcaaccccccaatctttggctgcggagtggatggaagaagaggcacgtggggaaggactggggcaaaccctctggtgtcctggcctcctggcccggtggggactgtcatggcggcccagcaacagcttaggtgatctcagatggcagagcagaaagaatgcaagggtatgagggtcagggctgcgcggacccctatcccgcctgcggtcctcccggcaagcccagcgggagcgcccgctcggctgggtccccgcctccagcggcgccggggccgcccagaccctgggctcagcctcgcgccccggtgcccacctgaggaggcagcggtcccggcctcgcgtcccggatgggacggcgcgggagcaatgccagtggccccgagcgccccgggccacgcgcggggccggccagccgctctcgcgccctccccgccccctccgcgccttgcctcgccgcccgcggcccccacccaccggccgctcctcccctctccccaccctcctcctccgccccctcccctcccccgccgcctcgcagatagctcggccgcgcgtctcagccgccggggccccgagcgcaggcggcgaggccaccacacctgcagagcgctcgggctgcctagccggcacctcgcctcccgccgcgcaaaccccttctccccacgcgccgagtctcccatgacgcccgagccccccggccggcgacaatgaccacttccctgcaagatgggcagagcgccgcgagcagggcggctgcccgggattcgccgctggccgcccaggtgtgtggcgctgcccaggggaggggcgacgcccacgacctggcgccggccccctggctgcacgcgcgagcgctcctgccccttccggacgggacccgcggctgtgctgcagac

SEQ ID NO: 24787 - DNA, 2300 bp, Homo sapien
gaggacgagcataaagcctgcaaattgaccctccttggatttccactaaataggagaatgcttggaaaggggagacaaaatagagatatatttccagccaaggaatactctttcttgaggttaagaaattatggcaattatgctaggatgtggagcaggatgcaccattggggaatagcatttccagtgattccaaagacatatacagattccacctatccctttccccaagaaaaaaaaaaaatcaaaagtgtgctctctttctctctctctctctctctctgtcccacccccgccgtgtgtgtgtgtgtgtgtgtgtgtgtgtgtgagagagagagaggaggtgaggaggagagatagagagagagtgttgttgggagtggagacagtgtaaacttcagccactaattcatgtgctcaactatattattcttagaagaagtgactgcctgcaagagttctggataaaattgggataatgatgttaatgattaaagtttacttatttctttgtttctttagttcaagttgtctgcaactacatacctcatttgttttttgctggaataacctcagtatatctgtatgcttttaaattaaattcacttaaactcaggcatagaatctgtaattcagagaactggatgtgagtgagggctttgtctggcacatgtgtcaataaatgttagttatcaccatgattagtattattattttcttcctgagaaagagaatcaccattttgtcctagcttagccaaagtattgtataaactgcagtgtccccaacctttttggcaccagggaccggcttcatggaagaaaatttttccacggatggggtgggggtgatggtttcgggatgaaactgttgcacctcagatcatcaggcatttgttagattctcataaggagcaacctagatccctggcaggcatagttcaccaatagggttcgctctcttatgagaatctaatgcccagctgatctgacaggggacagagctcttgcggtaatgctggttcaccagccgctcacctcctgctgtgcggcctggtttctcacagtccatggactggtatggtgtggtccagggcccaggggttggggacccctggtataaaagatcccagagatcacacccgctgtgacccaggtcacttctgggccttaattttgacattaggaaaataaagaacttggattccctgaactgtgactcaaggattttctgtcttcacggagtgccccaggtttcctcacaggttgggaattagtgacccctgggttctccagtggtcggtgcctcggtgggagagaatgcactgagatgggggaggggagctgctgctttcttctggaggcagtgtttacctttccctgggcagaggttgttgaaattaagaaaacctggtaaagcagatgccagggacagatattacctaatttggtcaaagaacaaagaccctgtgaaacatttggaaatcctcaacggtgcatagggacgggcacacttactggaagagcagaaacaggatcacccagcatttcagagtagggttgctgcatctcagagggtgagcataataatgtcattactatttcgaacagtctgggtttttgagaaggaagcttctgggttggaatattgactccaccagctactagtgctatgttactagtgcaaggtactcgatggctttgagccccagtttccttttgtgtaaaatgagataaacatctaatttatggagctgttgagaggatggaataggtagcgtaaggcaacctggaattcattaatgtaagcttctctcattaccataaaactaatagtctttctaattccagacaccttcaggtttactcatgctttactgagaattctcaaaatctcagtagttttctataatgattggactccttgctccctatcaaccccccaatctttggctgcggagtggatggaagaagaggcacgtggggaaggactggggcaaaccctctggtgtcctggcctcctggcccggtggggactgtcatggcggcccagcaacagcttaggtgatctcagatggcagagcagaaagaatgcaagggtatgagggtcagggctgcgcggacccctatcccgcctgcggtcctcccggcaagcccagcgggagcgcccgctcggctgggtccccgcctccagcggcgccggggccgcccagaccctgggctcagcctcgcgccccggtgcccacctgaggaggcagcggtcccggcctcgcgtcccggatgggacggcgcgggagcaat

SEQ ID NO: 24788 - DNA, 2300 bp, Homo sapien
gtttgacccccaaggctcacatttaacttgtgctgtgcaaactattgccatatgtgaaaaggccactagggttttgaagataagcacagtgatggtgcaggaagcatgattcttcagggcatttgaatagaggagcagaggaatgacttaattcggtactgggcacatggtgcagactccaaaccctgtttccttccacatgcctcctgccagtgctttgccatcatgttgttgactggaagctgttgctctgttaacctagacactggcaaatgagttttgttttcaggaggtctgaattagaatcaagaggaaaagtagtgcaagggagaggaaggttattttctctactttgattttgactctgactgtagaataaggatgcctatttccaacagagaaaaatcaaaaccattatgactgatttcatgtcattgaaatcacccatgttataactaaaaataaagtcctctaacagccttcagcaaagatacctagttaacaagacaatcaactgagattctgtttttactataaatcttaatgttttctgttaaggccttcattaaaactgcatttgctgggattcttttccttttaatgttaggtatgaaaatataaatatgctaggggctatagaaaagacagtcaaaatagaggaaaaatacagtttttgaatttgtcaatttctattttttgtcatgaacaatgactgaatgacatcttctaagaagtaaaaactttatttaccttctatggagtgtttattctggtcaatatactaatgagcatgctatctaaatgatacacatataatataaatattttcacctttttatgtctgagcaaactgaggctcaaaggggttaattaacatgttgtggccacactagttaagccagggattccaaacttcagtctgtatgaatccaaagcacgtactgttttctctgtatgctactacctacctttatatagtcagtgagttgaaaattatctgtagaattcaaaccaaactatttcaggttggagaaagtaggcattaaaaacttgaggttttctacttctttcatatatttaacttgatgatttttttctctcagtagttcaaaatgaaataattgtctatccagagaacacagaagacaatatgaaaaatggagtgaagaaaacagaaatcaatgtagaaggtgttgccaaaaataacaacattgatatggaagttgagagaccatcaaactctgaggcacatgaaactgatactgctataagttacaaggaaaaccatctagcagcttcatcagtaccagatcaaaaactgaatcaacccagtgcagaaaagacaaaagatgcagcaattcagacaaccccttcttgtaacagttttgatgggaaacaccaagatcataatttatctgactccaaagttgaagaatgtgtgcaaacttcaaataacaacatatcaactcaacactcatgcttaagttcacaagattctgtaaatacctcaagggaattcaggagtcaaggcaccctaattatacattcagaagatccgcttaccgtaaaagatccaatttgtgcacatggtaatgatgatcttttgcctcctgtagataggattgacaaaaattccactgcttcttacctaaagaattacccactttatagacaggactacaatcccaagccaaaaccttcaaatgaaattacacgagagtatatacccaaaattggcatgactacttataaaatagtgcctcccaaatccttggaaatatcgaaagactggcaatcagaaaccatagagtataaagatgatcaggacatgcatgctttagggaaaaagcacactcatgagaatgtgaaagaaactgccatccaaacagaagattctgctatttctgaaagcccagaagagccactgccaaaccttaaaccgaagcctaacctgagaacagagcatcaagtgcccagttctgtgagctcacctgatgatgccatggttagtcctctgaaacctgctcccaaaatgacaagagacactggcacagctccttttgcaccaaatttggaagaaataaacaatattttggaatcaaaatttaaatctcgggcttcaaatgcccaggccaaacccagctctttttttttgcagatgcagaagagagtatcgggtcactatgtgacatctgcagctgccaagagtgtccatgctgcccctaatcctgctccaaaagaactgacaaataaagaggcagaaagggatatgctgccttctccggagcagactctttctc

SEQ ID NO: 24789 - DNA, 2300 bp, Homo sapien
ggaaaattagaaataagaaagaaagaaggaaatacatttagactcatttcctgctgccagagattgtttcttaaattctttcatgcttataactgttcaaaatagtgtttttcatatgaacattgaaaaatacttatgaaccaagtaaattgagagcagaggcagaaatgtgcctcttctatggttcctaagaacatgggtctttaattttgtaaatcaaaatagttaataataattggtcattgagaaaagaattcacctaagtagatggtacgtattctgatactcagttgcattttatctgggaagaataaaaatgagttccattttaaaattacatgtttaatataggaatcttgcaacacaatatagaatattaactgccacaaccaaataactgtgcaatcaggcagagtttaaaaatgtgaagatatgtttttaaattgtatacaaatttacctaacatgatatttttctgcatgcatatcttttttctttttctttttttaagagagaaactatataatatagcttattacattttaggcagtgtacttcatctcattcttataggtaatagtgggtaatgataaaactatagagaaataacttgacataatttcacagtttgacccccaaggctcacatttaacttgtgctgtgcaaactattgccatatgtgaaaaggccactagggttttgaagataagcacagtgatggtgcaggaagcatgattcttcagggcatttgaatagaggagcagaggaatgacttaattcggtactgggcacatggtgcagactccaaaccctgtttccttccacatgcctcctgccagtgctttgccatcatgttgttgactggaagctgttgctctgttaacctagacactggcaaatgagttttgttttcaggaggtctgaattagaatcaagaggaaaagtagtgcaagggagaggaaggttattttctctactttgattttgactctgactgtagaataaggatgcctatttccaacagagaaaaatcaaaaccattatgactgatttcatgtcattgaaatcacccatgttataactaaaaataaagtcctctaacagccttcagcaaagatacctagttaacaagacaatcaactgagattctgtttttactataaatcttaatgttttctgttaaggccttcattaaaactgcatttgctgggattcttttccttttaatgttaggtatgaaaatataaatatgctaggggctatagaaaagacagtcaaaatagaggaaaaatacagtttttgaatttgtcaatttctattttttgtcatgaacaatgactgaatgacatcttctaagaagtaaaaactttatttaccttctatggagtgtttattctggtcaatatactaatgagcatgctatctaaatgatacacatataatataaatattttcacctttttatgtctgagcaaactgaggctcaaaggggttaattaacatgttgtggccacactagttaagccagggattccaaacttcagtctgtatgaatccaaagcacgtactgttttctctgtatgctactacctacctttatatagtcagtgagttgaaaattatctgtagaattcaaaccaaactatttcaggttggagaaagtaggcattaaaaacttgaggttttctacttctttcatatatttaacttgatgatttttttctctcagtagttcaaaatgaaataattgtctatccagagaacacagaagacaatatgaaaaatggagtgaagaaaacagaaatcaatgtagaaggtgttgccaaaaataacaacattgatatggaagttgagagaccatcaaactctgaggcacatgaaactgatactgctataagttacaaggaaaaccatctagcagcttcatcagtaccagatcaaaaactgaatcaacccagtgcagaaaagacaaaagatgcagcaattcagacaaccccttcttgtaacagttttgatgggaaacaccaagatcataatttatctgactccaaagttgaagaatgtgtgcaaacttcaaataacaacatatcaactcaacactcatgcttaagttcacaagattctgtaaatacctcaagggaattcaggagtcaaggcaccctaattatacattcagaagatccgcttaccgtaaaagatccaatttgtgcacatggtaatgatgatcttttgcctcctgtagataggattgacaaaaattccactgcttcttacctaaagaattacccactttatagaca

SEQ ID NO: 24790 - DNA, 2300 bp, Homo sapien
gatttaatcttgtcttgtgattgaaagttatggactttcaagtagtttcactgttactcaatatttgcatcattgtctgtgcaagcaactgtaaaagcttgcacagctctgtattcagaagcataaatgattcatgaaattgtttaaacagagttattgtttaaagactaaaacccagaggtatttaaataaattgctttactcttagttaaaatctctaaaagcaactttttctaatatggttccagtattgtaatccaaatgagccatgtgtttttttcttttcatatttaagatgcactgaaaggacattatgcactgaaagaaataaataccaatgcctgcgtgtggtagacaaatggcacattgctaggcatttagttcagcaatctttttttgttgctgcaatggataaccaactaaaggagcattaatatcaatttaattgtaatacctgccaaatgttattctatcagtggctaacacaggtttattacttgatgttagtgctacaacagaagtcccctgcaggatgttccttcctgtaagatctctccatcagtttaatccaaatatgtttttaaaactctaattttaaattcatttcttaatgtcacgttgttttctgaaaacacatttttgggcccatcagaatggcgcgcatcttaaaacaattggcgcttatgaaaaatataaaatatgtaaatatattagggtggtgcaaaagtaattgcggttttgtcattactttttaaaaaaaaaaaaaatggcaaaaaccgcagttacttttgcaccaacctagtacctgtctgtcaggtgtaaagaatcatctaaagggcatgcacgtggatactaaaacgtacaaacaagcacacagctgtgtctgattcctttacccttgtaaaagttccaataagtgaatacaatctattacttaattcttagtttatagactgtcattagacatactgttgtccagttctcatgtcagagctgttataggcttttacaaaaaatgcctctgaagacagggcaagcttaaacctgccaccaattagaaagatctgtgtcacaggtgcgcttttaaaagaatggcaatcttaaaggtcaagttaaaaacacaaatttaaaaaaacgatcctggacgtcgagggtcggactctagggggggcaagctgcaggccccactctgcgagtttctgaccgcattccgcggaggccccaatcctccccgcggatcctggcaaggcaggtaacctcccttcccccgcacctgtccggttcaggcgcaccagccttcccgaagcgcagcctagcggtgggaatgggaacacctcgtctgggagctttctttcggttcagcttccccagccggaccccaaagacccgaagccctgggggaaggaaattccaacttgctcccggcccacccccgccccgttcctctctccggctcgctgcttccctcgctccaatgccgccgagctggtccccacttatgtgcggccgtgctgcagaggcggcggcgagctcccggactccgggcagggaaatggggcagggtgagtgagagagcgggctccagcgaggcccccagcgcccagccagcgcccgcaccccgcccgcgggacaggggaggtgctgagtcggccctgcccgcgctgggctgagcctcgcaggggttgccgcttctccattcaagtcctggcttgagagccgagcggcaagagcgcgggccggggaagggaagagtaggagaggaagccgcgagggagaacaggcgagctactgtctcctttggaaaagaacgtaggagccttgggtgggaaaagagagatcagccctcccaacttctcttcgggaaaagttttcctagggcgttttgtttgtgcaaactcggccggaggagcctgggagtgcgctgccggcgtggcagcggtgcccgtgcgcccggccccgctcctcctccttttccagccccggcggctcctctccctccgagaggcgccaaatggctacccagtaaaccccacggggcgggggctgcagcgccaccgcctcctccgccgtgctctgggcgcccgctagaccttgtagagacggcggcggcgcccgcgggctgggagccggggcccgcaggtggaagcgcacccgggaggcgggccggccggggctggagcggctcgggcgggctcttgacgctcagccagcttcgctccggcctcgggaaggcgcgcgtcccgccctgacccgccggcctctcccaccccagcagtgacgcgccgcctgggagctggagc

SEQ ID NO: 24791 - DNA, 2300 bp, Homo sapien
tggtggtggtcacctgtaatcccagctactcgggaggctgaggcaggagaatcacttgaaccccagagatggaggttgcagtgagccgagatcgcatcactgcactccagcctgggcaacaggaacaagactccttctccaaaaaaaaaaaaaaaaaaaaaaaaaagatttatagcaaatctgtgattattattttgctaatcactggctacagtgaggatagcttagtaccattatgtgaagaccaccaagcttggtggtgctcttaagtggttttgcccaacatgagcttatttcttgcttatgtggattctgttgtaggtcctgggactctccagggcagctgtgctctgggtaatagtttagcattccagtcttgtgtcaccttcattttaatacatgctttcatgattgcagtagcaaaggaagggaacatagagactcaaacactggcagtaatttcaccaggaaataaagcatttcatgtctgttcacatttccacttatcaaagtcacagggtcatacctaatttccatggggtggagcatatagttctccctaggaccagaaggaggacagcaaaaagtggtaagcactgaaaatgccttcagtggttacgaaatgttatgaatgttttatgactaagattagcctaatcttactggtattagggtccataatattactagtatgtcataaattaaggctgaaactaattaaagatttaatcttgtcttgtgattgaaagttatggactttcaagtagtttcactgttactcaatatttgcatcattgtctgtgcaagcaactgtaaaagcttgcacagctctgtattcagaagcataaatgattcatgaaattgtttaaacagagttattgtttaaagactaaaacccagaggtatttaaataaattgctttactcttagttaaaatctctaaaagcaactttttctaatatggttccagtattgtaatccaaatgagccatgtgtttttttcttttcatatttaagatgcactgaaaggacattatgcactgaaagaaataaataccaatgcctgcgtgtggtagacaaatggcacattgctaggcatttagttcagcaatctttttttgttgctgcaatggataaccaactaaaggagcattaatatcaatttaattgtaatacctgccaaatgttattctatcagtggctaacacaggtttattacttgatgttagtgctacaacagaagtcccctgcaggatgttccttcctgtaagatctctccatcagtttaatccaaatatgtttttaaaactctaattttaaattcatttcttaatgtcacgttgttttctgaaaacacatttttgggcccatcagaatggcgcgcatcttaaaacaattggcgcttatgaaaaatataaaatatgtaaatatattagggtggtgcaaaagtaattgcggttttgtcattactttttaaaaaaaaaaaaaatggcaaaaaccgcagttacttttgcaccaacctagtacctgtctgtcaggtgtaaagaatcatctaaagggcatgcacgtggatactaaaacgtacaaacaagcacacagctgtgtctgattcctttacccttgtaaaagttccaataagtgaatacaatctattacttaattcttagtttatagactgtcattagacatactgttgtccagttctcatgtcagagctgttataggcttttacaaaaaatgcctctgaagacagggcaagcttaaacctgccaccaattagaaagatctgtgtcacaggtgcgcttttaaaagaatggcaatcttaaaggtcaagttaaaaacacaaatttaaaaaaacgatcctggacgtcgagggtcggactctagggggggcaagctgcaggccccactctgcgagtttctgaccgcattccgcggaggccccaatcctccccgcggatcctggcaaggcaggtaacctcccttcccccgcacctgtccggttcaggcgcaccagccttcccgaagcgcagcctagcggtgggaatgggaacacctcgtctgggagctttctttcggttcagcttccccagccggaccccaaagacccgaagccctgggggaaggaaattccaacttgctcccggcccacccccgccccgttcctctctccggctcgctgcttccctcgctccaatgccgccgagctggtccccacttatgtgcggccgtgctgcagaggcggcggcgagctcccggactccgggcagggaaatggggcagggtgagtgagagagcgg

SEQ ID NO: 24792 - DNA, 2300 bp, Homo sapien
taaattaggataaaatacaaatctatacaataattatacaccacttaaaaatccagcagaacaattaaacttaaaaaatagattaagtaagtcctggtgttacagacaatgtagaaaaacaagaatttcacctctgttggtagaagtgaaattcatgttatcaatttgcaaagcaattcaaaaatatttaatgaaggccaggcacagtggctcacacctgtaatcccagcactttgggaggccgaggagggtggatcacctgaggtcaggagttcaagaccagcctggccaacatggtgaaaccccatctctactaaaaatacaaaaacttagccgggcgtggtggcaggcacctgtattcccagctactcctgaggctgaggcaagagaatcatttgaacccaggaggcagaagttacagtaagcccaggtcacaccattgcactccagcctgggcaacaaaagcgaaactccatctcaataataataataatgataatgaagttgaaagtgtgcatgacctactacctaacacttctacatctagagaaattgtcacttttatgctctggaagagtgtaaaacgagaaacaaccttaatatctttcagtaggggaaggctgacttaactgttagataaaatgaaaaaaaaatctgcatatatctacatcatacatgctgaaaacaaaaatgccagtggaaaaataacatgtacaatatggcaccatctttgtaaatgttgaaaatacaaaagccaatgttatatattgtttatggctataaatgaacggattaaaatacaaagtatgaatagcaaagataacactaacttgatgaaccgatgactccagggctgaaggcctggggaaaggaatggagaaggtcaagggggttcctattgtgacattgtgtttacttttacaatttgaagaaaatatgacagcatgttaacatttgatggcagagtgtatataaagtttataagtcttttgttttcccacggtttttaattttttttcttaattataagtaaacatgtatgaaacagaacctctttaattaggtacagttggcctctatatccccacttctgcatccatgcattaaaccaatcccagatcaaaaatgtagttagggctaggatggatgtgtctatactgaacacatatggacttttttcttatttcctaaacaatacagtataacaacaagtaaatagcatttacattgtattaggtattataaataatctagagatgatttaaagtatgctggaggatgtgcctaggttacatgtaaataccatgctgtttactatcaaggacctgagcattcctggatttcagtatctgcaggggttccagaaccaatcccctatggatatcaagggaaggcagaatttgttaagtatgatggcatatcaccgctcttattgcccctgaaactgttgtctcatgcattctgtctctgatattgaatactctctgggcttgttgcttcatctgtaatgtaagaggactgaataggtggtcattgaagattctttctagctcaggcactgtaggtgccacccctttcccaaacccttgtactcctctttcccttttcaaggttcattacctgaatgcagtaacaatccaccttcattttctctatcgctcctttttctaaaagttaccaggaagcgtttgaccaaagcatgctcagtagtcaagtttgctaaaaccctaggaaagttttttgttttgctattcattttcttatgagtctttccatttccatttacaataaaagtcccaaattttcactcgtcgtctctgccattgaagaggggtagcgaggaggaggtgctaatagggaagatggcccatgggcccaagggtgcttctgcgttcttacctgggcttcagaccccagcaaaggagaagctaacttaggaacggactgcaacgaggcggtcataactctgtgagatcggggcagggcagcgtgggtggaacaagttgtcctctgcagctccagggaagagtagctctccctgttctctcagggaggcgggggtgtgaaggggggaggcggggagacagggctgcccggatcagaaacatcctgcagcatctccgtctccggaggaaaaatacatttgtctgggcgaactccggtggaaaagcgccccaggctgccacagcctagagatcttggggctgcagccctcgcggcctgccgagggagcagggggcgcccgtggaactggctccctgcagctctgcggctacacgcggacctcggctgtgtgcgag

SEQ ID NO: 24793 - DNA, 2300 bp, Homo sapien
gtgatgcagggagtgcaccatgtaaagacagagacagagactggagttatgctgccacaaaccaaggaacatctggggctactaaaagctaagagaagcaagaaagtatccttcccctgcaggtttcagaggaagcatgatcatgctgacaacttgattctggcctctgagtagccagaattgtgaaaaaaatgatttctgtgtctaagcccctcaggatggcagtttgttacagcagccctagtaaactgatacattagacataagacaaaaagatttcaagggaaaacaagtggctccagcttacctttggtacagaaagaagagacccaagcaaaaactcttttgagtctgtgaaggaagttatgaagaaggaaaggagtctctgataagggctccttacatagtttgccaatctaggattagctaaaaagatgaaaagatgagaagtttccatctatttacactattctagtgtggcagagattgtgcctcgcttgcctgaagcctgcagagtgcattacatcccatggtttacaaacagcagaacagagatggctgtgtgaggcgcctggggcagggaggaaggcttaagtcagccaattacagccaagagtgaccctgggaacatgctgctttttcttctctcctcctaaaggacaggaacaaaagtttccttagaggaagaagtgacaaagaggggatgctgccatgcaaagctggagggatgctattcccggggcccagtgggcctgtgggtacgttagtagatatgagggataatgatggtcatggatcatgcaggactcctggcctcagtggatgcccatgtggagaaagggggaacgggatcatactctgctttctctatatatgtacacaatcctgaacttagatcagtctccatgagaaggagagatagaagaggaaaatcatgtattggttgaatgcaaacccaaaatcattgggaaaagcctcaagtaatttagtttacctggaactgactagatttatttttctgccattagacaaaatgggggccacaattgaaaacgaagtatgtaattaacagttcttgaacacatggctgggaaatatggtatcagctatatttgtttttcttctttgtatgagctcctttatggcaggcactgtgtgtttctctctgtgtcttttcaagtctaatataatacttgacatcatttttgtccatccatacagttggtttgtcaatatgaatgtatttatttaattgatgataaactgtaataaaatcatagttgtttgctctaaagtagatatgaaaggtcagatgaaacaataacatacatctggattgagaaatatcttaataactgatggattatttttattttctttatgtattgtgtgcttcaatatcctaataaataatattagctaggttcactgatgtatagaatctttttctacatttagatatttcttgcaaatgttttaccagaaagcaacacaaaaatactatcagtgagtatgtgtttacactgttctctaaggagtcaaattcctcaccttgaaaataattcatcccaggaagagaaaaggttttcaaaagactagagcaggccacaagggagctttcgcaaaactctacacgtaaagggtaatgtaaacttaaaacctatttttcaaacagtaatttatatatcttttaattttagtagtttatgtgtgaaacaatcatgcaaaacaacaaagtgataaaattttttaaaaaaattagtgagatgcaaataactgaatatgtaaaaggtctcatacatatttatatgtagtagataagttacatttttttagtgtgttgggaaattttagctcacatcacctctctactgtcatcttggggcactttcatgactacccatgcttcatgcaggtttactttcctccctgtgacagaggataatgggaatgttttttctttggctcaattttgtgtgtgtccgccagtagatggcggtaccactttgagtgcgatcggcctttttttctttctttttttttttcctcaaagctgttttctgatatatgttgggtaccatagagtgaatctcagaacaggaagcggaggcataagcagagaggattctggaaaggtctctttgttttcttatccacagagaaagaaagaaaaaaaattgtaactaatttgtaaacctctgtggtcaaaaaaaaaaaaaaaaaaaaaagctgaacagctgcagaggaagacacgttataccctaaccatcttggatgctgggctttgttatgctgtaatt

SEQ ID NO: 24794 - DNA, 2300 bp, Homo sapien
gaaagaagataaaatggctaaagtagagtgagtgagggcaagaataacatcagagaagtaaaggagtctagattgtgagcattgtgaacactggggaaggcatagactattcacaaggagatgggtagctactaaaaagttttgagaagaagagtatgtgatatgatttagggttgaaaaggattgctccagtttctgtgtcatataaccctatggtcttgaaactgggatattgtatccctgggggcatgaggtggcgtgcctagaggtacacaaaatcccaggatcagttagtcacatcttccctaaggataaaatttaccctcaagactatggggaaaaatgattactgtgttaagaaaaacatttaaattttatataaattattgtaaaattcccgtgattttaaaaataaagtatcaataatatttcatatttgtggcatcttaggctttaatcttacaggtttaagcttcttggccatcaggagtaatttgttgaaattgcaaattaatttggcaaaattatcataattatgtgccctgagagcttatgtatcttatgatagtgcaggaaacttgtgagatgaaatagttgagtgtatacattaaaataatttgatctaccaagtcactttaattatttatttgttcagtgttaaaaatatattttcataaccaaactaatacatcttaataatgttgtagaaatggaagtaaggtaaaatttaagaaactgggtttgttcttctgacttgcttattaatactggataagttactgaagagtgggctttggtttcctcgtctatttaatagtgtgggaacaaccttatgttaaagcaatctattcagtataactttagcacacagaaaataaaatattatgaatccaaagaaagtgtagcttgcaatcatgtattttattaaatgtatttatcagcattttggcttctgatggacatgtgtatatacatattttgtggataaaaaaattacttaactatttttatattagatactatcaattattctggctgatctggggacttttaatggtaaattttatatcaaatctgacaaagacagtatttcagacccgtttaagacctagaactcaccatgagttctaaaattggttctcagcaccatggacagcgttactgcaataggaaattaaagatcgatttggccccaaattaaaatggtgttgtaaaaaagtgggagaaaaaaaatgcctatccttttacttcaaattttaaaaaaatgatcctggccttcacaactgttcataagaagaataattaattaaacaaacatatattgagaacatcatatgctcagtaaaactttgattctataaatggtgtcatttaccaaatggattcttttgacaatttaattttctcttatctctctaagaagatgtaactacacactatagtatactactacaattatcaaatttcatgttgcatgtaacttgtcgtctgtatttttgtagttagattagattaactaaagatttttcaagtttgcctttaagtcatttaattttcctgccttatctttaacctttcaacattcctccaaacaatagcaacacaagtgttatgtgttaacttctctagtgacaaaaacttatacttctccacaaagagatgtgatgttcattatcaataagcttgacatctaaaattgttttataggagatacatattactttttcagatggtatataaagttaaataaatcttaagttttcaatgatgggaaaagcttccatttagtttaaacataatgtaaagaaatttgaatccccaaaatagaattataattctaaaaattcatactataattcttcttaaatgtttaaattacagttaattaaagtagttgatttcaaatagagtggaattatgggctgtacatcatttaattttatgtgctgactgctacatagccaaaggaacgtgaattaagatggttccacttttgaccaggagatggagctgtcatgtaagatgctgcctttatttatttatttttctaatttagcatgctgttttctaacagacattgggtaccatcgaatgactgtcagaacagaaagctaaggcaaaggagggaggatgctgtggtcatcctttcttgtttttttcttctttaatgaggatagagcacatgtgagattttactttctactccagtaaaaattctgaagaattgcattggagactgttatattcaacacatacgtggattctgtgttatgatttacatttttctttatttcaggtaa

SEQ ID NO: 24795 - DNA, 2300 bp, Homo sapien
tgagtttttcggagtctttcttcccactgaattgaggtctggaaggttgggaggctagagctgctacagcatctagctgtagggaagctacggctaagagaagaatctttaggaaacttatcactatgaaagtcagaacaaaaggatacagcataactatgagctggtaacatcagctgagctcttgaatcatcatatgcctaagactagccctggacaaaccatgaaccaataaactcctgtctttatttattttttacttcaattagtttgagacatctttttctcttacaatcaaaagttatctgctaaagtgactaaaatattattttgggctacatcttccccttgctcatttccaacaaacacattttcttcttttctccaaatcctttattttagattcagtgggtacctgtgcaggtttgttatgatggtatattgcatgatgccaaagtttgagggcacgattgaacccaccacccaggtagcaagcatagtacccaataggtagtttttcaacacttgcttcccccaccctatacccacttatagtccacggtgtctcttgttcccatgtttatgtccatgtgtacccaatgtttagctcccacttataagtgagaagatgtggtattttgttttctgtttttgcccaacaaatacattttccaatgaaaatgatgaagccagaaagtatgaaatacattgatttaacaattagaactgttctaattataattgataccggtgcctgttttctttttatgattgagtaatgatcacagatttttgctatcagattttgagtttgaatcctgcctgtatgatcttaggagacttttcctaatctcagtgtatgtccttacttcagtttgcaaataaggataatgaaagcacttatccaatagggttgtgtggaggatgaaataatacagggcaaatgtcttagccaagtgactggcacttagtaagtcctcaaatcttcactatgatattaattgaaagcctagcattcacaatctcactggtttatcagttcttttttctggttgctttttagtgacttaaatcagagataaataagattggtgtctcactgggttaatattttttctggagagagttaacttgtgtggcacaggccatctctttattgaattagcaaagaactacattggatttaagattatctggggctgaggctaatatcaaatcctactctatgtttgtagttccttggctacaagcctacatacggtaattgctgtttaatatgaatttttatttttaacccttacatatagtaagggttaattgctatttaatatgagtttttatttttaacccttccctatttacgtcatgctttgcttaaggaccaagatatattctgagaaatgtgtcattaggtgatttttgtcattgtgtgtacctcatagagtgtacgtaaaacctagatggtagagcctattacacaactaggttacatggtatagcctattgttcctaggctacaaacctatactggatgttactgtactgaatactacaggcaattgtaatgcaatggtatttgtgtatctaaacacgtctaaacatagacaaggtacagtaaaaaatatggtattataatcttatgcgaccactgtcatatatgtgatctgtcattgaccaaaaatgccattaagcagtgcactactgtactttctctttactttaaatttgaattctttatatgggttgaatgactttctgacatagcaaataaaaagcatgaggagaagcattatctgttaacaaaattaacacttaaaatcaacaaagttttaatgtttcgttccaagaaaagcctgtggaagatcagttccacaactgagagctttgggctgcttcagacatatgtctgtgtgtacgctgtgaaggtgtttctcttcacagttccccgccctctagtggtagttacaataatgccattttgtagtccctgtacaggaaatgcctcttcttacttcagttaccagaatccttttacaggaagttaggtgtggtctttgaaggagaattaaaaaaaaaaaaaaaaaaaaaaaaaaaagatttttttttttttaaagcatgatggaattttagctgcagtcttcttggtgccagcttatcaatcccaaactctgggtgtaaaagattctacaggggtaatgttttattattcttattatgcttattctctgtgatgcttctctacctttacagtagtagaatccttggggaaatctgcagagggaccactttcattttgaagc

SEQ ID NO: 24796 - DNA, 2300 bp, Homo sapien
taataaatatgaggtggtatttcttagtaattttgatttacattgccctgaggattggtgatgctgagcatattttcataaacctgttgtccatttttatgtcttctttggagaaatgtctatttgggccttttgtccattttgtattgggtttgtttttccactgttaagttttatgagttctttataaaatttttatattaaacccttagggtgctcatttattttcattactttaaccgaaccctagatgctgggggttccaaattgaacctacatcccagccttatttatgagtttaactgactatttaatattttaatctggatatccaaaaagttcaaaacgttcaaattaattttgttattttgttcccaaatctctaaatctctcttttttttttttttctgagacaatggcatcatcatctaaacagaagaaatctggttagaatttgtgccctgcaaatacttgcctacaagtctctgtctacaatcacacttgacatataaatcacctgggagagcttgctaaaaatgctgagtcagaaactcctcaaatgcttattcattaaatctggaggaggcccatgaacctgcatttttaatgaatcttcccctagtggttctgatgaagatggccccgaacaactatttctaaaaatgctgtctgtcctagggattcctccagttattcctagcaataggaccacaaaggctttgaaagcatttttcacaacagaggacttggcggtgggaataagcgatagtttagtcttccccataatctttagcagagcctcccaaagctactctaaataacagtgcaaactaagcaaaatcagtgcactcctatctaaagttagtatcagtttaagtcaccagccattcctttcctaacaatattgacaccccaagcccttcctgtacagatattcctggactaatgatttgccaccatgccagtaactcttaaagaatgcttgcttgcccttccctctaattttactccctttggccttattcccatgaggacacattactgatttaagaaattgaagagcaaggcttataaatacctcaagtagccagtacatacctctatagtggtgatatctactgtatatgtctttctaaggaaatttttcagaccacctccactagaggaagctcaattgagagaatttttatcataaagatccctggtttgtattacagtattttaaaaattaaactgtttgaaactggatgaatttgctttattgccttaaaaaatcctaatttggtgttttctttaactgtcctttaatgcatgttatgcctctaggttcagaagtgaaatgatttttgtttaagtttattagaataaaattggagttcagctggtcactttgaggcatggcaaccaagtgactgatctctttttaatctttaataagttccattattcacaaattgatggcatttaaggaatctgaagtaatgcaaaccacataactgtgaaatatttgaatattctaatgctcagaatgaaatatttttcatactgattaggcctcgaaactgcgtttgaatgaaaacattgtcaaacagaggttgtagtgcaaataatataaaacataagtataaagggtgttgattcattttaattctatctctttgcaaactgaatatgcaaaatgtcatcttgatgttcagtctccctcctctgtctgcatatcaaaatgtataatgaggaggtacacttttttcactgagaaaaatcagtgggaactaaaaaacaggcaatttacctaggttttactatgagcattttgctttgatttcaggtaggtgaggcattgattaactttatttttctaaatccaaagcaagactttttacttcagctgaggtcatctgcagacattttccatagttgggagctattttttgaaatatcttgcatctctgcttttctctccatatttcttttctccactcgcttcctctctcccagctgcagggattcgtcctctaaaagagtggaggtgggagggaacaagaaatggaagcaaagcagggagcatgagctagagaatgccaggatctggcttttgttattggttggctgccgcctgatggatagacgagggaggagtgtactctcttcagtgtgttctgacggagccgaagtacagaaaccatatttacaggtaagagcgaaaaataaaaaaaaagaaaagagaattctttttttctttaaaagagaatgcttcttaatttttacggaaacaattttatagtaggaaaattattctg

SEQ ID NO: 24797 - DNA, 2300 bp, Homo sapien
ctctttctagttctgatatccacctttaaatatctttttcaacatgaataaattgtcagcttcttatatttaaaaccatacactatagacttcccattggagactcacaattttactggcaatgtgttttaattgctagctattttcatattccttgtatttattttcttattgttaaattattcctttgcatatatacacacaaatttcacatatatgtggattttttttcccaatttctcagctcttgttctcccactctcactttctaaaaacttgcaaataacttagttttctgctgattctttccttccattgggcaacctttttatttcaatgtttttgaagtaatgcagtaaaaaaaaaaaaaatggctgccttttgtttacttccttgtacattagcatgggtgacatgatcaaatatattaactaggatgtacatatcttaagaacccagaagtatactataagcccttttcttttaatgccccaaagttttgcagctttagcatagctctaatgctgtgctaaaaatgaacatgaacattttgggacaaatgcattaaaatggtggtatctaaaacatatatgaatatttctttcaatgttaagaaaaacccatcaaaaggtatttatttaagtcataaacatttatttaagtcataaacattctagatcaatgctaaccctacaaataatatcataaagaaaggtattaactcattgtatttaaaagctaagctacttaaccatacttacctattctggttttaaattatttttaaaactttcaattgacacacaaaaaattttgagttataatattttttgccccaaaagaatttcttactaatggaaggcttaagcaaatatacatatatatgtatattcactttttaattactgaattatttataagtgccgttaagttactatatatctaactactcagaaaatttattttctcatctgtatttatagtgcttctgacttttccttctgtgtgtgttctttgttgcacttcgcatgtatttgtcataagattttcactgagacttaaaagtaacaagctttcaaacatcattttaatttagacagtcattaaagagataagaaatcgatgttttaaaataagttccaataactaaatagttctgtatttggaaatccaaattccattttcagtttttaagaaataattttatatatttaaaaaaatttttagaaaggcaatctgactacacacacatacacacacatatttgtatatatattaatgtaatatttgtgtggtggaaaattcctgtaaatgttggatagttttccctgaaactacttgttaacattgaaatcagataaggtaaatcatatgttttattgaggtaagctgtctaaaataagttaccgcaattttaaaaattaataaaaaccatatgtcctttagaacttaaattgaaatctgcattgttcctttaagtcagctgttctaggaatgtgtcatcttttgaaaagataaattaatcatctacttcatctatatacattaataaaaaagattcaccttctcatctactttatcaaaagtaattagtatatctatttttattcacatatagtatcttttagtgattgagattttaattgaggatattttgaaggaaacagcaattatctttttacaaaaaacaaaacaccaagaaaaagaaatgccagcaatctaatggttaaaacatattgccaaatcattcagtagcgcaaggctctttaataacatttgtacaaaagtactttcagaaaatatgagataggaaatggctttttgcaagttctccttccttaaattattattcaacctcttattaaaataaaatctagttaacttcttttggagcttgctcaaacattttctataataaaaaaaaatcttgtgaagggatttccataagttgtgctgcattaatgacttagagcagcttccttatctgttattccttcctcctagtagacctcagatgataaaaatatccatagacacagtgaagtcagtggcacgcctggctctctcagacaaaactccatgtgatcacatataggcagcctcagtgaggctgatgccgtgcagcaagcagtaggtaatgagtctttgtgcagagtgaagctcttgttgctgaacaataaagcatatggtacaagcaataaaacacagggctgggaaatttaagaagattcctctgaaccaggaagaactgtgtcttcggtgatgctgacacatatgataaaatgatcatttattttgga

SEQ ID NO: 24798 - DNA, 2300 bp, Homo sapien
agctaaaaacatgcagcttgttacaaataacaattaacaaaaacgacaaacacaaccagtcaatgtgacatcctactagtggctatcacagtttaaacaatacatatgtaaagaaatgccaaggaaggaaataaattttagattataccaagagacaaaacccaataaagaggaatgtgtaccttttcatgatcacagattttaactctgaaacatatatatatatataaataaaatatatatatttataccttataaagtattcatatatatataaatacttctgaatatatatatatatatatatatatatatatataatttgtttatttatttaaatagggtctcactctgtcacccaggctggaatgcagtggtgcaatcatggctcactgcagcctgacctcccgggctcaagtgatccttgcacctcagcctcccaagcagctgggactacaggcacccaccaccatgcccagctaatttttgtgaatttttgatagagatggggtttcatcatgttgcccaggctggtcttgaactcttggcctcaagcaatctgcccaccttggactcccaaagtcctgggattacaggcacgagccactgcacctggcctttgtgatatatttagtatatacacttgctagtgtgttatttcctctatgaaagtttctctgcttgagggcaaagtccaatcttctatttgttttttaatacattcagagttttccagtttgaggattttttctaataaaaattcttatctgaatgttagactttttcctgtaaagatgagacaatgatgtctgatgttgcaagtattttaagtgtgtgatggatgaactgttgttaagctcaccaagcatagtaataattataattaataaattttaggaagtgataaatttaaatatgaaagaattaaaatcccttctgtatttagaacttccatgatttttctcatggagtttctgcattaattctatgctgctcctcagggtagatatcttgctcatattcagagaaaacttctttttctaaatgcttttttatgaaggaaacataacgtgatacaatagtaagaaatgaagtacttattcagggcttactgatggatgagattaatttagagaagaaatataaatagaagcagactaatcatgtgtatgtgagaccgtttccacatgagctattatgcagaaggtaccattttgggtgagggtttgtgtgaactcctctgagggcagagtttattgtttcagctgttggttgctgagagcttgagggccctgccctctgttctttgtcttactaagagcatgctgacctgactgattacttcatatcaagccctcattcttggaatgttctgtagaataatcatatttgtaatccctgtagcacagtgcagcacacctttatttcctggtgtatggttttgctggaactcaaaagacagagttgttatttcaaggacaacatatttgctgagttaggtggtgatggcttccacaaggatgctattatctctgaacaaggacacatttattccaacattggagctgcctatcatgaaatgagtctaaagatagttttcactgatgagcatttgtaacctttggtgtttttcacatagcactctctaaaagctccaacaactgtagctcctaacattaggagtttatgagttccaattaacagtcttctgttacccgtacatttaaaagcctaacattttgatgcctttatttttctttctgtgatttctcctaaagattaaaaaaatgatctaacaaacacttgttgattatgaggacatgatgatatataatagttcattctcacccagtacaaacatacagattttgtaccctgcccttaatgagtctcttatttgctgctttgtgtttttagatgactaagaatggcacagtagaatcagaagaagccagcactcttacactggatgacatttctgatgatgacattgacctggacaacacagaggtagatgagtacttcttcctacaacctttgccaacaaaaaaacgaagagctctgctgcgtgcctctggagtgaaaaagattgacgtggaagaaaagcacgaactccgagccatccgcctctcacgagaggactgtggctgtgactgccgagtgttctgtgatccagacacgtgcacctgcagcctggctggcattaagtgccaggtaagggttgggaattcagggcatccaaagacaagacattgtctaccaccccctaaggaggcagtcatggtacctataatgaagct

SEQ ID NO: 24799 - DNA, 2300 bp, Homo sapien
agtccttaaaacagtcacttctaaattttattttgactcctttcttggctttttcaaactggaccatgagacccccttcctaaacaatgcagttgttttgttttattctttttttccagaaattcaagctgaaacatttgatatgacctgtgttttacctggtgatcagttctcaggctagtctaagtctgtgctgtcttggcatgccttgggtttcctatcctgagagtggtaatgccagtagaatgatgggaaccaggagagtgaatacgaccagattcaaagcctaaaacaatatgtttcagtttacttttatatgtagattttttaaatattcacatctagcctggaattttagtaaatacagatacttgttgtatccatgggaaatgaggtcatttcaaagatgtaagtcacgttggtgactactttcttttacttgtgataaatatatcactatacagggtaattgcttttataaatttgatcctttgcattggcttataattcaagaaatgtcaacttcactgtgtcactttatgtcatctctcataaaagtttctggcaggactaaagtttcaaaggaatgtgatagaatttattttggataacatttgtattcagcatgctaatgatgtaactcctctctttatcattaccacggtgatagttaagttcattcgttaactcattttagtgacatgtgaggccatttaaatatttttaagataatgtatattgattagaaagggttagaaggagacaaatttatggtagaaattagccttgccattgtctaagttaatttatgtgacctgattgaacagttttagttgtaactttagagtagcttctttgttagaggatctctttcctttctcttttggttttctcccaatatttttatctgtcttgggattatcttaaaaggtatttattaatgagtatttggaagaaaattgacctagaaaatgtctcttttaaatttatctaggtacttgtatcaccagagaccttcatcaagtcctactgccacactggataaggccactacccccgacccttcttgtcagggacatggcttcctaataatggttttgctgttgtctctacataggggacctatggaaaaggagtttgaaatttctacctttgtagtacattgtatccaattttgttttgctcctccttttcatgtggtcaccaagcttttttccttagccattaaaaaagccacccctctttaaaacaaatttaaagatctatatacatttttgcaactttatttaataaaaaagagaagaaaaaataaaatctaaatctcaattaccctaaagtggaaaaacctaagtatctaacctaggaacttgttgcctggtggtggttgttgttgttgttgttttttaatttatttagtgttgatccttgagttatttaatggtatccaaatgatatctgaaagtgattgattttaagatgtaatagttggcaaagtcatttcatttgtgtctcaaacaaataaagcccactgccatgggttaccatctgaaccctgattcattaggcactagtcatgccaaatggggatctcagaatagtttaatcttttcaaagatactcacaatggccaactgtgtgtgaatactggaaagtttgagattcttctatattcttcaaatttatggtcctgagactaggagggatctccagaggtcatatggctcatcgatctaccaccagggaagactgtcacttaggcatgcccaacaggagagatcgccatctattcttaacatctctagggaaggcagtttccttggcaacacaattcagctctcttaggttttctcacaataagaaaatatcttggccagtctttgagggttaggcacctggcaacagttgtggtgatttgggccattgtactaggggattcaagggaagttgggtttccccctacatttggtgattattacattaatatatgatcattccataagtctcctaagaaatcagatttttaaagaaagacacggattcagagacaatggtctgtaacatgaccaacttttgacaaatatggctgtactaggttttcatttttgctgttgttgttgtttgtttttgtgattgctcttatgtcggtaggtaatgtcaggaaaagtgactgtttcagatccccagtacaaacatcagaactaggatcaaatgacttgacttttaagctgttccattttctaagaagttacaattacaaaaagtaagcattttctacattcttacttctaagtaatgacctt

SEQ ID NO: 24800 - DNA, 2300 bp, Homo sapien
gccttccacttatgctgtactcaaggactgaccatgccttttcttgcttttatggttttgcatctgacattccctattttccctcctgtctaactgcctaaaatgtacttgtatttcaagattttgctcaacagtgtcatctctaggaaactttccttaacatttctcctgaccttctacattgttttccctttttttttttttttttttttttttgagacagagtcttgtcctgctacccaggctggagtgcagtggcacaatcatagcccaatgcagccttaacctcttgagctcaagccatcctcccacctcagccacctgagtagctgggactacaggcgtgcaccaccacatttgactaatttttgtatttttttgtaggatggggtcttgctatgttgcccaggctggtctcgaactcctggtctcaagtgatcctctggcctcagcttcctaaagtgttgggattataggcatgagccactgttccaagcctgtgtagctttcttagtctcctgtcgtagcacatatcacactgctttgtgactgtcctctggcttcctatatttcaattctgcttcttgaaggtaagggctatctttaatttcttaaccatagcctaccacaacatttgacacataattaattacacaactgtcatagtgtggttctataacttcttatattcttttcaaaagcttaagaggtcatttcattttttacctgaagttcttaaagcaaccaaacctcagaaagattggaatctcacttttatgagcaatatatgtcagaattggggttatcttttggagcagaagtatccactccatactgaaaagaatatagagcactccaattagaaatagtatatagaactaagttctgcctattttgtttattcagcttaaaatttcctgccaaaagccagagaatccatcttagaacctggttttcttattttaaatttagggagaactttggaagagaagttaaagaaggtgtcaaaagttaattttcattgctataaatgatattttctttaaaatatgtttagaccttaggaagaacaggcattttccctccccttcgtccctgcaaatttcttgactggctatcgcggctcatagtatgtaatcgtttcctaaaaagtcctatttttcttttcctttgctcctgttgtcccatattagggtttaataaacttgctgtcctgttcttagggtcaattgcaagcaatattttatcaaaccaaattctgcttttttaactttatgacttctataggctccctacagacacttcaagtaaagctaatgaattctctttttactattagatcttgtatttctgtgagctattaaaactagctgttatataacaacaaattaaatgctgttgattttcttgtttttaggggttccttcaggagtcacaagtactattgggttggaaaatctgggagaataatagtttacttactgatgaaactgctgtattatcattcattaagctggagcagatcacagtttgagggtaaactacataaaatgaaggccactattttagatggatgcctaatagtacttatcagtatacccttacttccttatggagctctcttttttgtaatttatttaatgaggtcctttgattccttggttatcaagtgaagatattcttttttaactcaaaatatatttataaaattaattttatacatagtatatagtggatattagagtttaaaaagaatgtattttttaatggagaggaatatcaatatttttgcaaccccaataaattgtagtaaattgtaacaattattttcttccaaaagtgtaattttcttgaggacaagatatctttgtattctcattaaccataagagtacattggtagcttatgttcagttgttggttaaatgaatgaattgagccatgcctgtaggactgaatagctactaataccatcgatcatttctgtttataggtactaccattaaagataccttcttctcagcaaatctatgataaaaaatataagtaacagaagaagaaataactgttatttgtcaagtgacaagcttttaatgtcagaatggctcacctaaagcgactagtaaaattacacattaaaagacattaccataaaaagttctggaagcttggtgcagtaatttttttctttataatagttttggttttaatgcaaagagaagtaagtgttcaatattccaaagaggaatcaaggatggaaaggaacatgaaaaacaaaaacaagatgttggatttaatgct

SEQ ID NO: 24801 - DNA, 2300 bp, Homo sapien
aatgccacactcagaaaaactgcttccttctttaaattgtctgtctccattgtaaaactgacagtcaaattttagtaactcctgatcttttttgtttcttctgttctttttagactcctcatccagcattttggtcctgtttgctggctctctcttttaataggtctaccctagcttctcttttcagttgttatttgacgttactagtcttgctgtcaatgcatctcagtccttggattccagattgttattctatatccatctgctctgtcctgattgtcagtgaaaagtgttgctcttcgcctggtgggacatcaaaactctgacaatctttggctcttcattcagagatgggtggtgcgtgcaaaagggtacaggtttcttggttatacatttaggataccttacaaattttccaaagactaacattaacctctggttaggggtaaacgacaaagtggcacaacgaagaagaaggagaaggagaagagaatttcagtagttagtattttcagttctggacctggacctaaggaaaaacactgccaagttagtatatcaatacacacaagtatctcctgaactatttttttgtttgtttgtttttggagggaaagggagcttggcaattgcttgtaggtactgatattaaaatgttgcaaatacatggaggttccttggtgctcgcaaaataaccatgacatgtaaaacaagcaaagaactacctagtttactaaagtcttaaaccctaactcatagatgtcctagtataaaatagcactatggatgctaaaaccaatgtcttagagtagtcaaatactaaagatacacttgttgatactatactaaactgtattttaaaccttatttttaggtcacgcatagcactaataaaacagtgaataagcaccataagagcatgtcaaaatgtaggaggaaggccacaactaaacttcatagtaaaacctaccaccatgtgattaaacacgacaccaaaaagtttttagctagttttctatttatatccctagatatctttgggatagggccaaagaaatgagttcatagaaaggtataaaggccattttaagtcctggttttgggtgtgtcaatgtttgttgcagcagcagaaggaaggctgaaacagaaagttgtgtcataaatggaacaaatactgtttaacaatttttttttgtcttaaaaacagcaaaacccaccatcttcctggagtctgcgttgttctcttccagaatagatgttgagcttttaaacaaacctgcagtagaagcaagccctctccaggaaatcccaatctctttccaaacagggacagcaaaggttctctctgttgtggctgtttttccctctcttctgggaattggtttgccttctgagagcatcccaggaaggggaggtgcgccccaaattggcgaggctctgccaaataccaaaggctcttctttggaagaagactcctcctttggacgtgaggcgcccctaccagagcgcccgcgtacagaaacggaaaccactagctgcgctgaagtgagtcaagtgatgaaatcaagactacacgggaaggaagctcacgaaacctaactggtgacagaagctgctgaaccctgcccgaagaaaccacatgagccagcagttgctgccctcccgaagtggtcctcggaggcagcgcaccccttcattttggcgaaccgaggaggaagggaggaaccgtgtgggggaaatctagaacttctggttccccaaggacccagcagactgtgttctggctacaaggtgatcactgccaccaggtcagtgcaggattcctccaatgtagatgggccgggagccacaacttgcgcggagcagcagcctcgccgaccactcagagagaagccgcgcgacagccaggcttggcccggacggcgcccccaccctgcgcgcgcgatccaaggttctcacctggagcgctcaggtagggctggggcggggcgggaggctggcgcgcaggcgcggaagtggggcctcgcccctgccgacgtcgcaggctggagctcacctgggagactccaagtggaagccgagcctcggttctgcctctccaggcaacgcgggaggcccagcgggaaggcaggaggcggcggcggaggaggagctctactgagccgcaactgtggcgacagcaaccggagtcgcagccgccgccacctgcacctggcgcctagcccacgtccagcgcctgcccggccgccgcttcccgccaccctgccctgcccacccgccaggtaagccggcggcaggcg

SEQ ID NO: 24802 - DNA, 2300 bp, Homo sapien
ttgacatcctgtaattaagtagatacagtatttccaaaagtcttttttaaagaatattttgtattgtggtgaaacatatataacacaaaattcatcatcttaaccatttttaagtgtactgttcagtggcattaaatgcattcgcattgttgtgtaagtcatcaccgttatccatcaacgttttgcgtttttgccattccaaactgaagtctgtacaccagttcctcgttcctcattcctcttcccggagcccctggcaaccatcattctactttctatgttgatgaatttattctaggcacctctgtaagctgtatcacacagcatttttccttttgtgtctggcatatttcacttggtataatgtcttcacagttcatccatgttgtagtgtatgtcaaaattttctttttttatggcagacatacaatatacaatattcctttatatgtacatactacattttgattatctattcaaacacaatggacatgtgggctctttccactttttctgtgtattgtgaaggttgctgctatgaatgttggtgtacgaatacctgtttgagtctctgcttttaatcttttgggtatatactcaggaaagttgctgaattacatggtgtcatctcttttcaaatagcaaaatagagtcaaggataaatagctttaaaacaagcttttttgtttgtgtgttttaattgtagaaattcaacctaagaacatgttcagaatagcttatttaagggtttttacaagtcccctacaaatccctagtcctgtactaactgaaacttgagcacacaaacatctaaaagacaccactataaagaaataaataatgtgaatcatcagtaagtaggcccttatgcaaccattaaaaatcacgttttagaagattgtttaatgacagttgggaaatgttaactgtttaatgttcatcaaaatcaacattaaaaccaatcaaaaccgatcaaaatcaaaaccccaatgtgactccagttttgtatatatttaaataaacatctattttgtatgaatgtaaacaaagaaatatctttgcttacatttatatataggttggttttcaaatatatgaaagaaagcacaccaaaatgtgctaatctttagctggaaatatggtgattttttttttcttcatactttttatatatattttccttattttctgtagtgtctatacattatttttgcaatcctaaaaaagatttattaaattattctcaaagcttagtttgttactgataagagagaactagatagaattggaagaaggctttctaggaacctgccaggaaattatacctgagatcaaaggaatgaatgaatgaatgaatgaatgaatgaatgaatgaatgaattttttttagaagaaggtgaaacaggattaaaatatggggactaatatgctaaggttctagtatggtaagctagcatatggtatgttagctacatgtacatatcaaagagagactggagaaaaatttcttattgtccatcccatacattatttgtcaattgtactgttcccacacccttcctagcaacagtatgtaggagaggggttctcagagaccgacagtgaacttgtcctgtgcaattaaatcggtattcctgaacttcacagttgaaagtctagattacctaggtaggggctgtttctctaaggttttggtcccccaaacaatagaaaagctacaagaaatatgcatttttctagatttgcctatgtagacactgtgaccagcctagcccaaactgtattatttagtagatcatctagttggccatacagcctctatagggaattataccctgaggcattttttatttatatttaaaatgtactttatatgaagtaaattatactctaatgaagtagaattataaccaacaaaagaaacagtataaaatggtgcccatatctgaagtattatttgtttctagataattatatgacattatctcgtttgattgatctcctaagaagatgtggaaaactcgaggatgtcccaagatttttctcaatggctgagaaacgtaactccagagcaaaattggaaccaggatttcagtattgtaaaggactgtatctttggtaaatctatttacaaataaatgctacatgatttttttttctcattgtaaatcaagtagaataagcttttctttgtagtaaaaaaaaatgtacatttcaaaataattcaacagttttatttaccagacagattataaactaatataaattttgtagtcagtgattgaaataaataattcttt

SEQ ID NO: 24803 - DNA, 2300 bp, Homo sapien
catatgtagagtattccactgtatcttaatatcataattgatttgatgagtctcatattggaatagacatttagcttgggaaatagttggaagcagtactgagataaagtccttgtttatatacatatacctctctgtacttcctagaattgaatcttgccccattgttctttcttaaggctaaaaacttcctgacattatgtcgtgttagtcatgaaaaataaacattttaatttacatttctttgatgagtgataaggttaggtattattttgtttatatatcttattttcttctaggaatttttaatttatattctttgtctttaatcctttacctaatgttcatgttgtagatattttctcccgggctgtcttttcttcatcagatttgtttattgtatctttgatcaagtagaatatttaatgatcatatatctgcttttcatgtctttttttggcttctgaatttcttgtcactctctaaaagaccttccctaatcctaacgttatgaaactatttccatatatttttgtcatttatattgttttcatttttatattgagaactttaatccatgtactttattccacatacaagttttactatatagtttccaaaatggatagccaattttattttcatgccatttatggaactggctcctttattttataataaactccttcatatacattgctctgattataggaatctttgttttattccattgtgtatgtttcttttcttttgccaacaacatgtttagtgtagctttaaaatacatttgaacacatgatgagagaagcccattgtaagttttctgatattttcaaaatgatcttttggtttagctttaatgacattggtgcttaaattcttctaattataaatgtatttattgtatgaagtgttagtagttccataaaaatatatgcatggatttgtcagatcttcttttgaaacacttgaaaggcctaaatgtggatatacattttgaaaagtttgtagggggagagagattcaagtatcatatgttttagttacaatgggtatattatatttatgtaacataaatgctttcatttaatatttgctgagcatacccatgacatacttagatgccttcatatacgtttcatacattatctcatcaggactcatattaatctttgaggcaaatataatcatacccattttaaatttagcaatctgaaactcagttttattgatgtgtccaggactacctagttggtaaagtggcatggcgtgtcatgaactgtgcacttgacaaatggtggaggaaacatttttgttaattatctagggttcttttattgttcttagacacaaaacatttggcattaaccaaatatttatatagaacttaccacgtaccagagtttgttttcactactttgcatattttaacttatttagtaacttattagctattaaaatcttgcatccaccctgtgaggtagttactatcatttttcctattttacagatgagagggaactgcagaatggttaagtaccttgctcaaaattagagggctagtaagtggtaaagcctagatttgaaaccagaccattcaacatcaaagtcagtgctcttaacaactgtactttattgcttatcaaatatctatgatttttaaaagagcagttatcttcttaattgcatatagcaactactctatcttctaatgacttcagtaaacaaatttttatacacttaagaataaaaatggaaattattgtggtgttaaattgttatctcctaatatatgtctaagaaaagcctctagttgttaacccgttctttaacttttcatccagccagtttttatcctaaatcttttctttttttttttaatttggccattcttcaggcaactgattgagaaaattttaaccgtattcactatttttcaaaatcattttttctagagaccagttttaaaaattctggaaaaatataaacatttatttaagatgaataattttttgcattacattccattctttcatagtaaatgaactgtcagctctcatggaggatggacgttgtcaagttcttctagcaaaagtttatagtaaaatggaaaaacttggtgatgcgatcactgcattacaacaggtaaacacatttgtctgtgagtgtggtcatgaggtaggagatggatgcagaaggaaatatgccatgtataagaggaaagcaatctcttttggccaaacagctacagaaaatatgtcaaaatcaaaatacttattgaatgcttatgaattatacat

SEQ ID NO: 24804 - DNA, 2300 bp, Homo sapien
acacacacacacacacacacacacacacacacacacacagattgctcttcctcttctccccaaacagaagggtaaacatagaagcatacactctatgtaagagaaaattaacgtttttagctcttgagatcatagtaaactgttgatgaagtaattcagtattggctcatctatattatatcaaactcaaaaagctgctcagattcttttaagcactgagtgattcagagaaactgagcagcaccgcatgtttagacagatggactggagttcctagattgtgttttctaaggtatttccagaagattatcactgtcatctctaatgatatgaaaataattcaaaatagggttgatttatttttgatgtactataatgtaatagttaaaagtataggttttgtttcaggaagatctgacacatcagctgcaactcttaacatcatctgtaaaactgggataataattctcaagagtttttggaccagttagatgaaatactgtatgttaaagacttaacaccacattattatttcaataactttggtaatttgacctttagtagtctacattttcaggtcaaatgtaagcaacaaatactgaaatagaagattttgtatttttttaaggtaatttatttcagcatataatttatgccatgagtatcagagctcaagatgcataggaggacagtaaaattttattctcccatcatttttttggtaccttcactcccacatcatttcagaagtaaacatagcaaaatgtgtaggtccaaataaggagaacctagatatttactatctatctgaactcagttacctgcatttcagaaaatggaaagattcagtgacagaaatagctgatctagcataaacaatttgggtgtgggtatgcatgaggtttttataatattacactgttgggtatatagagatactctgaaggctactggctaactaaaataagggagcttattttttattttattttatttttggaagaagatatctgtgttcaatatgctaagtaatgttggtctgatttccagagaaattgctgaaagaatggctaaccctcggtcttttcttctccttggtgatgcatacatgaatattctagaggtaaaatttctgatgttactgaactgcatttttaaaaaattatttgtgatgagtacaacttcctattaaaaggaatgttttttaaaataatgtttaatatttgaagatccagccatcacagtaaaagggagatatccattttaaaggataaataaaataaaagggagatatcaatttttaaaaatggattctatttttaaagttgagatccagtaattcagcactattgttatttgaaatagagatgaggccaggcacggtggttcatgcctgtaatcccagcactttgggaggccaaggctggtggatcacttgagatcaagagttcaagaccagcctggccaacatggtgaaaccccgtctctacaaaaaatacaaaaaattagccctgcctgtagtcccagctattgggaaggctgaggcaggagaattacttgaacctgggaggtggagtttgcagtgagccaagattgcgccactgcactccagcctgggtgacagagcaaaactccatctcaaaaaaaaaaaatgtagagttgataccagaggtatgttaggagtcttcttctttatacagaaggataaagggagctacagactaaggtggtgttttcttcaaagggaaccaatccttcagccctctataactggcagtttaatgacttctggaaatgaaaagtcaagatggtgtctcttagtccacatattgttatttatatagacaagagcacagttaatatgggtagaattatcctaataaattatacctatccatacctgcttttctcatttatcacctttttgaaattgttaaagttcctgtgctttaatatatgccaagtcttatgtaatattacaaatgtagagattaattatagaactgttgccctttaatgggacccagttatgctattttttattgcttattttttgtgtctggcaatattagcctgaagaagccatagtagcatatgagcaagcattaaatcagaacccgaaagatggaacattggcaagcaaaatgggcaaagcacttatcaaaactcataactactcaatggtaagtactttattgtttgaaatatgtctgttgcatcaaatttatcataccctgtcctcgagaagcttcagcgagcaccatttgcatctttaatggttgtaaactccaaatctgtat

SEQ ID NO: 24805 - DNA, 2300 bp, Homo sapien
cagttctgctgaaggcgagtgtaatgttatagaaaagttgagcattctgtggttccatggcatccaatgtatttcccaagttttccagcttggtggaagcctaaaacaaaaggaactggtattaacttaaaatatactaagtaaaaacaacataatacatgcacatacacactaacaaagcattaccctactagtattttaaaagacctttgcttttataaattcctcctccttcaatggatgattatatgttataaaacatatttaagattctaacaaactcaataattataaatgtgttttagaatgtgtttctttaatacttgttattgaatggaaacctttggataggcgaagacacccataatattccattaactgtacatgcccagctccgccttcaatagttaattcatgacacaaatgagatacgaatgataatgtatttacaagtatatgaggtcagcccttcaattgcctatacagactggtttatattcaaaatatattctagactagaaaaatcattacagtacttagtataagtaatttcaatgcctggaaaatttactgaagatttacccctactaagatactcctagcatttactgaagtatctatcaggcactgtcacattaaccaatttaaccacactaaacaaaatgcaaatctactacatgttatactaatattacttccttcagattagagtttggcactccatgatccaatctacagtcaatgtgttcactactacagaaacagatgtgctttattatgaggtataatgggattttatcccaagcccatttaatttttgcaaattcagttaaattgtaaatatactataaattacattttgcatacatactttctcatatctagtatcactagttacattacgtatctagttacattaatcatatatattactacacaggagtttcatacagaaagccatatatactataattaatgatttaagggattttcaagggtaatattaactgtatagtatttttgctttaccaatagatttcagaagctgacctctttgttaaggtatactctagtaatcaactaaaaactaccatgatgtatattttaaaagagaacttcaaggctttaatgtatatgcacatgcacacatgggtgtgtatgtgtaatgaaatatattttttaatataggaaacttaaataatacaatgccacttaccttctctatatccccctctctacacacatagtagagtgcctgcattctcagtgcttccacattttggctatcttggagcagcaacctgcaggaaaacaatttagttaatgtcaaaataaatttatatattttcttttattcgagggcatgaaaagttggtttgcttgcctcactattccactgttcaaataagtaattttcactagtaaaatgtcatctgctttgtgaaaattatcaactttattatttaaacaagtaaaagtctctggagtttaatttttaatatgtttttaaaagatatgaatagattatactagtctcattaaatcttgtggcaatcctaaataaaatattagctaactatatacaacagtatagtaaaagaataattcaccttaaccaggctgacttattacaggaattccgggaatgcaaaccagggtcaaacattacaatacctactaatgttattcacaacaacagattcctacgtgataaaaacaaatgagaaaatattacattaaaaaatcttattaataaatggaacaaaaaccaaaaagaaaaacataacaggcataaacttaagaaatgtgcaaaagctataaaattcctatgaaactgtactcagggacatttttaaaaagaactgaaccaaaaaggtaacgccccagacttctcttatcatggatgatgtggtacatatcacaattactggttccagtttttcaaccctccctgagtacgtgtcttctgccatgtaactaactacaaaagttggagtgtaccctactgcttcttgactagggacttggacatttttcttatattggccaatggaatgtgggcaggaatagcagtgtatcaacctaaattttagaggcactgcatacttctgcttgttctctggcacttgctatcagtacaagaagaatttcctctgggtagtggctgctacttgttgtgagtctgggggaaacactattggaggtgacaagagtccaaactgcaatgatgtgccacattcacccagctgcatctgaactgaagcagggccccagccaagccttgcctgagatcagcagac

SEQ ID NO: 24806 - DNA, 2300 bp, Homo sapien
tgaattgtcttccaccaaactggtccctggtgccaaaatgattggggaccactgctatagagcactacgtgtttaatggaaactattggttatacaatgcctattatgtgtcaggaagttttaatatgtctgtaaggcatttagtttctttagtaaataaggaaaatgaggcttagggaaattacttccccaagtcacaaaagtagctagcgtaataggagctccacctcagatgcagaagagggtattcttgccactacactgtgatatttttatacccatccagttatggtgatccttaaagacttcatgaaatttgaaatgaactcagaagaaggagattttctcaggtgaagaaagagctcaaaacaaagtaggggaaagcattaccagaagaaggaatatttgtcccactgagcggaataaaggctccttgaaggggaggtagaagataaggcttgaaaagacgatgaggtgaagggtcatggatatcagactcaaaagtttgtagctagtaaaagtgagccgataaaaatgttactgctaaggaacacatcgatttttcaggaaagacaagagtttttcctggcctgagatccaaaataaatttcttacatgagatctagtaagggcacagggcacaccaagtcaccgtgagtgtcaaagcaaatctcagagtacttttaatccaacaaacatttatgaaacatcaggcttggtgttttgtgctaaataattcaaccttagaacagaattcagtgaagagaatacgaggctaaattaatatgactttcaagatctccaaaaggtaggttgatcatctgttctgttaaccatgatcctgagatatttccttacagatgaacttttctcttataaccaaaggtttacagttcaagattatacacttcattgagcaccctggtcctgtggtattctttgctgtataccaagtgcggattaatccgcagctttgaaaatcaaagagatatcaccagttgttcatcaccacagacatttagctggactataaatattggaaagaaaaaaaagttgctcgtgaaaatacgtggtgaattcctttaaagagaaaccggtgagaaatattgcttcaccttaaagcctaggatggtagctaccgtttttctcaagactgtccttacataacctattggcatggggaaaaagtcaatgtttataaactccttaagaaacttaaaatctggaaaaggcaactacgtatcatgtcaactaaagtaagataattaacactaggatcaaaatttggaatccacgtgaaagattctgcaaagatcacttaaatctcagaccttatgcactattttaaatatttatttaagcagaaatagaaaatcttagtctattatatttccatttaatttcctggacttaagaaatctatgtgtgactgattgagttgcctaatggggtgcaaacataaaaatttgcattgggattcattttattctcagtttaaaatcagtagtatcattgaaaacaagacactaattttctggaagtttaatttatttgtccctcttattatcggggctggtaaaaaagggctaattgaacacacattctaacaaagattgcagcaacgcctgcaaagacgggcccaagcgcaccgtatttctgttaagaacgtgtgattttttttttctgcgccaccttgtggccgtaaaacaacttgcccacgtgaaagttgaccgctttttcccgcgccggcagagccttgctgagagccgcactgcgggaatccgcctccagacaaacgtgcagaaaatggtgtcttcctttacaaccagtgacaggaaacagacttccccttcttcatactccgtttcctttattcctgaattccatttcctcggcccgcccacccactgtcctcagacagccgtttcccagtgtgacctccttttccagctgcactctccggcggaggcccttttcccagcccggaccctcccgggcggccctcgcagccctcacctccgggtccccgccgcccctgctccattacagcacgatccccgccacacaggcccgcctctccctccgacagccaatcgcggcgcgaccccgcccctcccgctggggcccggggcgctagagcgctccgggaggctaggggagctgaattctgcgtcttcctttaggctgcggcgagacaatccccagagccccgcggcccggcctcggggcagccatggactcgcaggaattgaaggtgagcgggtgagcgggtgagcgggtgagcgggcgggcgggcggag

SEQ ID NO: 24807 - DNA, 2300 bp, Homo sapien
acatgcattgatagcatccaaactatctataaatggtacagaatacattttattacctgtgtaaagcttgcactctacatttcttgtggtacatatttgatgcaataaatactgtgcttaggtcattatttgtttgctcaaacgtgcaccacagggtaaaatgactatttacataataaatagcatttcattaacatatacagtgtcaaccttgctgagagccgaagatggctaaacaaagtgcaggaaaaagcagaaatttataaagagtaattttggtcaattcagtcttctggcggtggagggtgaggggcaatattcactattcaggttttttttttaatacaacaaaaagaaacataacatttatgactccaaacatttgaatgaagtttgcacctgctaagatttactggcctacccacaaataatctacttggtctaggggctggatttcgcaaaacaagatcaacaaagcacctccacttatcacccaattacccctcccagaaatatggtgaaatttaagaatttgtttttcttgtgactttttctcatgcatgatctctaagtgcagcatgccctcatgcaaaccacgactttgtgtagctgggagggccatgtggttgccataccccccaggtggcatacctgttatagaggtccttagcctatttctcaacagaaacttcgtttacaaaaatagtcacatataataaacacatggattaacaaaaagatgaatccactaacagattccataaaaatgtgacaaatgtggcagttgaaatgcaaacagtggatacaattactacactaaagtgtttcatgttaaacaaccccaaaatcacaggtttgcaccccttgaaactggtccctacagtctgactagccattgtgcatcttatcttcagcagtgtcagctggtagtgagaacagtaacctcctgtcaaggtcatctcccctttacacagagtcacagtttgctgacaaggggtcactgtcttattgtaggcactgaccttaaggagatttgtgtaaaaacagtcagtttggcattgacctcctaaaggagtcctgttgataaaaatacatcaccttcacaggctgtaaacaatttgtcacccaattatttttatttattttcatttatttccctttggctttttcatctttgccttcttgctcatgtttttccacaattggctttgtcacccggtcataggaaggtggacaagctgcagtggacatggtcagatcagttttttctgtaatagagttttcatttattctgtcaattatcatgtcttcttttataagaagattagccccacctttgattttgtttttattgtacgtaaaggaagcttgttttacagttcgctttaaaaggtggcgtctgtaagcacgctgaataatgacagcagatacttcctcttgttttcgttttaaagtagtagtgattggctgataggagaccttggaaggattggaagccatgaatcgctcttccatctgtattcgtagagcatccatctctccactctctcctagaacccgctttgtaaaagcaaataagatatcaagacagtggatccggtcaccactcaccatgggcaaatccatggcaatgagctggagtttgtttggttgtggcagattgagaggcggttcaagcgcagctgcaaactgagataatttttcaaattccatgaactgagttgcatcgggatcaaacttctcccaaacctcatagaacatctcaaagtcatcctcactcagaggctctgcactttcttcagtagcaacactgaagttctccaggatgaccgcgatgtacatgttcaccacaaccaggaaggatatgatgatgtaactgacaaaaaagaaaattccaacagatgggttcccacagtctcccttaactgagcttccagggttaactttattagggtcacagtcgggtggcttactgttgagaatgggtgctagcaatccatcccagccagcagaggttgtaatttggaataggcagatcatgctgttgccaaaggtctcaaagttgaacatgtcatcgatcccaacttccctcttaacataggcaaagttggacatcccaaagatggcgtagatgaacatgactaggaagagtaggaggccgatgttaaacaacgcaggaagggacatcatcaaagcaaagagcagcgtgcggatcccctttgctcctttgatcagacgtaggattcggccaatcctagcaagacggatcactcggaacagggtaggggacacgaaatact

SEQ ID NO: 24808 - DNA, 2300 bp, Homo sapien
gtaactatcataaataaacattctgtacaaagccaagtctacctttaaaaattaattttataaatatatccacatatatttgaaagtatgtgtgtaaaaatgtattacttgcaactttattcaatattagctaaagattggaaacaacccaaatactcacattcagggaattggttaaataaattatggcacataacatgcaatggaaacccatgtagccagtaataggtacgagtcaaatctataaaaattaagataaatgaactctaatatacattttaagtaaaaaatgctggtgtaaaacagtttgtataataagattccatttgaatatgtattttaaaatagaatatgtatacatacactcatgttctagcatatacctattgaatacctggaaatatatatgggagataagtagtagtagttgcctctaggaaggggaactgggcctggggaaacaaggtaaaaaggagatattatactgcattttcttttagatatttgcatttatatcatttacatatattttctatcaaaaagctatttaaaaataaaaactatatatatacatcagaatattttatttcccttttgagaaaagttactatatttgttatccctaaacttttatttgcaaaaaataaatgttagtattttcctgatgccttgtaggggaaccagagtttgtagacagaacattcagttttcattgatttacagacaacctattcttgcaggtactaaataactgcaggttaagttctaagaaccgctgaaaacttcacttagtagactaagggtacaaatttaaacttgagtcctcccttcttttgatcatccactctgaaaaatatggttataaacctcacaacaatgagaacctccttgaaatttgaggtctctgtccctcacaaaataattatgcctgcaattttcttattgtagttcatatacaccaaagctataattaactgtaccatagcttgctgaccttaatgagttaatgcagtctccaaataaaattcatggccaagtggcagcttaggctctggaatattttggctcagtaatatctgtgaaatctgagctcatattaaatatgccttaaaacaatacatttgggatttggcgtctggcatcagatcaggtctgactctgctgtatggggttgacggttttgcctcaggccttcataatatggttagcactataggactatagaatcagcaagaatttcattattgcttcagtgaagaaaaacacttagtttctattgagtttatggcaccctgacttctttctgatcatttttcttgaaacaggagactcctgctgtctcctgcacctacagctatcttcttccacccccacctccatctagcaatttctttacagcctagttttcctctccttcttactcacataaatgacatttgtccaaccgtggactgtctttatctttatgtgttcaagtaagccaaccatgcatggctagtgaagtgagcaggacatagttccagttgtctcaaatcttagaagaggttaaagcccagtcaagacagcaataactatttgattggtcattaaggttggtcactgcaaactatcctgactatcttggccaggaatcacttgtcagacctagagggttagattttatgtcctctcagagacaattccttttcccctcatccttgttaaatgagctatcctttgcctttatacgcacagtctccatcttctgggtgtgtcacagactgaataactcattagtgatatagtgttaattagcctaatgtactttgattaaggccatatttgaaccacttttaaaactcatggcacagttcctgtatcagtaaagcacaagaattaataaataagtgatgcttaactaaactcaacacagaaaccatttgtgttaaaattttttctttagaaatcacctttcaatttaaggagaaaacagactttaaatcctctagctcatgtttcatgacaagaatttatttatattaacatctcttagtccactctttaaaatatctgtattccttttattttaggaatttcatatgcagaataaatggtaattaaaatgtgcaggatgacaagatggagcaaacagtgcttgtaccaccaggacctgacagcttcaacttcttcaccagagaatctcttgcggctattgaaagacgcattgcagaagaaaaggcaaagaatcccaaaccagacaaaaaagatgacgacgaaaatggcccaaagccaaatagtgacttggaagctggaaagaacct

SEQ ID NO: 24809 - DNA, 2300 bp, Homo sapien
acttatctagtatgtctttttccatcaattcggtttcatccttttcattttactgttttagcactttccttaatatgtatatgtttagatatcatatataggtatattttaacatatgtgatcattacgacaatcaccgtctttcagagtgccacacttgatgttattgtccatgaagttgtgtgaatggacagaaacagttactaaaagccttcctattctccagaaatactgcatttgagaaaagctctctaaagaaaatctccctggtcactagctatcatttactggagaaataaacaaccaagaaagtagaagacatgaattctacactgacaaatatgatcagttcaaacgtattatatataattataaattagttagatacaggaattatattcatatgtaagcaatataacccatattataatgaaatcatactgatactagaaaaagtatttttttaactctaagtagatcttctattcaaatgctacctaaaaataaattatgttatattaattataagaataaaactcattaaaaatctcataaggttaattatgaaatacctaaaaaactgtcagatgtcattcaatattaatattttttagtaatatgaaaaattgttctaaattacatttgaaatctgtacttattctattaaaatacagaaataaatcatgaattttccatttacacttacaaaggagatttcacctctttattctaaaaatttataacagaagacttaattgtcctaatttatgaaaatacatgtcactagatacggggtagtaacctcatagaatctgcagttttggcttacagctttctcttttcataaaaaccagcatttaaatatttggttacatagaggagaccttgctcctttcaaaagaggtaagacaatgaaactttcctaacaagagaagacttcaaagagagaggccttttcaagatgattatggttatgcatttggacaaaataaaattaagaagagaactaagaaaccatagctaggaagaaaaagtaacaaagtgcatgttagcaaacttcaaatctgaaggaattttaaaaaatattggaaataagtagagtagtgggcaatagaaaactggaagaagaatgattctttggaagacaagaaaaatacattaaaagtggaattcaattagataagcaatcctaaagaagacaggaaaaaaataatccaaaagaacatgaaatggaagtgagagatcatgggggaaaaaaaagattgtaagaaaatgaagtggaaattttgagtggaaagaaatagtaaagtaatagcaataacatgaccaatatcaaataacgtggacaaaagaattataaggaaaaatttgttagaatatacaaataataaataaagatataatatcatctggtaatatctaactgaaagaaaaagagggaggtaaatctgtagcattataattaacagattaccttctcgggagactttacaagatcagaaagttaatactgataatattcagtgtcatttctaagactttactaattcattacttatcataaatgttctagtactagatgaggtttttgcttctgggcattatatatctctgtttcccgtagaagaggacacatgtattacgttctggacttgaggaggcatttatcacagccaaaagatgtttatacttgaggtgactgggagtggtaaaccatatggctttggtgaccctcaaagtgcagatggaggagctttatttaaagtaatcctaacccatgaagccttacagttaaactcccttgggcatctgcttttctccagtcaaacaaatatgtacgatagctcacaatgaagtatttcattttccctgtggcatttcacacagaagtcttaactgtaaaggcaaccttataaatgctttgtacccgaagaaactggccttttataagtaaatcattatgtagtttcttcctttggagggcagctctgtgtgactgcttgggcctctgtggttagatctgtttggttaacgggcttttgggctttcacacaaagctatactctccacaaacttctgtgagataaaaaggtgatatctgtcttagtcctctgaatattttttctttgttcagaacctgagaaagatgaatgaaatttagtgtttcccatccccgagagacacccagcatccacaacttcacactctgatgccattgtgtatttatgcaagaaataccataactaaggtaatgtcttgagattttttggttcaataatgtccttaaattctatgttgtt

SEQ ID NO: 24810 - DNA, 2300 bp, Homo sapien
tgccctcagaatctaaaataaaagttgaaaaagacaaaaaaattagagcaatttccatgggttatcaaacttagctgctcattacaatcacccctggagcttctaaaaatttcaatacactcagctacaccccagattaatttaagtagtatctatgggaagagacacaggcatgggttttaaggtctccaggtgattgtaacatgcagtaaagtttgagaaacagggctcttaaccagcattttctcagttgtcatgcatatacaaatccttggcatctagagagcccctcctaagtgtggttactagacaaaaagcctcagcattacctggagattgttagttagaaatgcaaattttgagccccactgtatatttattgaatctgaatcagaacccctggggtacatgccagcattctgtgtgttaaagttctccagctgattctaatgtgtgcaaatgtttgagaattaatggtctcacctgggaccattctcctcctcctcctttttattgctgtcaggtggaagtgacaccatcttccaaaggcatggaactttattacttcattgacagttttatcctggaaactgatctagcttttgtttttcaccagaatttctaaacaaataggcacaagctgtttgatattgggtcactttttctttcaatggctggtccccttgatgtctaaaactttcgtgttttaggagggtgtcgaaaaagggaattagcaaagaagggaaaaaagaggagagagcatttccaagactttgttggtgcactgaacttttagaattctcattccaactaattatgtactacacatatagttaacactaaaaataaaatttgcatcatctgtgagacatctaggatgttcggaaagtaactatgatcttacaaagcagcttgacactgacaatactcttgtttgttgctttgtttttggtggttttttttactactactccctgaaacaaatgaaagatgtggtatctggagtcagatctgaatttgaaccttgattttaccccttttgtgatgtgtatctgagcatgttacccaagtttatttcctcatctctcacagataactgacaaattagtttttagcattgtgctaagataggagagcctgaacataaaatacctcccattattcttggcacctagtagatgtcagtggtgtgctggagccttcttgggccagctggagagagcaatggtgcacggctccttccaagtctatgttcagtgacttcagattgtttgctggaatttagccatgggatgagtgtttacaccacagaaataggcaaaagatacatagagaaaaggtcttatcctccaggagagccagttgctttacatttaccagtacaccattggtagacatttctttcgtggttatctgttgatgggtagattttagaaggtaatttgtttttctctcatgaaacaaaagtagcaaagcatagcccaaatgggaggacgtcacagaagggctccaggaaagcccttcctgagatcactctcttaccatgtatctattatgtattctcagaatttctctcaaattcccagactcacggaaaaggtgacactcaattatgagcagacactgacattttttgtgagattagttcatcagaggttttccttctaagccaaactgactgagttcagggatctgaaaaacacaatttaactaatgaggatctgttggctgtaaggccatctagggatgaagatagctaaagcaaacaatgtctgtagctcatggggtaacatttatcaatgcagaggagacaaataaacacataatcaactttccataattttagataatagtaaatggtagatgaaagtaaaacagtttaatttggtaaacagtgagcagggcagtggaattgctttaagtaggctcaccaggaaaggcttctctaataaggaaatatttcaactgaaatctaaaaggatgcagctgtgttctgaatcagagaacattccaggtgacaaagagcaagagaaaggccctgaggcaagaataaacttgttttcaagaacagaaagcaggttagtagagctgaggcactgtgagtttaagaagaggttggtgttacatggagcagcagcacagtcaagcagggaacagatcacgtaaagccctttagagagtgaagtcggctttttatgctaggtgcaactgggagttctgaacacggtaagaagcactggtggtcatggagacagtagcctgatcgccaatggagttttttttttttattattattatac

SEQ ID NO: 24811 - DNA, 2300 bp, Homo sapien
attcccacccctaatgttcaagtaaaggaagaattgcgcatttctcactttaaatcagaagctagaaatgattaagcttagtgaggaaggcatgttgaaagccaagataggccaaaatctaggcctcttgcactaagtacttagccaagttgtgaatgcaaaggaaacattcttgaaggaaatcaaatgtgctactccagtgaacacatgaatgataagaaaacaaaacagccttattgcaaatatagagaaagttttagtgatctagatagaagatcaaccagccacaacatttccttaagccaaagcctaatccacagcaaggccataactccaattgtatgaaggctgagaggtgaagaagctggaaaaaaaaggtttgaagctggcagacggtaccccatgagattgaaggaaagaagtcactgccataacataaaaatgcaaggtgaaacagcaagtgccaatggagaagatgcagcaagttattcagaagatctagctaagatcattgataagagtggttacattaaacaacagatttgcaatgaaggtctaacagccttctactagaagaatatattatagctagaaaggagaagtcaatgtctggcttcaaagcttcaacgaacaggctgactctcttgttaggggataatgcagctggtgactttaaattgaagcaaatgctaatttatcgttcagaaaatcttagaattatattatttaattattcagaatattaataattatttactattcagaaaattacataataattatattatttactattcagaaaattacataataattatattatttactattcagaaaattaaataattatattctttactattcagaaaattaaataataactatattatttaattattcagaaaattaaataataattatattatttaatcattcagaaaatctcttaagaattatactaaatctactctgcctgtgctctataaatagaacaacaaagcctggatgacagcacgtctgtttacagcatggttcactaaatattttaggcccagtgttgatacttatagctcaggaaaaaaaaaaaagatttctttcaaaatatcactgcctattgacaatgtgcctggtcactcaagagctctaacggagaggtacaagggcattaatgttattttcatgcctgctaacgctatccattctgtagcctatgggccaaagagtaatttcaacttttaagtcttattttttaataaatacattttataagactatagctgccatagatagtgattcctctgatgggtctgggaaaagtaaattgaaaatcttctggaaaggattcaccattctagatgttattagaacattaatgatttgtgggaggagggcaatatacaaacattaataggaaattggaatgagttgattccaactctcatggatgactatgagaggtttaagacttcagtgatggaaagaactgcagatgtggtggaaatagcaagagaattagaattaagagatggagcctaaaattgtgactgaattgctgccatctcgcggtaacttgaatggatgaggagttgcttctgattgataagcaaagaaagtggtttcgtgagatggaatcttctcctggtcaagatgttatgaacattgttgaagtgacagcagaggatttagaatattacataagtttagttggtaaaacagcatcaggctggagagtggtgctaccaaaggcattatcataaagacttttaaaagaggaaagttgagttgaattgcaccaaaggtaaatatagacgaaaagaaggggaatttaggaaaatttactcagaaaattgtcattttttactttaaagctatgaagcgtaaacttcaaatttctgagtataaagatggttagaaggcacgaaagataagtcccgcccattgcctgacacatagtaatcccttaacaagctgataattctagaacatgttaccttttgtagttgaaactaaaaatctgtttatgttgttattattagtttttaatgggcctttcttggcaggcaaatagttaagtctttatttctttgtttccatccaggcctcttatgtgaggagctgaagaggaattaaaatatacaggatgaaaagatggcaatgttgcctcccccaggacctcagagctttgtccatttcacaaaacagtctcttgccctcattgaacaacgcattgctgaaagaaaatcaaaggaacccaaagaagaaaagaaagatgatgatgaagaagccccaaagccaagcag

SEQ ID NO: 24812 - DNA, 2300 bp, Homo sapien
tctttggaattaaaagtattatgttatgataaacatccttgcaaatatgacttctcaaacttcagcaataatttctataaagcttaattgctgggccaaagagtacatgaaactttatttaagagactgttggtcgggcgcagtggctcacacctgtagtctcagcactttgggaggctgaggtgggcagatcacctgaggtcaggaatttgaaaccagcctggccaacatggtgaaaccccagctctactaacaatacaaaaattagccaggtgtagtagcatgcacctgtaatcctagctacttgggaggctgaagcaggagaatcccttgactcagggaggcgtaggttgcagtgagccaaggttacaccgctgctctccagcctgggcaacagagtgagactccgtctcaaaaaaaaataaaaaaaaaaaaagaaactgttgacaagtagcttttttaaaaaactgcactaagttatattctcacctgcactgtgtgtgggtagcctttgcctccatatcccagcctgtaaatggtcatattcattgagatgaatctcaattatgtctctacagagttagactattaaaattattgatttaggcaactttatgtctatcctttagaatttcgttagcttcagtcatcttcctcataggtttctgcttcctagaagtcaatgataaaattttcatagccttccataaaaattaaaaaaagcaatgcatttaatatcatttgggttgtaaaccctggaggggaaagcattctagtcagaaagctctaagggaaaaggccctgcattagagaatttagctgtaagtcattatggaatgtgagaaagatgaaatataagccatgatatatctattaagtgcagtcaagttgcccaaaccaataaaaatgtcaatataagttggtcactaaattgctaaattgatcagcaggtatgagtcctacattctcaacaatacagattatgtacaatggtcacattaactctgtatctttgcttatgccgatggtaccttctgatcccaagttaacttagtcttattatcatcactgctttgtttttacacctatctaaatgtcattggtgcaatagacatgttacgttgtccatgtctgatgtacagcataattgtttcaaaatagcttgaaaacaactaagtgagaagtcattttatccttatttcctgctgcacacggaatgaaattggcatttgcaatattatcctcagtctattgatccactgtccttacttttttgtttcatttttcttaatttatattatcttgctctatggtctacattcttgaatgtgaacctcaatctttttggaatgcattaggaatatatatttaatatagaatagaacattcgacaattctatttggcaaagctaatctaacatttgttttgtctcccctaggatcaactccagtttctcagaaagcacagagattgattctttaggtgctgtattttcaattccctaagatgggaataaatggaaatgaagaggctgtgactggcctgggcagtcatctcctacaggtggagaatctctctccacagcttgagtgcattgctggcaggctgtgctctagaaataaaactgagggacaggggaaacaattgggaattgtgagtagggaagaagaaaaatactgacttctggcattccttttcttccccatccttcattatctaagaaaatgcagctgcagttgctgtttcaaaatgctgttgatgcagcctcttgcatgggaactgggctctctagagacagcattcgctcactgattgagtggccatgtaatttatcatccaactcaggatgtttctgaaaaggaaaaaggatgtaattaatagttaatcctcaacaacaggcataaacccaaactgcctccaagtaacctagaactttaggaaacattacttaaacatgagattggatgggttggaaaggagaggacagagtggaagaaaaaagaaagttgttatcctggaggtgggtgggagccacatgcaaaagtgaatgtcccagttgtgtttgtctgatttcaagctttagaactgttttgcaacaggtcctccaccatgtgaatgccaacatggccaggtcattagagctgagggaaaactagtgcccaaagatatgaaaagagtgtggatcttctggagaagtgctgttgttcaacaggtatttgcctcagcaactcctgtatatgctctatctctcatactcaggctatcagatgagaaaaaacaaacaagaaaatgtaatgat

SEQ ID NO: 24813 - DNA, 2300 bp, Homo sapien
gatgatttggagaagaagataatccattaaggatgaaatcagaagttaggctgttggatgcttcatccaaatagttgttggtattcaaatggatgagaaagtttttaagaaggaaagcaagagtttgaatggagggaaagactgtcaaccacagaataaattcttaataaataagagtgtccataaaggcagaacataatggctaccatgtagccaggtagaaaaagatgatgaaactggagaacatatctccaaagaaagagttttgggtttgtttgagtgtgttttgggagagttgtttgcttgtctttttatacagggttttgtcaactctggatgtagagacttttttgagaattaaaacatcgagtccatccacacttctgacactgacatctctgaggtcacaataaacagctcccatttaaacagactgaaaggaagctaatgcccacagtggcgtatcgagttcaagtgtagtgtgatacagccagcttctctcctgacacagaagagtatgtggggtctagagctcccacctactgaatacatacttagaaagtagagtttagaaatatgcttataaagttcttaaggcagaaatgttgaaaacagaccctccactatgtagttcctcctgctgagaaactcagtgggggaggaaggatcctcagctcattattaggggcacgataattgccaaaacttttcagatccaacctggtaatattacataaccgttatataaccgtagtgccaaatatttgtcccaaaacaaatatttgttccaaaacaagaaaatggctagctaactcagaatataaaaccaacaccattagtttcccatctatttgcctctcatttatgtgattggtttgtacaatatcttgggatcaactgcctgttcattacacattataaaaagcagtacttctttttatttattttaaatatcacatggaaactttgaaatatttgatattaagttcattaaatttatattgtgtttgaatgtacagaaaggtgtgtagaattttactgggtgaaaagggatatatgtgtcagactgctctaagggaaggttttatgctctagaaaattcatttgcatcatcaccagagtgtggagaagagaagcctgcagtcagtcaattgtccattataaagaaatcaagtgaatgtttgatgctacaaaataattattgctaattatagatgtgatcagggtattgagttaaaatcttaagttcttaccattcagagacatatgctgatatatttttgaagtaagtgatgtgatgtgtgcataaaatagggttacaaaatgaaggttctatggtgtggcctttgggaagaaggtgcaacccctctggccttcactcccaaactacactgtattgccgcagttttctaaaataaacataatttttcctctgtccctcgtgtttcaaatcactagagtgggaaactgatccagagtaaaagccagctccagctgactcttgactctcctaaaaacagctacacacatactcacacaacaacaggattacaaactcttaattacagcaatgtccagatttgaatgctgcaggctgacaattgcccctctaagttctgctggggcacctaggcaaggggagagagaatacaactggaggttaaagaaccagagttttctgtcttcctctcctctccctcattttcactctcccttccccctcagctgcaccgcgctgctccttttcctctcctccttggatgttccctagccccttcattccttcacgctctgcaggccctctcccctctacccctcctcatcagccccccgctcctcttcctccctcccttcccggcagctgctggaggagacgccacagctgctgctgttactgcatctgcagcaggtctctgtcaatatcacccgcccacgcccgatctggatgctgaagtcgctcactggcctggagattagggcgggggagagagtggagtggctgggagaggggagggaggagtggaaaggagacaaaaacagcttccaagcagcgggcgcggctccactggacatctgggtaggaggggtctctgggtcagtggctggagagtcgccccagtgagtcggtgtctaactggccatttagtggggcccatttactgcagagccacagctggtgaggacagacgccagcctaacagcagcttctgtacaactagagctcagaaaacccgagagatccgtggagaaagagaagcccaggaggaggaaagggctccaaggagccctgctcctgaagg

SEQ ID NO: 24814 - DNA, 2300 bp, Homo sapien
tcattggtagcttgatggggatggcattgaatctcaaaattaccttgggcagtatggccattttcacgatattgattcttcctacccatgagcatggaatgttcttccatttgtttgtatcctcttttatttcattgagcagtggtttgtagttctccttgaagaggtccttcacatcccttgtaagttggattcctaggtattttattctctttgaagcaatagtgaatggaagttcactcatgatttggctctctgtttgtctgttattggtgtataagaatgcttgtgatttttgtacattgattttgtatcctgagactttgctgaagttgcttatcagcttaaggagattttgggctgagacaatggggttttctagatatacaatcatgtcatctgcaaacagggacaatttgacttcctcttttcctaattgaataccctttatttccttctcctgactaattgccctggccagaacttccaacactatgttgaataggagtggtgagagagggcatccctgccttgtgccagttttcaaagggaatgcttccagtttttgccaattcagtatgatattggctatgggtttgtcatagatagctcttattattttgagatacgtcccatcaatacctaatttattgagagtttttagcatgaagcgttgttgaattttgtcaaaggcattttctgcatctattgagataatcacgtggtttttgtctttggttctgtttatatgctggattacatttattgatttccgtatattgaaccagacttgcatcccagggatgaagcccacttgatcatggtggataagctttttgatgtgctgctggatttggtttgccagtattttattgaggatttttgcatcaatgttcatcaaggatattggtctaaaattctctgttttggttgtgtctctggccagctttggtatcaggatgatgctggcctcataaaatgagttagggaggattccctctttttctattgattggaatagtttcagaagaaatggtaccagttcctccttgtacctctggtagaattcggctgtgaatccttctggtcctggactctttatggtcggtaagctattgattattaccacaattgcagctcctgttattagtctattcagagattcaacttcttcctggtttagtcttgggagagtgtatgtgtcgaggaatttatcaatttctgctagattttctagtttatttccgtagaggtgtttgtagtattctctgatggtagtttgtatttctgtgggatcggtggtcatatccccttaatcattttttattgcgtctatttgattcttctctcttttcttctttattagtcttgctagtggtctatcaattttgttgatcttttcaaaaaaccagctcctggattcattaattttttgaagggctttttgtgtctctatttccttcagttctgctctgattttagttatttcttgccttctgctagcttttgaatgtgtttgctcttgcttttctagttcttttaattgtgatgttagggggtcaattttggacctttcctgctttctcttgtgggcatttaatgctataaatttccctctacacactgctttgaatgtgtcccagacattctggtatgttgtgtctttgttctcgttggtttcaaagaacatctttatgtctgcctttatttcgttatgtacccagtagtcattcaggagcaggttgttcagtttccatgtagttgagcggttttgagtgagcttcttaatcctgagttctagtgtgattgcactgtggtctgaaagacagttggttataatttctgttcttttacatttgctgaggagagctctacttccaactatgtggtcaattttggaataggtgtggtgtggtgctgaaaaaaatgtatattctgttgatttggggtggagagttctgtagatgtctattaggtctgcttggtacagagctgagttcaattcctgggtatccttgttgactttctgtctcgttgatctgtctaatgttgacagtggggtgttaaagtctcccattattaatgtgtgggagtctaagtctctttgtaggtcactcaggactggctttatgaatctgggtgctcctgtattgggtgcatatatatttaggatagttagctcttcttgttgaattgatccctttaccattatgtaatggccttctttgtctcttttgatctttgttggtttaaagtctgttttatccgaggctaggattgcaacccctgcctttttttgt

SEQ ID NO: 24815 - DNA, 2300 bp, Homo sapien
tgttaaacgagtcattttgttaaatgagtctttggagatgagagggatacattaaccttttcttgtgggaaaaacatttggactcagaagtaaaaatggatccctcactggtcagaagcattgactcaaaggcatgcctcatttcatgccattcatcttcactctcctgggcctccaaaccccaaatgtgccaacagtagtcccatcgcaacattatgtgggcattacagttctacacatccttttctgttggggatcttgcttttttaaaaaaacagaagtagcaaaatgatgctgattcttacttggtttctcataattaccgataatattttgtttaaaatagtgagaatcagccctgccacaacttggtcttgaatgctctcatctttatatctaaccagtcaccttacatgttcaatattccagctgagtatcacttccagatatgttcagcatagttattcaataggagtacttaataaagacaaaatgtcacccaaactgtattttctctctgtgttatgtggaatttgcctgactttggtcaggatatattttgtctatccagttctctgtgtctactgtttttgtcactctgtcgtggaaggaaattaagttgatttgacaggatttatttttcacagtgccaaggagattttacccagtaactcatgattttctaggtgcttgaaaattgattttttgatgatatgtttcagtaagttttcaactaaatactgatgctgacaggtctgtaatttctaaagttatctgttttttaatcttcccagagtagaaacaagaaacacaccaagataagtactgcatttagtctttttaatatagcagaatgtctaagtcctttttaagttcatagatgttgagctaattgttctttattgactttggcaaactcttggaaaaataattaagtcaccagaatttgcagttcaaaatgtgaccagtttataacattagccttgtagtcgaacctttatatcacaccctgtatcgtctccaaataccatatcataactgccctatattttaagctttcaaacaagatttctgaaacctacagtttgaatactggctaagcactgcagttatttatataatttatggtcatttttatatatgaaaattcattgattaaagttgtaagatttaatttattatattaaaatgcatttctgctattgaattcctttatgcaaaaaaatcaacattgtctttagtagtatatcactgaaccccttatatataaaaaccccagtttggaacaaagagctattagatgaccaaataagaatcaaattagactctgcaattagagtctgcgaagagaaagactttacttatttgaaatagtatatagcttactatatgtaaaataaaataaaattatctcagaagctgtggtctcctataatttgtagaagatgataactgatatcgctaagcactttttggttgcaaataactatacttaaatactgctaataaaagctgacatccgctgatcacttgcttcataccaagcactatcctaagttctttatgagcgtgatttcatttattttgttcatctcacaacagtatagttagaacatactattatcatcccaattttcaagtgaggaaactaatgtttggatatattaaataatgcatctaatgtcatatactagtgtttgagtaggaatttgaagccatttggtttgaatctggactctatgttcatgatcattatccaaaattctcaggtgtcccaacccctcacaaatgactttgaattaaatattaggtttatttttatatgtatggaacctgacgcacagtgataattaaagtgtagctcagccatagagtgagccattggtcactatgggtctttgggttaaaacatacctttaagaatatgtaggaaaaaaatgataatagctaactcagcagcattcattaattcatctgcagcagattaacttgttccaaaataatgagataatctgattctgatggaacatggagcagacaaattcttctagaacccgacctgtttctatgtgggtgtatccaggaagtcaggattatttggagaaatctggcaggtctctaggcagacaaaagggaacatctggtagggactgggacatgtagaaaaaaggtaagattttcctaagaaaaaccacttctttcataattttttctacacatacatgcttctctttgatagtttctgacaggacactattttgcctctctctccctatttcttttaagtaatatacattaaa

SEQ ID NO: 24816 - DNA, 2300 bp, Homo sapien
aagtgttttgagttccttcaacattgtataaaatatcaatggtcacttcaactgaaacttgcaatgtggaatatttacacgttgcgtgacattcattgtgttgctagccgcatagctatgatagttaggtatatgtcaaaagtgaagaacacatcctagtataaagggcaccaaaccagttattatctgcctttagcacctgctttctcttgagatgtttgtgtcaccaaatatttcttaaatatcagggaactgcttattttgcaactaatcaataaaagggcagtttatgaaatactgaatgtgaatgtataacactggtcatgagaaatgatcctgttaaatgtttatcagggatctttgtattgaattaatttaactttttcgtgctgtgaaatgctgtcataaaacaaacgtttagataaatgagattataccagaggatgcacagcataaatatgttgtcctaagattctgaccttctttgtttgcacatattgaggaagaagtagaattgtctaggcttagttttatgcattttgggttttttccaagaaatatattatccaaaatactttcttatataatttatttcactttattgtcaggcatagaaatcactgaattaatagtctgtctcatttagacatcaaataaaacctgggaatctaaatggagggtagatgttaatgacatttaatctagtataaacatgtttaaatccattgctttcctcttaacatctagctcatgtcagcaatactgaggattcagaagttttagatgggatgaggagaagaaaaaattttaacatgggtcctgcaagggaatggaagactacctgagtcacttttgtcagttctgagtagtcagaaggcagcatgaagacattgcctacataagggctgggactagatatagagtaaactaagaaataaagtcccaaaatagactgatcttaatgaaaagacttggagaaggcaataacaggataatcgtctatcctgtaatagggagaacaagacaacagcatccaggctattggacatgtctgcatggaagtcttggattgccaaactccattgcaaacagttgagacatttggggtaaatataaatgaaaacattataaataataatattttcactgtcaagtcattcatagcattagaaaataaaaaccttaccagatgaataacataatgaacttagaaataataaatctttattctataaaagattttaaaaattggcatttgagtagcatccagatcttgttctctaaaactcatttttcaattaaaggaatcagagtttaacatgcttaaaagatttgaatgtgccagatggtttggaagtgctcaaaaaatcatggatatataaaggactcaggggtctacttgaaggagttctcaatgttctagtatgggacaatttaaacaacaaattaagtaacaatagtaacagattgtagccaatagaataaggtaagtatccatgcatgatagatattaacatgaataagaaattgaatgcataacaaataggaaggcatgcattcttccataaagtacaattccaagtaatttctatagaatgcacaatggaaatataaaataaccacgaagcaaactccagagcaattggggcagaaaagagacactgatgtatttaacatagatgacaaataggacatttgcataatctcaaagtatcttcccacagatatgccttaatttcaaagaagaaaacccaactttgcatgagcagtaataagacatgtggatatcaagcaccccctactctaatgcacttgaaagcatctaacattacctctgttgtattattgccaaatacctgtaaactcaatgtattaagaagaaaaccgcagacaaacccaagctaagggacattctactaactgcctgccagtattctttagaagtatcaaggcctgaaacacgataaaagactgaggaactttcagattagtcgagacacaggaggcatgacagctgagtgcaatgtggaattctgaatttgatcctgggccagaaaaaaaaattaatgggaaaactttagttggaggagccaagatggccgaataggaacagctccggtctacagctcccagcgtgagcgacgcagaagacaggtgatttctgcatttccatctgaggtaccgggttcatctcactagggagtgccagacagtgggcgcaggccagtgtgtgtgcgcaccgtgcgcgagccgaagcagggcgaggcattgcctcacctgggaagcgcaaggggtcaggg

SEQ ID NO: 24817 - DNA, 2300 bp, Homo sapien
gccacatgtaatggcatgtctgacactgtgtctcaacagcatgatacctcactacaagttatgaacatatggattttttgtaatagttggaaacacatgttaaagggaatgccctgaaaaaaatgacaagttctttttctctatttttctcctgcaattgtttttagcttcagttaaagttcactctaatgaagacagcatacatcatatattttgggagtatccaaagatgatatgattaccagataacaatatttctagtgattttatatatatgtgtatatatgtgtatatacacacatttgtaataaatgtatgtacacacatatacatagtgaatatattcatatatatgaatatatattcatgtatattcatgtgtatatgtatattatatatttgtgtgaatatatatcttcacatatacttatgtacatgtgatatatgtatatatatatttacgtgtgtgtatatatcttcatatatacttgttatgtacatgtgatgtatgtatatatatatttacatgtgtgtatatattatatataaattgaaaagcttttcttttctaaccatagcaaagacatagaaaatgtatctactctaagaatgtttcgaagcttttagctgtctctcaaacttgactcactcatgtctgtgtacttaagaggtaacaaaagtgaaaaacaattactgacatcattatctgaatggctgcttagagaaatacaatagtgccttcttatccatgggggtcatgttacaaggcccttagtggatgcctaaaaccacatatagtaccgaaccctacatatactctgtcttttcctaaatatatgtatacctataataaagtttaacttttaaattcagcacagtaagagattcacaacaataactcataataaaatagactaactaaaacactatgctgtaataaaagttaaataagagtgatttgaccacaagcactgcaatactacgatagtccatctgataaccaagacagcttctaagtgaatcacggtgggtagtatggacaaacaaactgatgattcacgtcctgggcagatggagtgatcctcagatcagcatgcaatttaaaatttatgaatggtttatttctggaatttttcatttcatattgtggaccgcaggtaaataaaactgcagaaaccaaacctacagttacagggaagactactgtgtgacctcctgtatgaaaatctttaacttatgtgtagctgttgaaaacattttcaacatattacttgacatatttaaaactagacttttgcttcttgaactgtcttgagtcatttacttactttttgcaatgtttttattcaaaatatttagtctacttggctggtttgttttatttgattacattacttggcctatacaataaggaatctgtatattccttattggcctatacaataaggaatgctagactttctatgttggaaatatcctttatatttcctttctttgggaatcttttatctcttcacctttaaattactatctgaagaagtaatttcataatctttatgaatcgaaaaactgtattcaatgtatgctggctgaatgggcttgtaatttgggaactctataattgctaaggttatcattacagggtgaacatgacattaaactcatttccttctgtcttcagcatataatgtttttacattgccattttttgaaagtccctcatcaacatttctcaggcctagaaagttgcatccattaacatatattatgttgtattgtgacccttatttccactctctctcttttatgagagaaaaaaacacacacacatgaaaggaaggctaattcagaagtggaaccagtggcagaaaagtaaactaagcgttcagatatatgtttgcagttcttggcaaagttatcaacattttacctgaagcatattgaaaacatccctcatgacagaaatccctccctctttcatttctgccttctaacccccctaaaaaacacatctgtttcctactgatagcttttaacatacaaccctttaatgtcttgtaacaggaagtggaaattgagcgaagtttgtgctcgccagcttttaagagtcaccctgggagccagctggaggattctgtgaaagattcagacaagaaaggcaaggaaacatcttttgacaagatgtcacctgaaagtggtcacagccgcatctttgaaggttagcataacattttgatatgctttcttgacatcataccttgtacaacatgagtggttaataaataaaatatatgaggggt

SEQ ID NO: 24818 - DNA, 2300 bp, Homo sapien
cacattctcctttgctacttcactgtttaattggtacttcctatttctcagtgtgtgcataagaaagccatagaatattcccactatatgcctaatagatggaaagacttgtcacagaggtaaagagctgtcattagtgcccatgcattttttttatatctgcagttgtcaatgattgttattgctgtctctagcataatgctattggtagcctcaaataaaacttgattatgcaaggcaccttgttatatggaattctgattctttgaacttgaaggaatgaatatggatccttctcaagaaactaaagcactttgttcattgttctatcctcagttttgagaacattcctcgcaagtaggtgtttgaatagaattaatgtatcagtgaaagtttgctatcttattcatgtatgcattcctcacttattcattatgtgaacttttccttagcacaaactgtgtgttaaacatattatcaaatatcacttgaaatatgtggattattaactatgcctaggaagcattctgcttggaaaaaaaattacagtggtcttcaatttaatgagatacaatctacatttaaacgtgtaagtccatattttgtctttggctttttgtaggacttctaggaaggcctcaacatttttttcttaattctccttcctagaaaagcataagatcagattttactataacatctctaactacatgactaactgctccttggttgatgagattttaaaccctgtacaccaaatacccttgagggaaaaagtctcatacatctactggcattaattttataccaattattagtttaagatattgggatttgatagtgtaaagtgttttaacttactgcaaaaaacgttttagtatactattttaattaataatgataatatacccatgctcacttgactattctatactaagacaaatttttaaaagtcaaatctcaaaaataatatttattattcatttggatatcaagataaaagtgaagtcccaccttcaggcacattcaaaaacatgttattgtaaagagtcatctgtctgtatccttatttttgaatgttaagatttttagcagtatgctaactgcttcatcatatcaatcaatcaatcaatcaatcaatcatatacttgtgtcagaatcatattctgtagtaaaagcaggactggatcaccaaaattaataggagctccaagtttgcaattcattcaggttcaactgttctaacttaaccaaaattaagagtagttccacatgtgaagatagggagacataaactagcataataatttatattggttacatttaatggttatattcttcaactgaactctggatatgtcattgtactggatggccaatttgaagactagtatgtctttttgtaacataaaaatgtggcttgtaaacaacaaaaaaaatacatatatattttttcaggctcatctttctcatactgggtaatacatcattaacatttttgcttgctaagtgtagcaggcagaataatggtctccagatataactatgtcccaatccccagaatttgtgaatacattaaattacatggcaaaggagaattaagttgcagatggaattaaggctgctaattagatgattttatgacaatgagataatatttgcttatctgggttggtccaatgtaatcataagggtccttaaaagtggaagacagtgtcagttagatggcagtgtgagaagttctcagtctgatagaggcaagggctgttagcccagggaagtgggcagcctctagaagctgcaaaaggcaagggaatggattgtcccctccagcctgcagaacagaatgcatgctatctgatacctgccaacacccaggaagactcattcagggcttctgacctatagaagtataagatcctaagattatgccattttaagccactaaacttgtggtaatttgttatagcagccaagaaaactaatatactaaagaatctcattttttttcagaaattgtcactgaaattgcacaaataaaaaaagttaaaatttttacttttcttaaggcattgtctgtctgtctgtgtgctttcaggaggcaattcatagcagccaggttggcacttcaagaagcagccaggaaatggcaagaaatgaacaagaagggtccaaagtacagaaaattgatgttcatggaacagaaatggtaactatttagaaaggcagtactttcaaacagtttccaggactgtatggaaattatgactttgttgtaagcatttgcatttattgtcact
